United States Patent Application Publication US 2011/0183924 A1 - sequence listing, part 197

SEQ ID NO: 465637 - DNA, 2419 bp, Homo sapiens
aagcgccgccgcgtagcgggaggggcgaccgcggcaggcgctcgggttcttcctaacccgagcccgccgcgctggctccgccgaggacgccagcagctgcaggcagcgcttcagctctcgccgcctcgccatcgttggggcgagtcgtcgccgggtcactcccttattatgaccttcgaatctgacagcagggccagcggtggcctccttcaggctgcctctccagcccttaccaagatggccgcccctgtgggccggggcgccgaagccatcttggtaaaggaagcgcctgggagcacgcggcctgccccggcccgcctcgcgactcaaacactctgcagggaccctcctaagatcaaattggttccccccgctgtcctaagccagaggcttactttcagatcgcatgaacgcattcctggacaccagccacagttgctaaaactaaatgggatcctgcagacccattgacggactgtcatagccaactcaatcacagtcgagaagcatttgaatacttacagcctatggcgctaggatcctggtagcgaagaaactaaactctaatttgaaatgttgtacagctagcttagagtggctgctgaacttaagggtgattaagagctgcttgcacctgggtggagctgaaactgcataaggtgaataatacctttgtgcaacagaagaaaaaaaaaaaagcctaatcagggcatggactttggccacatcagtgtcatagagcttcttcacagcctgtttgatctggtgcttggtggctttaacatccacagtgaacacaagtgtgttgttgtcttctatcttcttcatggcagactcagtggtcagaggaaactctgtgacagcatagtgaggcctgaaccttcctctcacctgcccccagacacaggaagatttgggaccaattcagctggacatcgtatggtcgatctcctacctccattatctaggtctcttaaacctgctaccctgtcaccaactcccacacccctaaacatggccttgcctcttactcaatggagaaactgggcaccatcagaaggagctgccacataccctccgactcaccaaagagtctgcttcttacgccagttgcccttcaccatttcccagtgcctctcaccattccccagtgcccttcaccattccccagtgcccctcaccatttcccagtgtccctcaccatttcccagtgcccctcaccatttcccagtgcccttcaccattccccagtgcccttcaccatttcccagtgcccttcaccatttcccagtgcccttcaccatttcccagtgcccttcaccatttcccagtgcccttcaccatttcccagtgcccttcaccatttcccagtgcccttcaccattccccagtgtccctcaccatttcccagtgcctctcaccattccccagtgcccttcaccattccccagtgcctctcaccattccccagtgcccttcaccatttcccagtgcccctcaccattccccagtacccttcaccattccccagtgtccctcaccatttcccagtgcctctcaccatttcccagtgcccttcaccatttcccagtgcccttcaccatttcccagtgcccttcaccattccccagtgtccctcaccatttcccagtgcccttcaccattccccagtgcccttcaccatttcccagtgcccttcaccattccccagtgtccctcaccatttcccagtgcctctcaccattccccagtgcccttcaccattccccagtgcctctcaccatttcccagtgcctctcaccatttcccagtgcccttcaccatttcccagtgctcctcaccatttcccagtgcccctcaccatttcccagtgcccttcaccattccccagtgcccttcaccattccccagtgcccctcaccatttcccagtgcctctcaccattcctcagtgcctgatgccctctcttccctggacatgcacacatattgttatcttggatggccacccttctgtcctgcccaggccctgccagttctcctggatgactctggctcaagctggtgtcatctaaccctttttttggaacctgaaattggggggaaaaggagtaatgacactgctcagtggatgcccataggctgctgcctctcatccctgcagctctggcaacataacaattacctgggaggctctgagaaatgctggtgcccagatgtcactccaggcgaatgcaatcagaaaaggatggcatctgtaccttttagaagtttctcaggtgattctgccaagcggggagcccgagacccacagctttagggaaaagagaaatgacctctttgctcattccttatgatatgatagatttttaacatatatatctaaaagtaaatttatctttacccagggtctgtacagt

SEQ ID NO: 465638 - DNA, 1030 bp, Homo sapiens
cgagttgttgaccagcctgccacttgcctccctgcctgcttctggccgccttgaatgcctggtccttcaagctccttctgggtctgacaaagcagggaccatgtctacctttggctaccgaagaggactcagtaaatacgaatccatcgacgaggatgaactcctcgcctccctgtcagccgaggagctgaaggagctagagagagagttggaagacattgaacctgaccgcaaccttcccgtggggctaaggcaaaagagcctgacagagaaaacccccacagggacattcagcagagaggcactgatggcctattgggaaaaggagtccccacctcctcctcctccccctcctccactcccagagaaaaagctcattaccagaaacattgcagaagtcatcaaacaacaggagagtgcccaacgggcattacaaaatggacaaaaaaagaaaaaagggaaaaaggtcaagaaacagccaaacagtattctaaaggaaataaaaaattctctgaggtcagtgcaagagaagaaaatggaagacagttcccgaccttctaccccacagagatcagctcatgagaatctcatggaagcaattcggggaagcagcataaaacagctaaagcgggtggaagttccagaagccctgcgataaaaacatgatctttagaagaggatgcagaactgttcagtggtattacatgaaatgcattgtgagatgtttctaaaataccttcttcaattcaaaatgatccctgactttaaaaataatctcacccattaattccaaagagaatcttaagaaacaatcagcatgtttcttctgtaaatatgaaaataaatttcttttttatgtcgtgagatttgtattggcaagaagcagttaatttaaagatgctcttcctatctgtggatgtgttggtaactccgagttgtaatgagttcatgaaatgtgctgttatttttgtaatctcaataaatgtggattgaagttttttccctttttttaaagccaaactaatatttt

SEQ ID NO: 465639 - DNA, 2060 bp, Homo sapiens
cgagttgttgaccagcctgccacttgcctccctgcctgcttctggccgccttgaatgcctggtccttcaagctccttctgggtctgacaaagcagggaccatgtctacctttggctaccgaagaggactcagtaaatacgaatccatcgacgaggatgaactcctcgcctccctgtcagccgaggagctgaaggagctagagagagagttggaagacattgaacctgaccgcaaccttcccgtggggctaaggcaaaagagcctgacagagaaaacccccacagggacattcagcagagaggcactgatggcctattgggaaaaggagtcccaaaaactcttggagaaggagaggctgggggaatgtggaaaggttgcagaagacaaagaggaaagtgaagaagagcttatctttactgaaagtaacagtgaggtttctgaggaagtgtatacagaggaggaggaggaggagtcccaggaggaagaggaggaagaagacagtgacgaagaggaaagaacaattgaaactgcaaaagggattaatggaactgtaaattatgatagtgtcaattctgacaactctaagccaaagatatttaaaagtcaaatagagaacataaatttgaccaatggcagcaatgggaggaacacagagtccccagctgccattcacccttgtggaaatcctacagtgattgaggacgctttggacaagattaaaagcaatgaccctgacaccacagaagtcaatttgaacaacattgagaacatcacaacacagacccttacccgctttgctgaagccctcaaggacaacactgtggtgaagacgttcagtctggccaacacgcatgccgacgacagtgcagccatggccattgcagagatgctcaaagtcaatgagcacatcaccaacgtaaacgtcgagtccaacttcataacgggaaaggggatcctggccatcatgagagctctccagcacaacacggtgctcacggagctgcgtttccataaccagaggcacatcatgggcagccaggtggaaatggagattgtcaagctgctgaaggagaacacgacgctgctgaggctgggataccattttgaactcccaggaccaagaatgagcatgacgagcattttgacaagaaatatggataaacagaggcaaaaacgtttgcaggagcaaaaacagcaggagggatacgatggaggacccaatcttaggaccaaagtctggcaaagaggaacacctagctcttcaccttatgtatctcccaggcactcaccctggtcatccccaaaactccccaaaaaagtccagactgtgaggagccgtcctctgtctcctgtggccacacccacctcctcctcctccccctcctccactcccagagaaaaagctcattaccagaaacattgcagaagtcatcaaacaacaggagagtgcccaacgggcattacaaaatggacaaaaaaagaaaaaagggaaaaaggtcaagaaacagccaaacagtattctaaaggaaataaaaaattctctgaggtcagtgcaagagaagaaaatggaagacagttcccgaccttctaccccacagagatcagctcatgagaatctcatggaagcaattcggggaagcagcataaaacagctaaagcgggtggaagttccagaagccctgcgataaaaacatgatctttagaagaggatgcagaactgttcagtggtattacatgaaatgcattgtgagatgtttctaaaataccttcttcaattcaaaatgatccctgactttaaaaataatctcacccattaattccaaagagaatcttaagaaacaatcagcatgtttcttctgtaaatatgaaaataaatttcttttttatgtcgtgagatttgtattggcaagaagcagttaatttaaagatgctcttcctatctgtggatgtgttggtaactccgagttgtaatgagttcatgaaatgtgctgttatttttgtaatctcaataaatgtggattgaagttttttccctttttttaaagccaaactaatatttt

SEQ ID NO: 465640 - DNA, 1430 bp, Homo sapiens
cgagttgttgaccagcctgccacttgcctccctgcctgcttctggccgccttgaatgcctggtccttcaagctccttctgggtctgacaaagcagggaccatgtctacctttggctaccgaagaggactcagtaaatacgaatccatcgacgaggatgaactcctcgcctccctgtcagccgaggagctgaaggagctagagagagagttggaagacattgaacctgaccgcaaccttcccgtggggctaaggcaaaagagcctgacagagaaaacccccacagggacattcagcagagaggcactgatggcctattgggaaaaggagtcccaaaaactcttggagaaggagaggctgggggaatgtggaaaggttgcagaagacaaagaggaaagtgaagaagagcttatctttactgaaagtaacagtgaggtttctgaggaagtgtatacagaggaggaggaggaggagtcccaggaggaagaggaggaagaagacagtgacgaagaggaaagaacaattgaaactgcaaaagggattaatggaactgtaaattatgatagtgtcaattctgacaactctaagccaaagatatttaaaagtcaaatagagaacataaatttgaccaatggcagcaatgggaggaacacagagtccccagctgccattcacccttgtggaaatcctacagtgattgaggacgctttggacaagattaaaagcaatgaccccacctcctcctcctccccctcctccactcccagagaaaaagctcattaccagaaacattgcagaagtcatcaaacaacaggagagtgcccaacgggcattacaaaatggacaaaaaaagaaaaaagggaaaaaggtcaagaaacagccaaacagtattctaaaggaaataaaaaattctctgaggtcagtgcaagagaagaaaatggaagacagttcccgaccttctaccccacagagatcagctcatgagaatctcatggaagcaattcggggaagcagcataaaacagctaaagcgggtggaagttccagaagccctgcgataaaaacatgatctttagaagaggatgcagaactgttcagtggtattacatgaaatgcattgtgagatgtttctaaaataccttcttcaattcaaaatgatccctgactttaaaaataatctcacccattaattccaaagagaatcttaagaaacaatcagcatgtttcttctgtaaatatgaaaataaatttcttttttatgtcgtgagatttgtattggcaagaagcagttaatttaaagatgctcttcctatctgtggatgtgttggtaactccgagttgtaatgagttcatgaaatgtgctgttatttttgtaatctcaataaatgtggattgaagttttttccctttttttaaagccaaactaatatttt

SEQ ID NO: 465641 - DNA, 1788 bp, Homo sapiens
cgagttgttgaccagcctgccacttgcctccctgcctgcttctggccgccttgaatgcctggtccttcaagctccttctgggtctgacaaagcagggaccatgtctacctttggctaccgaagaggactcagtaaatacgaatccatcgacgaggatgaactcctcgcctccctgtcagccgaggagctgaaggagctagagagagagttggaagacattgaacctgaccgcaaccttcccgtggggctaaggcaaaagagcctgacagagaaaacccccacagggacattcagcagagaggcactgatggcctattgggaaaaggagtcccaaaaactcttggagaaggagaggctgggggaatgtggaaaggttgcagaagacaaagaggaaagtgaagaagagcttatctttactgaaagtaacagtgaggtttctgaggaagtgtatacagaggaggaggaggaggagtcccaggaggaagaggaggaagaagacagtgacgaagaggaaagaacaattgaaactgcaaaagggattaatggaactgtaaattatgatagtgtcaattctgacaactctaagccaaagatatttaaaagtcaaatagagaacataaatttgaccaatggcagcaatgggaggaacacagagtccccagctgccattcacccttgtggaaatcctacagtgattgaggacgctttggacaagattaaaagcaatgaccctgacaccacagaagtcaatttgaacaacattgagaacatcacaacacagacccttacccgctttgctgaagccctcaaggacaacactgtggtgaagacgttcagtctggccaacacgcatgccgacgacagtgcagccatggccattgcagagatgctcaaagtcaatgagcacatcaccaacgtaaacgtcgagtccaacttcataacgggaaaggggatcctggccatcatgagagctctccagcacaacacggtgctcacggagctgcgtttccataaccagaggcacatcatgggcagccaggtggaaatggagattgtcaagctgctgaaggagaacacgacgctgctgaggctgggataccattttgaactcccaggaccaagaatgagcatgacgagcattttgacaagaaatatggataaacagaggcaaaaacgtttgcaggagcaaaaacagcaggagggatacgatggaggacccaatcttaggaccaaagtctggcaaagaggaacacctagctcttcaccttatgtatctcccaggcactcaccctggtcatccccaaaactccccaaaaaagtccagactgtgaggagccgtcctctgtctcctgtggccacacctcctcctcctccccctcctcctcctcctccccctccttcttcccaaaggctgccaccacctcctcctcctccccctcctccactcccagagaaaaagctcattaccagaaacattgcagaagtcatcaaacaacaggagagtgcccaacgggcattacaaaatggacaaaaaaagaaaaaagggaaaaaggtcaagaaacagccaaacagtattctaaaggaaataaaaaattctctgaggtcagtgcaagagaagaaaatggaagacagttcccgaccttctaccccacagagatcagctcatgagaatctcatggaagcaattcggggaagcagcataaaacagctaaagcggattcccaccctggtttaaaaaaaaaaaaaaaaaaaatttggtcagacgctgatttaaagaactaaattata

SEQ ID NO: 465642 - DNA, 2025 bp, Homo sapiens
cgagttgttgaccagcctgccacttgcctccctgcctgcttctggccgccttgaatgcctggtccttcaagctccttctgggtctgacaaagcagggaccatgtctacctttggctaccgaagaggactcagtaaatacgaatccatcgacgaggatgaactcctcgcctccctgtcagccgaggagctgaaggagctagagagagagttggaagacattgaacctgaccgcaaccttcccgtggggctaaggcaaaagagcctgacagagaaaacccccacagggacattcagcagagaggcactgatggcctattgggaaaaggagtcccaaaaactcttggagaaggagaggctgggggaatgtggaaaggttgcagaagacaaagaggaaagtgaagaagagcttatctttactgaaagtaacagaggaggagtcccaggaggaagaggaggaagaagacagtgacgaagaggaaagaacaattgaaactgcaaaagggattaatggaactgtaaattatgatagtgtcaattctgacaactctaagccaaagatatttaaaagtcaaatagagaacataaatttgaccaatggcagcaatgggaggaacacagagtccccagctgccattcacccttgtggaaatcctacagtgattgaggacgctttggacaagattaaaagcaatgaccctgacaccacagaagtcaatttgaacaacattgagaacatcacaacacagacccttacccgctttgctgaagccctcaaggacaacactgtggtgaagacgttcagtctggccaacacgcatgccgacgacagtgcagccatggccattgcagagatgctcaaagtcaatgagcacatcaccaacgtaaacgtcgagtccaacttcataacgggaaaggggatcctggccatcatgagagctctccagcacaacacggtgctcacggagctgcgtttccataaccagaggcacatcatgggcagccaggtggaaatggagattgtcaagctgctgaaggagaacacgacgctgctgaggctgggataccattttgaactcccaggaccaagaatgagcatgacgagcattttgacaagaaatatggataaacagaggcaaaaacgtttgcaggagcaaaaacagcaggagggatacgatggaggacccaatcttaggaccaaagtctggcaaagaggaacacctagctcttcaccttatgtatctcccaggcactcaccctggtcatccccaaaactccccaaaaaagtccagactgtgaggagccgtcctctgtctcctgtggccacacccacctcctcctcctccccctcctccactcccagagaaaaagctcattaccagaaacattgcagaagtcatcaaacaacaggagagtgcccaacgggcattacaaaatggacaaaaaaagaaaaaagggaaaaaggtcaagaaacagccaaacagtattctaaaggaaataaaaaattctctgaggtcagtgcaagagaagaaaatggaagacagttcccgaccttctaccccacagagatcagctcatgagaatctcatggaagcaattcggggaagcagcataaaacagctaaagcgggtggaagttccagaagccctgcgataaaaacatgatctttagaagaggatgcagaactgttcagtggtattacatgaaatgcattgtgagatgtttctaaaataccttcttcaattcaaaatgatccctgactttaaaaataatctcacccattaattccaaagagaatcttaagaaacaatcagcatgtttcttctgtaaatatgaaaataaatttcttttttatgtcgtgagatttgtattggcaagaagcagttaatttaaagatgctcttcctatctgtggatgtgttggtaactccgagttgtaatgagttcatgaaatgtgctgttatttttgtaatctcaataaatgtggattgaagttttttccctttttttaaagccaaactaatatttt

SEQ ID NO: 465643 - DNA, 1175 bp, Homo sapiens
cctgaccaatggtttggactgagactaagaacagagctaatctgtgagtgttataatgcacggcaaaaggagaattaaagttgcagatggaattaaagttgctcatcagctgactttaacaagaattatcctggtttatcttatgttaacacaaaggaccttagaagatggaggcagaagcaagagcttcctttcccggagggttggcccatctgctccatggagaggagagtgtgctgactcaggaagccgagccagccaggccctgagcggtgcctctgccaggacgctggcccacgcggccactgcacaaatgacagcatgtgcgttccagggtgcttggcagactctctcagtgaaggagcttcggcatgaaaaagtccccatcaggcggatcccacgccctctgcacagcttgtgtaagggcacagcttgtgtaaggacaaaaactaaccagacacctactatgtagaaggctcttcaatgattcttctttgagtgttctttacacaaagaacactttgtctcttgaggcgaaatgatgtatccagctagcgccatcgaagacatttggaaaactcaggtttcttcatggcttgcaagattacctagcatctggaagaggctctgggagggtccaaacaacaaaccacgcggcgttctctggtggctgtgctgggacgagtgggcggaaacagccgcaggtctctctcttctcttcagcctgaaactcactgcacaaataccagaggttttttttagagattagataaatttgcatccttctccccccaaccccgcccctaagccagaggaagtgcttgaggaagtaatgtgtttaaagaatgtgggggaggggagcttacattaggaagcaggactcttagcgtgtagccagaaaccccaataacctttaagctgttaacccttgaggatacggctcaatggtgtacccacgtggagttcattatttatctccgaaagccctgtctgtctctcattccgacccttaaacgaatcatctgcagtttggccaacaattcagttccagctccctgggaataccagcaaatcccgggacagctgttccttctgctgaaaacaccaggaaaatccgcccaggagctcaggctgtttgaccagaaagcctggtgttggtcactgtcagagagcac

SEQ ID NO: 465644 - DNA, 3351 bp, Homo sapiens
  misc_feature (6)..(7): n is a, c, g, or t
  misc_feature (9)..(9): n is a, c, g, or t
agatcnntngaggcttattcacagtcacgagaacagcatgggaaggacctgcctccgtgattcagttacctcccactgggtccttctcacaaaacatgggaattcaagtatcttgagacttgatgaactagataaagagactaaaggagataagccagctgagaatagagcattggaaaagactgaattcggtgaacaagaggaggagacaaaaaggaggcagcaagagagtgaagatattcgaatccagcttgtgaaagatgctagaagatttgatggggtggatgctgaatttaagaagagaaaaattctgtgtgggcctaaagtggtgacagtgcttatcacatttatttttataaaaacggtgtgcttctacattgcttttgatcttcatctaagagttgaaaagcaaaatttagaaaagattgttctaatatccacggccccgtattgtactttcatgcaggagttaatgttcaagacagccaaagtagaaaatgtgttagaagcaacgtgcagacctaatctctatgaaaaacttaaagatttacagtccaggctttctctttgtgaaaaagctctcgctgaatacctggaaaccaagcgcatagcctttcctcgcttctatttcgtctcttctgctgatttacttgacattctctcaaaaggagctcagcctaaacaggtaacatgtcaccttgccaaacttttcgacagcattgcagatctgcagtttgaagacaatcaggatgtttctgcacacagggcagttggaatgtacagcaaagaaaaggagtatgtcccattccaagccgagtgtgaatgtgtgggccatcaagtgttgaatacctactatgcatcagatgctaggtcaggctttggggagttccgaaatggcccttgtcttcgaggagctcttaggcccattgagaaaatggatatgcacataataatggaggttgtcagtccccaagcttttacatggctgtctcaacttcgtcaccgatgggaggatacccagaaacactgctttgttaatatttgtgatgcccagttccagtacttctatgaatacttaggaaacagccctcgactagtgatcactcctctaactgacagtggggctcctgctggcccagctggtaccgggaaaacagagaccaccaaagacctaggacgtgcccttggcatgatggtctatgtattcaactgttcagagcaaatggactacaaatccataggcaatatctataagggattggtgcagacaggagcttggggctgctttgatgagttcaaccgaatctctgtggaagttctgtcagtggtggcagtacaagtgaaaatgattcatgatgccatcagaaacaggaagaagagatttgtatttcttggggaagctatcacactgaagccatcagttggaatatttattactatgaacccgggttatgctggtcgaaccgaattaccggaaaatctcaaagctcttttcaggcaagaatttttaaaaatctatgccatgagggttattgttctacactgtccttgtaaaatttttgtctggctttggcatcagagtagtgctgacatcatgaaaccctgtgccatggtggcccctgacattgagctaatctgtgaaatcttgttagttgctgaaggttttgtggatgcgcgtgcattagcccgaaagttcattacgttgtacacgctttgcaaggagcttctctccaagcaggatcattacgactggggacttcgtgctattaagtctgtcttggttgtggctggatctctgaaacgaggagataaaaatagacccgaagatcaggtactcatgagagcattaagggatttcaatatgcccaaaatagtgactgacgacatcccagtgtttctgggcctggtcggtgacctgtttccagccctggatgtgccccggaggaggaagctgcactttgaacagatggtcaggcagtctaccctggagctccgcctgcagcctgaagagagcttcatcctcaaagttgtccagcttgaggaactgttggctgtgcggcactcggtctttgtagttggaaatgcaggcacaggaaagagtaagattttgagaacactgaaccgaacatatgttaacatgaaacagaagccggtttggaatgacttaaaccctaaagctgtgacaacagatgaactctttggtttcatacatcatgctacccgagaatggaaagatggcaagtacgttaccttctataaatccccacaactgttcatgaaggaaggtttttgttatctctgtttggcatatgggaagctcagtctcttctcatccattctacgagaacaagcaaatcttaagcatgatggaccaaaatggatagtcctggatggcgatattgaccccatgtggattgaatcactgaatactgtgctgaccctcgccagcaatgagcgcattgcactcactcccttcatgaggcttctgtttgagatacatcacttaaggagcgcaaccccggccactgtttccagagctggtattctgtatgtgaacccacaagatctgggctggaatccgtatgtggccagttggatagacagaaggcggcatcaatcagaaaaggccaatttgactattctttttgataaatatgtccctgcatgcttggataaactgagaacaagctttaaaaccatcacttcaattcctgagagtagcctggtgcaggagtcactgggccaggtcatcctgtggatgcatagaggtatcactggaccaggtcatcatgtggatatggcagtgactggaccagatcatcctagggatataggagtctctgggccagattatcctatggatataggagtcactgggccagatcatcctgtggacatgggcatcactgggacaggtcatcctgtagacatgggcatcactgggccaggtcatcctatttctgattatcaagctgacttcagtcggtggtggcagaaagagatgaaagcagtgaaatttccgtcgcagggaacaatctttgattattatgtggaccacaaaactaagaaattattgccctgggctgacaaaattgcccagtttactatggatccagatgtgcctctgcagtatcaactctaagtcccaaatataatccaaatatcatctacatgatacatttcatctatcagttcatttcatgaattgaggtacaattcatcctgaggcaaaattcctctctagctgtgaacttacaaaaccagagaagttacctgcttgcaaaatacagtggtagaacaggcataggatagacctttctattccaaaagggagaaatcagaagaaagggg

SEQ ID NO: 465645 - DNA, 2803 bp, Homo sapiens
gcggccgcgctgcctccaggaagcctcacgggccttcgtctgccgggccgcggcgccggctcccaggatgcagtgtggaccggccgggcgctgacggaggcggcgcgactgcgggcggcgcggcgcaggggcagccagcgaggagcggcggcagaggaaaggccaggcaggcgccgcctgcggagagcaccgggcggccgggcctgcgtggtgccgcgcgcggcggcggcgacgacgacttcctccgggccgggcgggacagcgcagggccatggccgaggcggtcgcggctccgatttctccgtggacgatggcagccacgattcaggccatggagaggaagattgaatcgcaggctgctcgcctgctttccctagaaggtcgaaccgggatggccgagaagaagctggctgattgcgagaagacagccgtggagttcgggaaccagctggagggcaagtgggccgtgctggggaccctgctgcaggagtacgggctgctgcagaggcggctggagaacgtggagaacctgctgcgcaacaggaacttctggatcctgcggctgcccccgggcagcaagggggagtcccctaaggtgcccgtgacctttgatgatgtggccgtgtatttctccgagcaggagtggggcaagctggaggactggcagaaggagctctacaagcacgtgatgaggggcaactacgagacgctggtctccctggactacgccatctccaagcccgaggtcctctcccagattgaacaagggaaggagccctgcaactggcgccgccctggccccaagattccagatgttcctgtggaccccagtccaggctcggggcccccagttcccgccccagacctcttgatgcagatcaagcaggagggtgagctccagctccaggagcagcaggccctgggcgtggaggcgtgggcagccgggcagccagatattggggaggagccctggggcctcagccagctggattccggagcaggagacatctccacggatgccacctctgcatgctcggacgggaccctgaagctcaacacagcagcctccacggaagatgtaaaaattgtaataaaaacagaagtccaggaagaggaggtggtggccacacccgtacatcctactgacctagaggctcacgggaccctgtttggaccaggccaagccacacggttcttccctagtcctgcccaggaaggagcctgggaaagccagggcagctccttccccagccaggaccctgtgctggggctgcgagagcccgcccggcctgagagggacatgggtgagctcagtcctgctgtggcccaggaggagacccctcctggggactggctcttcggaggggtccggtggggctggaatttccggtgtaaaccgccagtgggcctgaacccgaggacggggcccgaggggcttccttactcctccccggacaacggagaggccatcttggaccccagccaggccccaaggccattcaacgaaccctgtaaataccctggccggaccaaaggctttggccacaagccagggctgaagaagcaccccgcggcgccccccgggggccggcccttcacctgcgccaccgcagctgtggggcgcccgacgggtcgggcccgggcacaggcggtggcggcagcggcagtggcggcggcggtggcggcagcggtgggggcagcgcacgggatggcagcgcccttcggtgtggggagtgcggccgttgcttcacgcgccccgcgcacctcatccgccatcgcatgctgcacaccggcgagcggcccttcccctgcaccgagtgtgagaagcgcttcaccgaacgctccaagctcatcgaccactaccgaacgcacacgggcgtgcggcccttcacctgcaccatccaaatttaacgacgtctgcaaagtcccttttgctatataaggttaacacattcaccggttctggggactaggatgtggacatcctgggtgggggggggcgggtgcattattcaacttaccacacctcccaagagtcagggcaaccctcattgcttctctgaggccaggccaaatactccctgggacattcatatatgttctggtactgaaataacttgtgccaaaatgagaacatttgaggttcatcattccagccattccctcatcttggccaccctctgttgcccatcaaaaggtgctcatttgctgttacctcctcttgtcatcttttccttcatctttttacagttttgttctcttattcctgatgcttctgaagatggccccctccctccaactctttccattgttaggttgcaatgctgcatcattgtcatgttcacaggcagattgaagacaagatgagttaagctgcactttaaccatctcagtagcatcaagatctttgaagattgccctgaccacttctataaaatgaagtttctaattttgttgtaattgtcaagtttcttttagcccagagttgtacaattgtacctgattatttaaaaacattaaaaatacagtttagacatgaaatacatacacttaaataattatgttttataaaaaatttggtcaaagagtcataaatgcaaatattatggattgtatgacccaattacatctggaagttccagataggacctaataaacataactttaaatatagagctaagatagaatgaaataaaaggaaactccagtgtgccccaaatgaaggcaaaactgtacccccaagttgtcagcacatgggtcgctgctgggcctacctggagtggggtgaggagaaggatatgta

SEQ ID NO: 465646 - DNA, 511 bp, Homo sapiens
tgaacagcagttgaagagatctactaaaatgtgcatattttctaatgttctcttcagacgcgtccacagaagtgataagaaaaaaaaaggacattgcagagggcaaagccaagaggtttggagagtggtggataaggagctactccaggaagcagaacaaggactaagtcagcaggaacagccctcaaccagtgaccgatgggtgaatgaacacagcagctcaagtgggacagccttgagcatgggcaacaggataagaccctgtcgcaaagaaagagttggacttaaagataaacatgatttggatggatgcagagtgggcaacaggaataaagacatggatgtactatcaattttccatgcaaggtgggtcctcaggaacgcagatcagatctatgaaaaccacaggataatgcagtgccctggggcaagtagtaacagggctttgttaccattgtgttacgggttaaattgtgtccctccaaaagacatgttgaagttgtaaccttcc

SEQ ID NO: 465647 - DNA, 2698 bp, Homo sapiens
tggaagtacatgatcaaacaggtcttcatcctcatccttttcatgggcagggttatttttggttcatctatttcatcatttcatttaatttcctcatttcatttcatcctttcatcatttcgttgcatcatttcatttcatcatttcatctcatcatttcatttcattctttcatcatttcatctcaacatttcatttcatcatttcacttcatctcatcatttcatcatttcatctcatgatttcatttcatctcatttcatcttttcatctcatttcatcttttcatctcatttcattatttcatcctttcatcattttgttgcatcatttcatctcatcatttcatttcattctttcatttcatttcatcctttcatttcatttcatcatttcatctcaacatttcatcatttcacttcatctcatcatttcatttcatctcattttatttcatcttttcgtcatttcatttcatcattgcatcttttcatctcaattcatttttcatcaattcatttcatttcacttatttcatcatttcatcatttcacttcatttcatttaatatcatttcatcatttcatatcatttcatcatttcatctttccatttcatcatttcatcatttgacttatcatttcatttcatcatttcatttcctcatttcatcatttcatttcattgcatcctttcatcatttcatctcatttcatcctttcatttcattatttcatttcatcatttcatctcatcattgcatttcctcatttcatcatttcacttcatctcatttcataatttcatctcatgatttcatttcatctcatttcatcttttcatctcatttcatcatttcatcttttcatctcatcatttcatcaattcatcatttcatcatttcgttaatcatttcacttcatttcatcatttcatatcatttcttcatttcatcatttgatcttttcatttcatttcatcatttcacttcatcatttcatttcttcatttcatttcctcatttcatttcaccatttcatcatttcatttcatcattccatttcatcatttcatcatttcatttcatctcatcatttcattatttcatcaattcatttcatttacttcatcatttcatcatttgacttcatttcatcatttcatcatttaatatcatttcatcatttcatttcatatcatttcatcatttcatctttccatttcatcatttcatcatttgacttatcatttcatttcatcacttcatcatttcatttcatcctttcatcatttcatctcatttcatcctttcatttcattatttcatttcatttcatctcatcattgcatttcctcatttcatcatttcacttcatctcatcatttcataatttcatctcatgatttcatttcatctcatgatttcatttcatctcatttcatttcatcttttcatctcatttcatcatttcatcttttcatctcatcatttcatttcatcaattcatcatttcattatttcattaatcatttcacttcttcatttcatatcatttcttcatttcatcatttgatcttttcatttcatcatttcatttcatttcatcatttcacttcatttcatttcttcatttcatttcctcatttcatttcaccatttcatcatttcatttcatcattccatttcatcatttcatctcatcatttcatcctttcatttcattatttcatttcatcatttcatctcatcatttcatcatttcacttcatctcatcatttcatctcatgatttcatctcatcatttcatctcatgatttcatttcatctcatcaattcatagcatcttttcatctcatttatttcatttcatcttttcatttcgtcattcatttcatcatttcgtcaattcatttcatttccttatttcatcatttcattatttcacttcatttcatcatttcattccatcatttcatatcatttcttcatcatttcatcatttcatttcacttcatttcaccatttcatcatcattccatttctcatttcatcttatcatttcatttcatcatttcacttcatctcatgatttcatcatttcatctcatgatttcatttcatctcatcatttcatcttttcatctcatttcatttaatcatttcgtttcaccttttaatctcgtcatttcatttcatcatttcatgtcatcaattcatcatttcatttcattatttcctcatttcatcatttcacttcatcacttcattacatttcatctcatcatttcatatcatttgttcatttcatcatttcatcttttcatttcattgtttcacttcatcatttcatcatttcatatcatttcttcatttcatcatttcatcttttcttttcatcatttcatttcattatttcacttcatcagttcatttcatcatttcatttcatttcctcatttcatttcaccattttgtttcatcatttcattatttcatttcatcattcgatttcatcatttcatttcatcattttatcatttcatttcatctcatcatttcatcatttcatcatttcatttcattccatcatctcatcatttcggttcttcatttgatcatttcatttcatcatttcatttcatttcagtgatacatgtatttaagtgcttgcgatgcccaggagacaccctttttcc

SEQ ID NO: 465648 - DNA, 1176 bp, Homo sapiens
ctctggtaagttctcagcgaaatccacagccttttccttcatcttccggactctcaatgtgactgattaaacttacaacatgctctgcagggggaaacgctttagcatgtccgcctctgtggcgtcgccgaaggcacccccaccttcacgcggagcccatcggaactcgaggcggggctgctgggtcttccaggagcgcccagacgcgggcaggtggccgccggtggccacaggcctgggcaggatggaagcgcccgcagagcgggcgcttccacgtctgcaggctctggctcggccgccgccacccataagctacgaggaggagctttacgactgcctggactactactacctgcgcgacttcccggcctgcggggcagggcgcagcaagggccggactcggcgcgagcaggcgctgcgcaccaactggcctgcacctggcgggcacgagcgcaaggtcgcgcagaagctcctcaatggccagcgcaagcgccgccagcgccagctgcatcccaagatgcgcactcgcctcacctgagcctgggataccgaaggacctgttcgaagtatttactgtaactccaactgtaacttggttctgaggaggagagaatccatgtttggtcaacagaacttttcgctgtcacttaagtttactgcttcgatatcttttccttactaattgattgttaattaagtagtgcccaagtggattagcctttttagagtttattaattaaaagagagcagcaagaatggcattttaactctcccgggttttttttcagttactatggtaactcttttcaagtccacaaatgatttgttcttatctgtaaagaaaaggtcacaaagataagcggagagagaccaaagataggaatatgtgtaagatttctacctaaatgtcggccgggcactgtagctcactcctgtaatcccagcactttgggaggccgaggtgggcagatcacctgaggtcaggagtttgagaccaacttggcaaacatggcaaaaccccatctctactaaaaatacaaaaattagccggacatgatggaatgaatgacttagccacgtttgagtaaaatggtgcctgttctggtctggattcctttctgtcttgaactgtccaaagttctcctcgctctaaacccttcttgtgccagaatgtat

SEQ ID NO: 465649 - DNA, 945 bp, Homo sapiens
ctgggtgacactttccatctcaacgaggcatcatttgcaagtgatgtgctgccatcatgcaggaccgaggccctgtgtgaccccaataagagcagttgttatatcacattgcagagcactgcttatgcctccatcatctgcaataaactgtaagttccccgaggacagaaatacattttataaagctatagctgccatagatagtgattcctccgatggatgtgtgcaaagtaaactgaataccttctggaaaagattcaccattcttcatgccattaagaacattcaaaaagattataacttgctgaaggctcagatgggaggatcccttgaccccggagatggaggacgtcgcatagatattaaagtccgtgctgtctacgggaaatttcatgatgcttatcacagaaatctctaccaggataaaatgatagctgatgccagagagaaggagagacagcctcctcctacctgcaagcaagagtgtgagagcttgtcatcaaggagctttgcaatcatatttgcaggtggagttgcagtattttcccggaccggggtagcttctggccttcacagcccaaatgccctccccttttcgactgaagaaagaaaaggacgaatcccttcaaacacgatctctttcatgagctctttgatagactctttttctcctcctctgcgccaaaatgaatccaacagaatttccgtggctccctctccttaccctgaccccatgttaattgttgcaacaaacgttgcaactccagtgtgagccagaagacatggatgtcatcgggggtccccagtgtctgaggaaaggagaggggaaggatgacccgtcacggttcagaagacagagacaagcctgcaagtgtgcaaagagggaaaagactgcaggaaattccacttgaaatgggccataaaagtgcatcttttgtaatattt

SEQ ID NO: 465650 - DNA, 4294 bp, Homo sapiens
ctcctcaagtgccaccaaagtaggagcccaggcagaggaggcgctgagagcaagcgagggctgtgaggactgccagcacgctgtcacctctcaataagtttccatgacctccctaattcctcaggtttctgaacttgtactgaatgtgaccatttcgacactgacatttctgcagcaacatggagtagcagtcaccgagccagtttaccacctgtccatgcagaatatagtgtgggatccacagaaagtccagtatgatctcaaatcccagtttggctttgatgatcttcacacggaacagatcctgaactcttcagctgaactgaaggagattcccacagacacttccttggagaagatggtgtgttcagtcttgtctagcacatcagaggatgaagctgagaaatggggccacgttggaggctgccaccctaagtggtcagaagccaaaaactatcttgtccatgcagtcagctggctgcgagtctaccaacaggtgctgtcccctctctctatgttctgttcaaagaagacactcacaggcatgggccatagtctggaggctctcaggaatcagtttgaagaagagagcaagccctggaaggtggtggaagctctgcacactgcactgctcctgctgaatgacagcttgtcagcagatggcccaaaagataatcatacatttccaaagatgttctttctggttcctgcccacgtccctgcagtacgggtggctgaggtgtgggagctcttcacccaggctctagcagatagcgtggattttggcaaggcgaggactcacagaggtgcctctgcgccttccagcaaggactcacccttcaatgtcgcacgttgttgtgaatgtgaagtattacagcatctgtggaaattgcaaagcttgctgcaaaacctgccccagtggccggcactgaagagatttcttcagcttgatggagctctcagaaatgcgatagctcagaatttacattttgtccaagaagtcctcatttgcctggagacatcagctaatgattttaaatggtttgaacttaaccaattgaaactggaaaaggatgtgttcttttgggagctgaaacagatgttggcgaagaatgctgtctgcccgaatggtcgtttctctgagaaggaggtctttttgccgcctggaaactccagcatatggggtggtctccagggactgttgtgctattgtaactcctctgagacgagtgttttaaacaagctacttggttcagtagaggatgctgatcgtattttgcaagaggtcattacttggcacaaaaatatgtcagttttaatacctgaagaatatttggactggcaggaacttgagatgcagctgtcagaagcaagcctttcctgtactcggctcttcctgctgctgggagctgatccctctcctgagaatgatgtcttttctagtgactgtaagcaccagcttgtctccacagtgatatttcatacacttgaaaaaacacaatttttcctggaacaagcatattattggaaagccttcaaaaagtttatcaggaagacttgcgaagtggcccaatatgtaaatatgcaagagagtttccagaacagactattggtggatcagcttgaacaagttagtgtaaacctaatggatttctttaagaatatcagtagtgtgggaactggcaatttagtggtcaatttgcttgttggcttgatggaaaaatttgcagacagctcacattcttggaatgttaatcatctgctgcagctctcacgcctgtttcctaaagatgttgtggatgctgtgatagatgtgtactatgtgcttcctcatgctgtaaggctcctgcagggagtacctggtaaaaacatcactgaaggcctcaaggatgtctacagcttcacactccttcatggcataaccatttcaaatatcaccaaggaagacttcgcaattgtgataaaaattcttttggatacaattgaattagtatcagataagccagatattatttcagaggctttagcttgttttcctgtggtttggtgctggaatcacacaaattctggatttcggcagaattcaaagatagacccctgcaatgtccatgggctcatgtcttcttccttttatggcaaagtggccagtatacttgatcatttccacctgtctccccaaggtgaagattcaccatgttcaaatgaaagctcccgaatggaaataactaggaaagtggtctgcataattcatgaattagtggactggaattctattcttctggagctctctgaagtcttccatgttaacatttctcttgtgaaaactgtgcagaaattttggcataagatattaccgtttgtcccaccttcaataaatcaaactagggatagcatctctgaactctgtcctagtggttccataaagcaagttgctttgcaaatcatagaaaaacttaaaaatgtcaactttacaaaagttacatcaggtgaaaatattcttgacaaactaagtagtttaaacaagatccttaacattaatgaagacacagagacatctgttcaaaatattatttcctcaaatttggaaaggacagtacaattgatttctgaagactggagcctagaaaaaagtacgcataatctactctctttattcatgatgctccagaatgcaaatgtcacaggtagcagtttagaagcattatcaagttttattgaaaaaagtgaaacaccttacaactttgaagaactatggcccaagtttcaacaaatcatgaaagacctaacccaagattttagaatcagacacctgctttctgaaatgaacaaaggaatcaaaagtataaattcaatggctcttcaaaagataactttgcagtttgcccatttcctggaaatcctggattcaccgtcattgaagacattagaaattattgaagattttctattggtcacaaaaaactggcttcaggaatatgcaaatgaggattactccagaatgatagaaacattattcattcctgtgaccaatgagagttcaactgaagatatagctttgttagccaaagctattgctactttttggggctctttaaaaaatatatctagagcaggcaattttgatgttgcctttcttacccatctgctaaatcaagaacagctgactaatttctcagttgttcagctgctttttgaaaacatcctaattaatttgatcaataacttagctgggaattctcaggaagcagcttggaacttaaatgatactgaccttcaaataatgaatttcattaaccttatcttgaaccatatgcagtcagaaactagtaggaaaacagttctctctctgagaagcatagtagatttcacagaacagtttttgaaaacattcttctccctttttctaaaggaagattctgagaacaaaatatctcttctgctgaaatatttccacaaagatgttattgcagagatgagtgttgttgagatttgtgaagttttccagcagactgtgaagccctcagaagccatggagatgctgcagaaagtgaagatgatggtcgtacgtgtgctcaccatcgttgcagaaaacccttcctggaccaaggacattttgtgtgctactctgagttgcaagcaaaatgggataaggcatctcattttatctgctatacaaggggtcactttggcgcaggaccacttccaggaaattgaaaagatatggtcctcgccgaatcagctaaattgtgaaagtcttagcaagaatctttctagcaccttggagagcttcaagagcagcttggaaaatgccactggccaggactgcacaagccagccgaggctggagacggtgcagcagcacttgtacatgttggccaaaagcctcgaggaaacttggtcatcagggaatcccatcatgacttttctcagcaatttcacagtaactgaggatgtaaaaataaaagatttgatgaagaatatcaccaagttgactgaggagcttcgctcttccatccaaatctcgaatgagactatccatagcattctagaagcaaatatttcccactccaagtatgaatcattatgatcgcctaaacagctggacagttaagtaattgggaggagtatttaaaaagttgcattcttgcgtttcaaataagtaatgagattatttgctttgatggttaagtatatccataaatgcacatgtatctacagatcctaggcaaggaattaacattaggttaggaggtgacactttggatacttgttttttctagattgtcaggttttt

SEQ ID NO: 465651 - DNA, 1317 bp, Homo sapiens
gcactcttctaaggtgtcaaggtcatgaaaaacaagactggaaaaccaacacagactggaggagactaagaagacctgacaactaaatgccatgtgggaccctggaggggacccgggaacagtagtagaagagctggtgacatctgaatgaagtctgtaatttggaagaggacaccaggcccagagagaggaagagactccctgggacagcatgcgcagccagtggcaaagccaggacccacatgccgatccccccttccccgcagccctccctgtgtggcagggttggtaccgatgcgataccacagccacagccctcccaacatcaacccactgggccgcctgtgggcctctgctcttcaaaggaagaaagagctatttgggataatggttcgcagagccctctgaagttccaaagagttggaaaaaatacatctataagacccatattaatgagtctctccctgttcatttcaagcccagaacattttttggatttaaataatgcacgactgaatatggatgggatcagtgactcagagcagcggggcggagatgtgggattgttaataaattatagcccttgggccagagtggggtgtaaaaggaaacagaagaaggacagaagacaagataaatgagccttcagatgggaagggatagggctgggagcaggaagaggctgccctggacatgggcagagcctacagctcctatcccggtgtgagccgggacaggatgaccagatggcaccaagaagggtaaggggaggaactgggcatgcccaagatgttcagacctccaggacctgatccaatgtgaggatgtatggacccttcagtcatctatagggagcccacacgcaggaagttccctgaggctgatccatgaagctcagctcctgggagatggttttccctaaagggactgtggggtgatatgcatgtgcaaagcagcacacaccacgtgggcctcttggcacactcatatttaaaggatcagagaattcctgctgtatcaacctggcttgcgccacttcccaaagctacctgaccacagaaccacttcctcacagacctggccttggaagatacagctggggaccataccctggccctccttcctgtcctcaggtggcagctgctcctgaaatgacatcatgttttcctcttctatggtagctctaggtactggggttccaggagccttactaagtacttaagcagttcaacttgtttggtataaacttgggccaccccaagcacccaaagtgaaaagtctagatttctggtgaggatgcagatgtgaattccattt

SEQ ID NO: 465652 - DNA, 3465 bp, Homo sapiens
cacagaggtggagaactccaactcatctggatgaatctccaaccccaaatatttaaacaagcatgttcaggcccttcccccaaccctgggtagacttgagccttgctcctcccacagcgtcttggggacacaagaggaagtgctgcggcttccctggtgggacattgtgctctctctccctctcggagggcccctccctctgcactttcagcgatttcaagatccgcacattactctttatcaacttggcagatgctattgcctcttccggctcacaagcttccgtgctgggctcctcttgtctgcttcctctcctgctaagatcccaacaccagcaactcacccagggccggccgaggctcaggctgcaaactgcactacccagttctgagaggatagaaaactatagcagctggttcatcaggcttgatgacccacagcagagcattagcattcagaatggttgaaacagaagttgatctggatttattaaaatgtcagtttcttgatatagtggtctcttcaacaaagtcttaattgctagcctcccaccaatttggaaaacacacatacacatacacacacacacacacacacagtttattcatacctttaaactactctgcttgcccttaaagttctccattcattcaacctcctaactgtgaaattcaaatgactcccatcgggccctaatggccctggtcccagatcaccaaaacagtaaatgtgatggttagtattcagtgtcgacttgattagattgaataatgcaaagtattgttcctggcttgcagacggtttattgtgggggacttcaccttgtggtcgtgtgagtcaattctcctcttcatatatccatatatcctattagttatgtccctttacagaaccctaatacaggaaccctctaggaaacactgctcctggtggacatctttcctctccctgcctctattcatctttccatcaatattgattaggtgcctgtttacatggtaggcatgggaagtataaagatgtgtaatagacaaacgaagccatcattctcctttcattcaaaattcacttcagaagctaagcccaagcttagacagcagtaagcacgtgggctttaattctagttcttcctttgacccctccactgcctcctctcagtggacctcaagcaattaaatcagcctcaatgccttggtttctctattcataaacagggacaggagtaaaatagaagatccttattttttccttcacaaccttgaagagaagcatattcatttgtctataggagcatactcatttgcatccctctaggaactcacagaaaaccaggtggcattattaaacataccagtgaaagatacttcaaaattcagagaatgtctttctattttgtatattaatgctttggtaaatctaccctagagattgtataataatatctcattttaaagtaaactgaatgcattattctagtttaatgcaatcaaatatttaggtatatatgtgacttgtttttcccatctcatactttgaaaaagagctttcaataaagattccaaaacaggttgcgtttttccccctagaattttcattgtctaataattattatatcgctcaaagcatgagttatatcaagactttatggatttttctgagtggcagtgtgctgtgccagatagagcattagactgaaaatcatgagacctggattctaggtataatattgctatttactaattctttatctttttagttaaaattctcttggtaaccagtaatggaaaccagctctaaatgatctttgttttttatgaaaaatttattggaaggcccctgctgtatgaaattgaagaaagagttggacaaccaagacacgtgaagagagagcatgagactggctccagcactcagcattaggagagcatggacttccttccaattgtgccacctttcacagacctaccctcaagaaaccttcagcctgagtccctgtgtcaaatgtcaaactcttgagaaagagactgataagctcagctcgaggccaggagagagaacctgctatctctggggtccagaacagaagagatgatggcaatgcaccttgcaggtgcagtttccttggggacccctgaacaaggaggttgttatctggccatcttcattcccaccttgtgggaactgggtccagggaaccaacacaaataagctgacaacttggctactgcttttgctgcagggatgcatttcacagagcacatgagcaactcggagggacctgggaagccatgtggctgatgccttgctttacagaagaggacaccaggcccagagagaggaagagactccctgggacagcatgcgcagccagtggcaaagccaggacccacatgccgatccccccttccccgcagccctccctgtgtggcagggttggtaccgatgcgataccacagccacagccctcccaacatcaacccactgggccgcctgtgggcctctgctcttcaaaggaagaaagagctatttgggataatggttcgcagagccctctgaagttccaaagagttggaaaaaatacatctataagacccatattaatgagtctctccctgttcatttcaagcccagaacattttttggatttaaataatgcacgactgaatatggatgggatcagtgactcagagcagcggggcggagatgtgggattgttaataaattatagcccttgggccagagtggggtgtaaaaggaaacagaagaaggacagaagacaagataaatgagccttcagatgggaagggatagggctgggagcaggaagaggctgccctggacatgggcagagcctacagctcctatcccggtgtgagccgggacaggatgaccagatggcaccaagaagggtaaggggaggaactgggcatgcccaagatgttcagacctccaggacctgatccaatgtgaggatgtatggacccttcagtcatctatagggagcccacacgcaggaagttccctgaggctgatccatgaagctcagctcctgggagatggttttccctaaagggactgtggggtgatatgcatgtgcaaagcagcacacaccacgtgggcctcttggcacactcatatttaaaggatcagagaattcctgctgtatcaacctggcttgcgccacttcccaaagctacctgaccacagaaccacttcctcacagacctggccttggaagatacagctggggaccataccctggccctccttcctgtcctcaggtggcagctgctcctgaaatgacatcatgttttcctcttctatggtagctctaggtactggggttccaggagccttactaagtacttaagcagttcaacttgtttggtataaacttgggccaccccaagcacccaaagtgaaaagtctagatttctggtgaggatgcagatgtgaattccattt

SEQ ID NO: 465653 - DNA, 1520 bp, Homo sapiens
agcatctctgttctctcatttaagtgtctgctgattccccccttagatctgccctggagactggtagtaatgcaggaacagtctgcagggattctctcttgctgcctcagtctaccagccacagtctctgcacgtttccaagagcagcagaaaatgaacacattgcaggtctgcagactcgtgaatgacgtctaccgcgtgtataatcgacaccagtatccatttgttgttcttaacatttctgttgattcagagaacaagcctcacagcccaaagactccagaaccaagaaggagccctctaggacagaaaaggggtatgtcgtcttctagcacttcagatgccatctctgacaaaggcgtcctgagacctcagaaagaggcagtgagttccagtcagggacccagtgaccctacggacagagcggaggtggagaaggactcggggcatggcagcacttccgtggattctgaggggttcagcatcccagacacgggcagtcactgcagcagcgagtgtgtggccagcaccccaggggacaggggctcgcaggaacatgtggactctcaggagaaagcgcctgaaactgacgactctttttcagatgtggactgccattcaaaccaggaagataccggatctaaacgaataaagcagttacatcatgaagcacagcaaagtgaaggggaacagaattacaggaagtttagggcaaggatttgtcctggagaaaatcaagcagccgaagatgaactaagaaaagagataagtaaaacgatgtttgcagaaatggaaatcattggtcagtttaacctgggatttataataaccaaactgaatgaggatatcttcatagtggaccagcatgccacggacgagaagtataacttcgagatgctgcagcagcacaccgtgctccaggggcagaggctcatagcacctcagactctcaacttaactgctgttaatgaagctgttctgatagaaaatctggaaatatttagaaagaatggcttcgattttgttatcgatgaaaatgctccagtcactgaaagggctaaactgatttccttgccaactagtaaaagctggaccttcggaccccaggacgtcgatgaactgatcttcatgctgagcgacagccctggggtcatgtgccggccttcccgagtcaagcagatgtttgcctccagagcctgccggaagtcggtgatgattgggactgctcttaacacaagcgagatgaagaaactgatcacccacatgggggagatggaccacccctggaactgtccccatggaaggccaaccatgagacacatcgccaacctgggtgtcatttctcagaactgaccgtagtcactgtatggaataattggttttatcgcagatttttatgttttgaaagacagagtcttcactaaccttttttgttttaaaatgaaacctgctacttaaaaaaaatacacatcacacccatttaaaagtgatcttgagaaccttttcaaaccagatggagc

SEQ ID NO: 465654 - DNA, 3886 bp, Homo sapiens
tgactcactgccatgtcacacgtccccaggatgtgctgtgcctttgctgggacctacagttctgttgggagtctctttggtgtcatggtcccaactgaggctgtgagaggaaagatgtcctatgacacctgctgccctcagggcctcttcctctttcccttagacgcaggccagctggaacgtccccaggcgttctgtcctggatcaagcaagaggaaggggcaagtgggaggagccagcagggcccacaggagaccactgtggcacacctgtgctcaggtaaggcatgctgggccatgtctcctcaggcctgtatccctgggccttaggagacatggcgtcccctggggggcctcacagcgcctctagtggggccttctcctgggcgaggctcctgagggaaggcagtgcgcagccttggctgtgtctctgcagaatcttgtatgcttgctgcgtggtgtcctcccatgcagttgcacgaaatcattcttttattcctgatcctgtttcctgtttatttcatgaacttgtctgtaggcagcatggtgctgggcgctgcaggggctcattaatgcatgagacacagattccactcaggagagagaagacgaacacagacacagtacacggtgggaaggggcacttccatgtctgcagccagagagccctttcagaatctgacccaaaagatggccagtattctaagaaaaagcacatatgcttacgatgtgcaaacagctgaaggtgttctttcaactatagtaaaaggggtgtctcggtggccacaggcggcccagatgaagagacctgtctgggccgcagagaggagtctggaggtagggtccaagggccacgagccagtttgggctgctggaggggggcctggcaaggagggctctcggggaagcacctgtgggggtctgcttcctgaccccagggagctagaggcctccctccctccaggccccccgagccaggctgagccagccgctaggggcacggagcagtgcccaccttgcgcccagtgtggccagagcttcggccagaaggagctcagtgcgccgcaccagcgcgtgcatcgtggcccccggcctttcgctggtgctcagtgtcccaagagcttcacgcagcggaccacccccgccagccaccgtcgggcgcacgtggccgagtgcacctacacccgcgcccaatgcggcaagaccttcctccagcagtcgacgctcacacccactactgcgcgcacatcagggagaagccctacgagtgcgccaagctctttggccgcctgtccacgctgctggagcaccggcacatgcacacgggtgagcggcccttccagtgcacgcaatgtggctgctgcttcagccgcctgtccacgctgctggagcaccggcacacacacatcagcgagaagcccttccagtgtgcgcagtgcgacaagcgtttcacgcgtctggccaacctgaccgtgcaccagagagtgcacttgggcgagcgctccttccagtgcgcccagtacagcaggagattcatgcagaagcccggcttcctgcgtcatctgtgtggccactcgcaggagaagcactatccttgcagcccttgtggtgagagcttcacctgtccctcctggcttgtgcgtcaccaggacagccatgctagccaggcctctccatcttgcctggtttgtgagagggactcctcgaccgatgagccgcccacgggcctcaggggtgcagtgtgggggagcacccctagtaatccttctgccgcactcagatttgagggcactggtacagagctgggcctcaggaggtgccctggggacaggcagcggggcagtggtgatcaggaaggtcttgggtgggggtcccttgcccagttctctttctcgcgtgaagatggagaatgtgggtagcacccagagagctccctaaaggggctctgagggcccaggggcagttggtgccccttaaatctgagcaacctctcctgggggccacttcttggccaggtcaaagtattctggccatggtcttggcttcccgggggagggctgttctcccaggcactgagattgcccatgggccttctcgttgcagggaggcggctgggatagaggccagtcccaaacacctgagcctcactgaggggaaggcctgggcttggagatggggtgcgcaggagtggctggctttgccttgttctattaggcgagtgattttcagagacaaaggtccaagttaggagacgtaattactcagtgctttgaagggacatccaaggtgctcactcttagccatagccgttggtttcctggatgctgactgtgaagattctaaagtgcttcctagggtgggcggtggtggcaggaggccttggacggagtccaggccagacccagcctcctgtttaataggctgagcccaagcgtccctcagatgcgaatccaacagccttggtgagttgtaagatttcatggaaactttccctgacttctgtctcccccttgctccccattacctgggaaaggcagctttgtgggccatgtgtcccggaagggcctgggctggctgtggcccagtgctcaggaccagccatcttggccctcacagcgccctgcccagttggtgtaatatttgtcttcaagccattgttggagcaggcaggcaaagggggctttctgaggatccaacgtgtgccagccactgggatacaaagacaggcctggttcctagctgtggggctgggaagggtatctgacatcaatggtggcacctggcagaggacacacagacaacagcaggcagcatgggctgcagtaaatgttgcagaagcacctaaaggttgagcagaagggaggtaggaaacctggacatggcctgccagcagctgagaagcccccctgagatcctggcggccccgccaccatctgaagatttaggccagtcccttgggcttttcaggcaggcccttatggtggccggccagtttgggaccctcccattttgatacattagttccccctcagctactggagatctcagccacaactgggctccagctgtgacccagactccgccaggatcccctagatcctcagctgtcagataatcccctgtccccctcctcctccccactcaacccccagtgcttgacatgaatgcatgtgtgcttcctaggactagaggccggtgctgtctctaccattgccctcactttaaggggcacacgagcagatggtagcaagccctggagagcagcactcgggcaagtgaggtggctctggcactgcccctggactttcatgtttgtagcttgagctggttttaattggaagctctgtgatttacataatcacttacaatctctgtaaataaggaactatttatgaggaattgtaaatttcctctctcccccttcttaccctgtctgtgatcttgtctgtgatgcagtaatgatattccactctaggttcccatgatcagtggtgaaatatagtgattttcacctgtgcttccattctgaagttctggaaagaagtactggatggactgaagtccaggacaacgtcccaaagaaaggcagagtccaggtaggcttggaggaccaagccctggatgagcactggagggcagaggcctcagtgtccagcactgtgccctgcacatggaaagcccctacgtttgtggaatgaatgaataataaaaatgttttcataagtgatgccattctcaattttaatgtcattgatctgataatgcaaattttaacagcacatctttaccacttcctgccttaaataatagttgttaatacatttccagtatttcattgaatctaagatccattgattgtaagacacacccttattttctacttcact

SEQ ID NO: 465655 - DNA, 4610 bp, Homo sapiens
tgtccgctgcagtctgctggagccagagtctggctcctggctgtgaggtggtggagaagaagatggaaccccaggctgcctggctacagagcctggagggatgcatgtggacagccaagaagaagctggctgactgcgagaaggtggctgtggagttcgggaaccagctggaggcaagtgggccgtgctggggaccctgctgcaggagtacgggctgctgcagaggtggctggggaacgtggagaacctgctgtgcaacaggaacttctggatcctgcagttgcccccgggcagcaagggggaggcccccaagaaaagggtcccagtgtgctgtgggaggcagggtgaggaggctgtccggcctcaggcgaggaaggagaagcacgtggaaggaagggcagcaggaagcctgagcctgactgccatggatggccagacccactcttgggcctcagtttcctcatctgtctggactaggtgacttgtctatgtgggcagtggatgggaacccttcctcttggcctcatggcactcacttctagcccacgaaaactgagaggccttgcccaccctactctccatgcccctcaacacacgccttgaagaggctgctccaagcctagcagaacaccctccctttccaggcctgcagaggacagccctgccactgcccttttcctccccacaggccaggccaccaccaagccagatctggcaccagtggagaaaggagacaggcaggcaactgcagcctgcccagtgcggagaggggccagagcccgggcactgggccctggttaatggtggagccagcctggtgtgtggcagccaggtcgggctggtgtcttcagagtggctgtgtcagaagggcctcgtgtatgacagaaacgcaggccagctggaacgtccccaggcgttctgtcctggatcaagcaagaggaaggggcaagtgggaggagccagcagggcccacaggagaccactgtggcacacctgtgctcaggtaaggcatgctgggccatgtctcctcaggcctgtatccctgggccttaggagacatggcgtcccctggggggcctcacagcgcctctagtggggccttctcctgggcgaggctcctgagggaaggcagtgcgcagccttggctgtgtctctgcagaatcttgtatgcttgctgcgtggtgtcctcccatgcagttgcacgaaatcattcttttattcctgatcctgtttcctgtttatttcatgaacttgtctgtaggcagcatggtgctgggcgctgcaggggctcattaatgcatgagacacagattccactcaggagagagaagacgaacacagacacagtacacggtgggaaggggcacttccatgtctgcagccagagagccctttcagaatctgacccaaaagatggccagtattctaagaaaaagcacatatgcttacgatgtgcaaacagctgaaggtgttctttcaactatagtaaaaggggtgtctcggtggccacaggcggcccagatgaagagacctgtctgggccgcagagaggagtctggaggtagggtccaagggccacgagccagtttgggctgctggaggggggcctggcaaggagggctctcggggaagcacctgtgggggtctgcttcctgaccccagggagctagaggcctccctccctccaggccccccgagccaggctgagccagccgctaggggcacggagcagtgcccaccttgcgcccagtgtggccagagcttcggccagaaggagctcagtgcgccgcaccagcgcgtgcatcgtggcccccggcctttcgctggtgctcagtgtcccaagagcttcacgcagcggaccacccccgccagccaccgtcgggcgcacgtggccgagtgcacctacacccgcgcccaatgcggcaagaccttcctccagcagtcgacgctcacacccactactgcgcgcacatcagggagaagccctacgagtgcgccaagctctttggccgcctgtccacgctgctggagcaccggcacatgcacacgggtgagcggcccttccagtgcacgcaatgtggctgctgcttcagccgcctgtccacgctgctggagcaccggcacacacacatcagcgagaagcccttccagtgtgcgcagtgcgacaagcgtttcacgcgtctggccaacctgaccgtgcaccagagagtgcacttgggcgagcgctccttccagtgcgcccagtacagcaggagattcatgcagaagcccggcttcctgcgtcatctgtgtggccactcgcaggagaagcactatccttgcagcccttgtggtgagagcttcacctgtccctcctggcttgtgcgtcaccaggacagccatgctagccaggcctctccatcttgcctggtttgtgagagggactcctcgaccgatgagccgcccacgggcctcaggggtgcagtgtgggggagcacccctagtaatccttctgccgcactcagatttgagggcactggtacagagctgggcctcaggaggtgccctggggacaggcagcggggcagtggtgatcaggaaggtcttgggtgggggtcccttgcccagttctctttctcgcgtgaagatggagaatgtgggtagcacccagagagctccctaaaggggctctgagggcccaggggcagttggtgccccttaaatctgagcaacctctcctgggggccacttcttggccaggtcaaagtattctggccatggtcttggcttcccgggggagggctgttctcccaggcactgagattgcccatgggccttctcgttgcagggaggcggctgggatagaggccagtcccaaacacctgagcctcactgaggggaaggcctgggcttggagatggggtgcgcaggagtggctggctttgccttgttctattaggcgagtgattttcagagacaaaggtccaagttaggagacgtaattactcagtgctttgaagggacatccaaggtgctcactcttagccatagccgttggtttcctggatgctgactgtgaagattctaaagtgcttcctagggtgggcggtggtggcaggaggccttggacggagtccaggccagacccagcctcctgtttaataggctgagcccaagcgtccctcagatgcgaatccaacagccttggtgagttgtaagatttcatggaaactttccctgacttctgtctcccccttgctccccattacctgggaaaggcagctttgtgggccatgtgtcccggaagggcctgggctggctgtggcccagtgctcaggaccagccatcttggccctcacagcgccctgcccagttggtgtaatatttgtcttcaagccattgttggagcaggcaggcaaagggggctttctgaggatccaacgtgtgccagccactgggatacaaagacaggcctggttcctagctgtggggctgggaagggtatctgacatcaatggtggcacctggcagaggacacacagacaacagcaggcagcatgggctgcagtaaatgttgcagaagcacctaaaggttgagcagaagggaggtaggaaacctggacatggcctgccagcagctgagaagcccccctgagatcctggcggccccgccaccatctgaagatttaggccagtcccttgggcttttcaggcaggcccttatggtggccggccagtttgggaccctcccattttgatacattagttccccctcagctactggagatctcagccacaactgggctccagctgtgacccagactccgccaggatcccctagatcctcagctgtcagataatcccctgtccccctcctcctccccactcaacccccagtgcttgacatgaatgcatgtgtgcttcctaggactagaggccggtgctgtctctaccattgccctcactttaaggggcacacgagcagatggtagcaagccctggagagcagcactcgggcaagtgaggtggctctggcactgcccctggactttcatgtttgtagcttgagctggttttaattggaagctctgtgatttacataatcacttacaatctctgtaaataaggaactatttatgaggaattgtaaatttcctctctcccccttcttaccctgtctgtgatcttgtctgtgatgcagtaatgatattccactctaggttcccatgatcagtggtgaaatatagtgattttcacctgtgcttccattctgaagttctggaaagaagtactggatggactgaagtccaggacaacgtcccaaagaaaggcagagtccaggtaggcttggaggaccaagccctggatgagcactggagggcagaggcctcagtgtccagcactgtgccctgcacatggaaagcccctacgtttgtggaatgaatgaataataaaaatgttttcataagtgatgccattctcaattttaatgtcattgatctgataatgcaaattttaacagcacatctttaccacttcctgccttaaataatagttgttaatacatttccagtatttcattgaatctaagatccattgattgtaagacacacccttattttctacttcact

SEQ ID NO: 465656 - DNA, 1574 bp, Homo sapiens
  misc_feature (3)..(3): n is a, c, g, or t
  misc_feature (5)..(9): n is a, c, g, or t
  misc_feature (12)..(14): n is a, c, g, or t
tancnnnnnctnnnaaggaacacagttggattcaagatcttcactctctatcaacataccgggggagttgggggctgagagaatcattgatcatgaaggtgtcgcttgccaggaagacctgaagcagagatggcaatgcttgtgtcatccccagagccaactctaatgggcaagtagcaagttcctggagggctgcgttgagagggattccgggactgactgggctgcctaggaaagcgttgtctcctgacagcactgactaggcctggaggccttgttcctgctcaaagcagccaacacacgactaagcaaagaccgtatgtctcaaggacaccaggccaaggtagggagtggtgaggggagggctgtccattctaaaacacaaaatcgttggtttccgaatggaaacaagattctttgaggaccccacaaagcccccttcttccctgctaccttaagcccttctctctccaacatgcaaaaaaaattcccacctaaactttgtcagtgattttgatggctcagtctggtaccattttccctgggagggtacgggataagttggaggggaaggtaaggaagatggccttttctctccttctgtctgctcatgactcaacataatggtgaccctacaaattaactttgcctcgagggaggccgtgaaggggcctccatcccacaggacaaagttggcccaattcctttctctgggagcccgcaagccacatggacagcccctggatgtttgctctgccagtgggaatccaaacggaagaaatggaaaacaaacagcagaagataatttttataagcaagatgggctgtggctctggatacctggctcaaatttctcagtccccaagcaggccacggggactgcagcaaacagagcggcagaaacaacccacccaccaattaaagtcaaaccagccccaaacccctcccccaggagaaatggggacagccagaaaatttgtctgtccttgtctcctctttcttcctaacctttctatttctctgaggtgtttgaaatttttcttataacaaaaacatggaataaaataaagtcctgtaccgccaaagtaacaataacaataatcatcatccagtaaaaaataaaagcttcagcagaaccgtgataagtcttttttcttttttttttctgcttgtttgattttttctcttaactgtgcaaaaaaaaaaaaaaaaaatcaaaatgcactcactcatacacacgttcacacacgcagcttccatccagcaaatctgtgttaaatacgtttgtgtctctttcctccccaaccctttatatgtgcaaaaatattgtagtgaccgaggtacttcctcagaccgtctcccacatgtaccctttctggccttccaggtcctgtgactgacttcttgggagggaataaaatgatcaaggatagaaaagtcaagcttctccacctggtactgcacttgccaaaacctttggttatttattttttttcttcctcttccaatgcattgtttcccattttcctcttcccattaggttgctcatgtcttttccaccatctgtcctctgc

SEQ ID NO: 465657 - DNA, 738 bp, Homo sapiens
  misc_feature (3)..(3): n is a, c, g, or t
  misc_feature (5)..(9): n is a, c, g, or t
  misc_feature (12)..(14): n is a, c, g, or t
tancnnnnnctnnnaaggaacacagttggattcaagatcttcactctctatcaacataccgggggagttgggggctgagagaatcattgatcatgaaggtgtcgcttgccaggaagacctgaagcagagatggcaatgcttgtgtcatccccagagccaactctaatgggcaagtagcaagttcctggagggctgcgttgagagggattccgggactgactgggctgcctaggaaagcgttgtctcctgacagcactgactaggcctggaggccttgttcctgctcaaagcagccaacacacgactaagcaaagaccgtatgtctcaaggacaccaggccaaggtagggagtggtgaggggagggctgtccattctaaaacacaaaatcgttggtttccgaatggaaacaagattctttgaggaccccacaaagcccccttcttccctgctaccttaagcccttctctctccaacatgcaaaaaaaattcccacctaaactttgtcagtgattttgatggctcagtctggtaccattttccctgggagggtacgggataagttggaggggaaggtaaggaagatggccttttctctccttctgtctgctcatgactcaacataatggtgaccctacaaattaactttgcctcgagggaggccgtgaaggggcctccatcccacaggacaaagttggcccaattcctttctgtttcaaactaaagctcccacctaaact

SEQ ID NO: 465658 - DNA, 1168 bp, Homo sapiens
  misc_feature (3)..(3): n is a, c, g, or t
  misc_feature (5)..(9): n is a, c, g, or t
  misc_feature (12)..(14): n is a, c, g, or t
tancnnnnnctnnnaaggaacacagttggattcaagatcttcactctctatcaacataccgggggagttgggggctgagagaatcattgatcatgaaggtgtcgcttgccaggaagacctgaagcagagatggcaatgcttgtgtcatccccagagccaactctaatgggcaagtagcaagttcctggagggctgcgttgagagggattccgggactgactgggctgcctaggaaagcgttgtctcctgacagcactgactaggcctggaggccttgttcctgctcaaagcagccaacacacgactaagcaaagaccgtatgtctcaaggacaccaggccaaggtagggagtggtgaggggagggctgtccattctaaaacacaaaatcgttggtttccgaatggaaacaagattctttgaggaccccacaaagcccccttcttccctgctaccttaagcccttctctctccaacatgcaaaaaaaattcccacctaaactttgtcagtgattttgatggctcagtctggtaccattttccctgggagggtacgggataagttggaggggaaggtaaggaagatggccttttctctccttctgtctgctcatgactcaacataatggtgaccctacaaattaactttgcctcgagggaggccgtgaaggggcctccatcccacaggacaaagttggcccaattcctttctctgggagcccgcaagccacatggacagcccctggatgtttgctctgccagtgggaatccaaacggaagaaatggaaaacaaacagcagaagataatttttataagcaagatgggctgtggctctggatacctggctcaaatttctcagtccccaagcaggccacggggactgcagcaaacagagcggcagaaacaacccacccaccaattaaagtcaaaccagccccaaacccctcccccaggagaaatggggacagccagaaaatttgtctgtccttgtctcctctttcttcctaacctttctatttctctgaggtgtttgaaatttttcttataacaaaaacatggaataaaataaagtcctgtaccgccaaagtaacaataacaataatcatcatccagtaaaaaataaaagcttggcgtcgttggcctcagcggtggagctctgtggccggaac

SEQ ID NO: 465659 - DNA, 1254 bp, Homo sapiens
tgcctctctctcgcacgcactctctctctctttctgatctttgtctcattctgtttctcctcccagacagttctcgttcacacaacagagacagctcgtcttagatatttcatggagttgttgcttgagaaaggaaaacctctaatgctagtaggaaatgcaggagtgggaaaaacagtctttgtaggtgacacattggcaagtctctctgaggattacatagtatcccgtgtgcctttcaactactacacgacatccacagctctgcaaaaaattcttgagaaacccctagagaaaaaagctggtcataactatggtcctggaggaaataaaaaattgatttattttatcgacgacatgaacatgcctgaagtggacttatatggcaccgttcagcctcacaccctgatccggcagcatattgattatggacattggtatgatagacagaaggtgatgcttaaagaaatccataactgccagtatgtcgcctgcatgaatccgatggtgggcagcttcaccatcaatcccaggctacagggtatagatagtcacatgctgcttcaacagcccctcatttattgccactttgctgatagagggaaggacccacattacatgccagtgaaggactgggaagtgctgaagacgattcttacagaaacgttagacaactacaatgaactaaatgctgccatgcacctagttttgtttgaagatgccatgcaacatgtgtgtcgcatcagccggatcttacgaacccctcagggctgtgctctcttggttggagttgggggcagtggcaagcagagcttgtccaggctggcagcttaccttcgtggccttgaggtctttcagatcactctgaccgagggctatggaatccaggaacttcgggtagatcttgccaatttgtacatccgaactggagccaagaacatgcccactgtgttcctgctgacagatgcccaggttctagatgagagcttcctcgtgctgattaatgacttgctggcatcagaaggatttcgtaaagttttgtaacggtgtattatttgtatataggagagctgttgatttttaactttataaacagctaccttactgtctctcttatagtttataatagttggttgatatcatatagcctgcaggttcttatattaaatcaacttcggaggaattatctgcctttcaatctgcaggatgcttttctatttttcttggttttgtaaagtatttcttcctctggct

SEQ ID NO: 465660 - DNA, 2751 bp, Homo sapiens
cagcagcgtttgtatagggatgtgatgttagagaactacggaaacctgttctccttggctggctctttgcattttactgcagagatattgctggagcacgacataaacgattcatttcaaaaagtgatcctgagaaaatctggaagctgtgaccttaatactttacgtttaaagaaagactaccaacgtgtgggtaattgcaaggggcagaaaagcagttataatggcattcatcaatgtttgtcagctacccgtagcaaaacctgtcaatataataaatgtggcaaagcttttgggttgtgctcaatcttcactgaacataagaaaatttttagcagagagaaatgctacaaatgtgaagaatgtggcaaagactgtaggttgtcagattttaccatacagaagagaattcatactgcagatagaagttacaaatgtgaagaatgtggcaaagcctgtaaaaagttctcaaaccttactgaacataatagagttcatactggaaagaaaccctacaaatgtgaagaatgtggcaaaacatttacctgttcctcagcccttactaaacacaagagaaatcatactggagacagaccctacaaatgcgaagaatgtcacaaagcctttaggtgttgctcagaccttactaaacataagagaattcatactggagagaaaccctacaaatgtaaagaatgtcacaaagcctttaggtgttgctcagaccttactaaacataagagaattcatactggagagaaaccctacaaatgtaatgaatgtggaaaagcttttatgtggatctcggcccttagtcaacataacagaattcatactggagagaaaccctacatttgtgaagaatgtggcaaagcctttacctactcctcaacccttattagccacaagagaattcatatggaattgagaccttacaaatgtgaagaatgtggcaaaacctttaagtggttctcagacctgactaatcataagagaattcacactggagagaaaccctacaaatgtgaagaatgtggcaaaagctttacctgctcctcaaaccttattaaacacaagagaattcatatggaagtgagaccttacaaatgtgaagaatgtggcaaaacctttaagtggttcccagacctgactaatcataagagaattcacactggagagaagccctacaaatgtgaagaatgtggcaaaacctttacctgctcctcaagccttattaaacacaagagaagtcatactggagacagacctacaagtgcaaagaatgtggcaaagcctttaggtggttctcagaccttactaaacataagtaaacacaagagaattcatactggagagaaaccctacatttgtgaagaatgtggcaaagcctttatccgctcctcaacccttacaagccacaagagaattcatatggaagagagaccttacaaatgtgaagaatgcggcaaaacctaccttgctaaacataagataattcatattggagagaaaccctacaaatgtaatgaatgtggaaaaggttttatgtggatctcggcccttagaaaacataagagaattcatactggagagacaccctacatccatgaagaatgtggcaaggcctttacctactcctcaatccttattaaccacaagagaattcatatggaagagggaccttacaaatgcgaagaatgtggcaaaacctttatgtggctctcagactttactaatcataagagaattcaccctggtgagaaaccctacaaatgtgaagaatgtggcaaagtattgagctcgttctcacacgtcattagacataagacaattcatagtagagagaagctccacaagtgttaaaaatgtggaaaagcctttaacaattcgtcatattgtgttcaacatcagagacttactactgaacaaatgtagtataaaggttattatgatgtttgtaatgaagatgagtataatggagctatatgtttctgaattctgaacaactatttacaaaattttatcctacttttttctgttgaaaatatgacttctctcgtctgctaaacacgtacagacctttagttttgatttacatcaatttaaatatacaaatgtatcactgtaaaataaactttaagtgtaacagatttatagagaaaatattcgtatttgtttatggttgtatacctattttgagaagaaaagaaaaatattagagtgaaacagataattttacatgtgttgatatcttgccagcaaaccagtaatttcaaagattttgaaagaaaatctgttttctctgctttgtattaaattcatttatctgaaatgttattgctcctgacttagaatcatcttttgcaaattctttttttgtttgtttgtctgttttcttgttgttcaccataggcataatatatcattttcttgtcatctaatttcagaaaacattatttgtactatcccctcagagattatgaaagtgactgataaaatttaatggtgttcataaaataattttcacatgtaatttcacactgagtgtattattgtatgttatttagtatattttacattttgtttcaattagagaatgctatttaatccaattttcatttagttattgatcattttactttgtaaaattgatataattgattttattaaatttattgggtcaatttattcaagtagagttgaacattttattttggcatatacatgaaataaaccaacaaaagtaatact

SEQ ID NO: 465661 - DNA, 1418 bp, Homo sapiens
gctatgtcttcattctagaatttatgtgaaagaacatggtcaatggttgctgcaccagagttaggagaagttcttccgtatcagatgaaaagatttatatactttcctatggaagattaagagaaatgaaatctaagatacatgaagaaattctaagtggaaaggccacttagtggttgatttacaacagcattataagtgacagggtgatagaagtgtggtaagtgattaggataatattctgcatagtaagagaaacaatttgaattttagaaggaaattgctttaccatttgcaaactaaggtaattaaaatacagtgagtttcaaaatgcctttttaatgacaatgtatgaacttaatttattttaataaaccaaaattattgttattgagttaaggctattttacactgaatgtgtatcttgccactgatgttaacttatcccatcttacccaaggttgtaggtcaacagatggtaacaatatactattgtgtgactgtggaataacatctctagtgatttctttgtcagtggtctttaacttaccataatttggagaatatgattcctacaaattaacatttttgtttttcttgtaactacaggttattatgatgtttgtaatgaagatgagtataatggagctatatgtttctgaattctgaacaactatttacaaaattttatcctacttttttctgttgaaaatatgacttctctcgtctgctaaacacgtacagacctttagttttgatttacatcaatttaaatatacaaatgtatcactgtaaaataaactttaagtgtaacagatttatagagaaaatattcgtatttgtttatggttgtatacctattttgagaagaaaagaaaaatattagagtgaaacagataattttacatgtgttgatatcttgccagcaaaccagtaatttcaaagattttgaaagaaaatctgttttctctgctttgtattaaattcatttatctgaaatgttattgctcctgacttagaatcatcttttgcaaattctttttttgtttgtttgtctgttttcttgttgttcaccataggcataatatatcattttcttgtcatctaatttcagaaaacattatttgtactatcccctcagagattatgaaagtgactgataaaatttaatggtgttcataaaataattttcacatgtaatttcacactgagtgtattattgtatgttatttagtatattttacattttgtttcaattagagaatgctatttaatccaattttcatttagttattgatcattttactttgtaaaattgatataattgattttattaaatttattgggtcaatttattcaagtagagttgaacattttattttggcatatacatgaaataaaccaacaaaagtaatact

SEQ ID NO: 465662 - DNA, 2262 bp, Homo sapiens
tcggtaccctcataggttcgcaggtacaaatgtgaagaatgtggcaaaacatttacctgttcctcagcccttactaaacacaagagaaatcatactggagacagaccctacaaatgcgaagaatgtcacaaagcctttaggtgttgctcagaccttactaaacataagagaattcatactggagagaaaccctacaaatgtaaagaatgtcacaaagcctttaggtgttgctcagaccttactaaacataagagaattcatactggagagaaaccctacaaatgtaatgaatgtggaaaagcttttatgtggatctcggcccttagtcaacataacagaattcatactggagagaaaccctacatttgtgaagaatgtggcaaagcctttacctactcctcaacccttattagccacaagagaattcatatggaattgagaccttacaaatgtgaagaatgtggcaaaacctttaagtggttctcagacctgactaatcataagagaattcacactggagagaaaccctacaaatgtgaagaatgtggcaaaagctttacctgctcctcaaaccttattaaacacaagagaattcatatggaagtgagaccttacaaatgtgaagaatgtggcaaaacctttaagtggttcccagacctgactaatcataagagaattcacactggagagaagccctacaaatgtgaagaatgtggcaaaacctttacctgctcctcaagccttattaaacacaagagaagtcatactggagacagacctacaagtgcaaagaatgtggcaaagcctttaggtggttctcagaccttactaaacataagtaaacacaagagaattcatactggagagaaaccctacatttgtgaagaatgtggcaaagcctttatccgctcctcaacccttacaagccacaagagaattcatatggaagagagaccttacaaatgtgaagaatgcggcaaaacctaccttgctaaacataagataattcatattggagagaaaccctacaaatgtaatgaatgtggaaaaggttttatgtggatctcggcccttagaaaacataagagaattcatactggagagacaccctacatccatgaagaatgtggcaaggcctttacctactcctcaatccttattaaccacaagagaattcatatggaagagggaccttacaaatgcgaagaatgtggcaaaacctttatgtggctctcagactttactaatcataagagaattcaccctggtgagaaaccctacaaatgtgaagaatgtggcaaagtattgagctcgttctcacacgtcattagacataagacaattcatagtagagagaagctccacaagtgttaaaaatgtggaaaagcctttaacaattcgtcatattgtgttcaacatcagagacttactactgaacaaatgtagtataaaggttattatgatgtttgtaatgaagatgagtataatggagctatatgtttctgaattctgaacaactatttacaaaattttatcctacttttttctgttgaaaatatgacttctctcgtctgctaaacacgtacagacctttagttttgatttacatcaatttaaatatacaaatgtatcactgtaaaataaactttaagtgtaacagatttatagagaaaatattcgtatttgtttatggttgtatacctattttgagaagaaaagaaaaatattagagtgaaacagataattttacatgtgttgatatcttgccagcaaaccagtaatttcaaagattttgaaagaaaatctgttttctctgctttgtattaaattcatttatctgaaatgttattgctcctgacttagaatcatcttttgcaaattctttttttgtttgtttgtctgttttcttgttgttcaccataggcataatatatcattttcttgtcatctaatttcagaaaacattatttgtactatcccctcagagattatgaaagtgactgataaaatttaatggtgttcataaaataattttcacatgtaatttcacactgagtgtattattgtatgttatttagtatattttacattttgtttcaattagagaatgctatttaatccaattttcatttagttattgatcattttactttgtaaaattgatataattgattttattaaatttattgggtcaatttattcaagtagagttgaacattttattttggcatatacatgaaataaaccaacaaaagtaatact

SEQ ID NO: 465663 - DNA, 358 bp, Homo sapiens
atgtggcaaaagctttacctgctcctcaaaccttattaaacacaagagaattcatatggaagtgagaccttacaaatgtgaagaatgtggcaaaacctttaagtggttcccagacctgactaatcataagagaattcacactggagagaagccctacaaatgtgaagaatgtggcaaaacctttacctgctcctcaagccttattaaacacaagagaagtcatactggagacagacctacaagtgcaaagaatgtggcaaagcctttaggtggttctcagaccttactaaacataaggtaattcatactggagataaaccttacaaatgtaatgaatgtggaaaagcttttacgtggt

SEQ ID NO: 465664 - DNA, 1725 bp, Homo sapiens
aagtaaacaggatttggcgctctacataatggctataaagaaacataaaggtgatttctccaagtgttatgctagaagcaacaatgccctcaggcttagtgaaattgaccaaagtttgaaggcagcattgcatcaaatggaaggaacaagtgatgagacatcaggaaaatatcagaatgaaagagaaatgcaaggctctaaaggaagttccaactcacttcgacaccctccagttagcaaagaggtgacagaatcccaaaagggcaggggagagattatggatagcaggctcctggaggaaaaactagatgcaaacgtcctggcattcatcctgcctgcttgctgtttgtaccatctccgtggtagcaaccatccaagctgctggaagcacagactgagctctatgagtcaattattttatatacctgggaacgtgctagccttcctgtcactctttgatgtcactatgtagacagtttgcagcctaggcaacatgggaaaaagtgaaacacttcactcagggcgcagaacaatggaagtccctggaaggaaaggcttgcaagagaaaaccaagtggcttctgagatattcgaaagtccagttgttttccctttttaaaaattttcagatgctctttgatgccatttcataaagcctgtgattgggccaaaagtcttagttcaccatgtaccacaaatagtgtactctatatagcatatgcttaactaagaaaaaataaagatttagaaatagatgtattgaggacatgccattaaaagcagcttccattgaatcaactgtttttcagagtactgtcaagattaccttaaactagtctaatcaaggtaggtggtggattccaaacttgggaaaaagtgagtctttgtattctgtgaagtttaataactacccaaggaagaagtgttggatacaacaactatgagtatcttagaaagtatgtcttttttttttttctgagtcagggtcttgctctatcacccaggctggagtgcagtgatgtgattataactcattgcattgcaatcttgaccccctgggctcaagccatccttccatcttagcctcccaagtagctaggactacaagtggatgccaccatgcccagctaatttttttcttaatttcatttttgtagagataggatttcccaggctggtatcaaactctcaaacttcctggtctcaagcagttctcccaccttggcttcccaaagtgctggcattataggcatgagccaccacacccagcctgggtgtctgtctttatgctaaatgtccgagcctttccatttgtcttttgcctcttcataaacctctgctgagctttatcaggtcattcacatctttcattacaggcaagtggtaaacttagtaatatgcttcctctggtgacaatgggcaaaggactagaagcataagtaaagaaatagtagactgaaataagcggattttgacatgcaaaaagatgcagcaaggtgaacctggttaagaaatagactcagagagcttgaacatggaaggatgctaggacaagtggcagctaaggcagaaagacagccatggttccagatgtctggggaaacaatggaaggcagatattacaaagttttccattttgtaccagaagtgtccgtatgaacacaaactcctaaacccatggatatggagagctgactgtaatagtcaaagacaagagtggctggtg

SEQ ID NO: 465665 - DNA, 2195 bp, Homo sapiens
  misc_feature (2)..(2): n is a, c, g, or t
  misc_feature (6)..(6): n is a, c, g, or t
  misc_feature (10)..(11): n is a, c, g, or t
  misc_feature (13)..(13): n is a, c, g, or t
  misc_feature (16)..(16): n is a, c, g, or t
anaacngggnncngtngaaaggacaccagcttggaatcagttcggacctgtgtctgctgcacagctgaatccctgggaaactcttttagtgtagcatggcagaaagaacaatggctatgcccacacaaatacctgctgatggagatacatagagaccgggtttcaccacgctggccagactggtcttgaactcctgacctctggtgatctgcccacctcaacctcccaaagtgctgcgattacaggcgtgagccactgtacctggccatcaaaaagaaaataatattcgttgtttaactacgattggacattttggttttgaatgtttgcccaatcagttgcccctttatgtccctatgacaatgactctatgtctattacaggggagactggaattggaaaatcgacactgatagacacattgtttaatactaacttgaaagataacaaatcctcacatttttactcaaatgttggacttcaaattcagacatatgaacttcaggaaagcaatgttcagttgaaattgactgttgtggagacagtagggtatggtgatcaaatagacaaagaagccagctaccaaccaatagttgactacatagatgcccaatttgaggcctatcttcaagaagaactgaagattaaacgttccttgtttgagtaccatgattctcgcgtccacgtgtgtctttacttcatttcacctacaggacattccctgaagtctcttgatctattaacaatgaagaaccttgacagtaaggtgaatattataccactgattgccaaagcagacactatttctaaaaatgatttacagacgtttaagaataagataatgagtgaattgattagcaatggcatccagatatatcagctcccaacagatgaagaaactgctgctcaagcgaactcctcagttagtgggctgttaccctttgctgtggtagggagtacagatgaagtgaaagttggaaaaaggatggtcagaggccgtcactacccttggggagttttgcaagtggaaaatgaaaatcactgtgacttcgttaagctccgagatatgcttctttgtaccaatatggaaaatctaaaagaaaaaacccacactcagcactatgaatgttataggtaccaaaaactgcagaaaatgggctttacagatgtgggtccaaacaaccagccagttagttttcaagaaatctttgaagccaaaagacaagagttctatgatcaatgtcagagggaagaagaagagttgaaacagagatttatgcagcgagtcaaggagaaagaagcaacatttaaagaagctgaaaaagagctgcaggacaagttcgagcatcttaaaatgattcaacaggaggagataaggaagctcgaggaagagaaaaaacaactggaaggagaaatcatagatttttataaaatgaaagctgcctccgaagcactgcagactcagctgagcaccgatacaaagaaagacaaacatcgtaagaaataatagtttctcttactattctgagagccctatcattctacatcgcaacttcctgtgagattgtctttgtagcatttaactctgaagttctcattttaaaaattggcttgcttattgtatattttccccaactaaagtgtgaactcctagcggggtgtggtggctcatgcctgtaatcccagcactttgggaggctgaggcgggtggaccacctgaggtcaggagttcaaaaccagcctgaccaaaatgatgaaaccctgcctctactaaaaatacaaaaattagctgggtttggtggccggtacctgtaatcccagccacttgggaggctgaggcaggagaatcacttgaaccccggaggtggaggttgcagtgagccaagatctcaccattaacagctagaaagagccttgttcttaacccaacaggcctcttctaaaaatgttttctatatcagcaagactaattaaattggaaaagatcaccaactaaatgataaaacaagaataaacagaagtataaacattcacaggagttagatttgaagacaattgcttttaacacagagactcaccaggaggtgagcatcatggagggggttatttattatgtgttttactttgaactgagaacatgtgcattgattaggtcaaaagtgttcttgtcctagcatagtgaaggaaatgtatgc

SEQ ID NO: 465666 - DNA, 1533 bp, Homo sapiens
tctaaaacctgtcaaacttgaggttatcaccttccactttgctctctctcccctgcttcatcatgtaaagatgtgcctgcttccccttcgccttccgccatgattcaagctaaggtgagtggagaaaaagagaggcaagcttatgccaagggaaatatctatagcgaggacacgctgtctttgactcgcaaagggacttcggtgaagcagctaggaggaaacgtaccattaaatgatatggttacaatagaatacagtgttcttccttttgctatcacatttctggaaataatttacctagaaattttccctgaagtatggttctcttactgtgacaaaggaaaatgtaggaccacagcaacatttgctgaaagaacaataattcataatttcactgaaagaaggaaagtgtctttcctggagctgcaagctgcattgcctatggttgagggagaagtgatgcaagcacttccttggcttctccagcagaatctctctcagtgccatgtggtcactgctggggatgaaagagggttgctgtcagcaattcagtactctctttcttattctcttcaatgcctctttccttgctatgatgttaaaaccagttttccttctaacagtcgggaccctcagctgcaggtctgttggaatttgctggaggtccactccagatcctgtttgcctgggtatcaccagcgaaggctgcagaacagcaaatattgctacctgatccttcctctggaagcttcatctcagagggacacccagctgtatgaggtgtcagccggcccctactggcagttgtaccgtctgttacagcttcccttggctgggaaagggaaatcccccaaccccttgcacttcccaggcaacaaccatgatagcatccgggaacctggtagtagcaatgccatcaagagtggctggacacatccagggattcctgtagaagcaccagaggccacagggtttgagaaaacttgtccatgggacacaggaaacatctacaaagtaagtgaaaataattttgaagagagttttaagtcttacactgaaaggcataggctagagccagctgactcaggcctaaagcaaacaccatttgtgggtaataaacttctagggacccctgacccctccccgcagtaggaggcagtaaagtacctgcggtaggacaaaggttagtcttaagcccatataagtaaacaggttagtaagataaacttccctttgtttactactctaatctatttagctaaaggtgtttttatactggtgcatattcacctttggttttaatatttagaactccatttaacatttcttgtaaggttggactggtggtgacaaatactaccagcatttgcttgtccaagaaggctttatgtctccttcaattatgaaatgtagttttgctggatataaaattattgactgatagttactctgcttgaggagactaaagataggtccccaaacctgtctagcttgtaaagtttctgcaaagaaatctgctgttattctgataga

SEQ ID NO: 465667 - DNA, 2937 bp, Homo sapiens
tgacctcagaatgtcacactcagttttggagcctcatggcctccctgtgattcttggggatctactcttttggttcacctcatggccattttctaaggtgcaggccagccccaggagccctgggttagaaccattttcaacaaccttcaccccaaagatccacctcttgcccctttctagccaggtacctgcaggtgacatctctctgttaattccagatgaaaaattggaatcacggaccagaagggttttgagcaacacttatcagaaacttattcagtctgtcttcctggatgacagcatccctaatggagtcaagtatctcatgcttcttgccttgattgaaaagccgacagtggacccaatctacattgcattatttggaagcactggggctgggaagagctccctgatcaatgccatcatccagcaagcaatgtttctaccagtgtctggagaaagcatatgtacttcctgcattgtacaagtgagctctggctgctgtgtgcagtatgaggccaaaatccaccttctgtctgaccagctcatgcctttgttgaatgaaaagagcccatcccaggagaaagttcatcaagtgagctggggagggggtctagcctggtccttgcatttttatgagactttgggcaagccattcccctcttcgagaccccagatagatgacctagattttctgaatatgcagccccctggccctccacagggggcaatgggcccctctgtttgtcggtgttctctgtgtctgtgtcaagaggggcttggccctactctgccttggcaggagtggagggaggagctgaagaacctgaccaaactcctgcataggacggaggagctgggcagagaagaggcagatgcgtggaacagggatgaggcagtggaggaagccacctggaagctacaaatgatttatggaaatggggcagagagtaagaactatgaggagttactgagggcgaagcccaaaaggaagatccccacctccagagtcatcaccctcaaggcggaagaggcagaagagctgtccatcaagctggacccctacatccgcacacagaggagagattgggatggagaggccgctgagatgcgcatctggcccttgatcaaacatgtggaagtgacacttcccaaatccgacctgatcccagaaggggtcgtgctggtggacatcccaggcacaggcgacttcaacagcaagagggacgagatgtggaaaaagaccattgacaagtgctcagtgatctgggtgatcagcgacatagagcgagtttctggggggcgagcccacgaagaccttctgaatgagagcatcaaagcctgccagcggggcttctgtagggacgtggccctggtggtcaccaagatggacaaactccacttgccagaatacctaagggaaagaaaggcaggaaatcaagctattcagagtcagcgagaggctgttttagaaagaaatgaaatgataaaactacaaaggactagaattctcaaggaaaaactgaagagaaaactgccagctgacttcaaggttctggaagcctcagatctggtgtatacagtcagcgcccaggagtactggcagcaggctctcctcaccgaggaggaaacggaaatccctaagttaagagaatacatcaggaagagcctcttggacaagaagaagaggacagtgaccaagtatgtgactgaagcctttggcctgttgctcctcacagatagtttcaactccacgcaaaacctgccgaatgaacacttgcacatgagtgtcctgcggagatttgcggaagagaaggttgagctgctggagaaggccatcgcacagtgcttcgcctgcatggagcagcctctgcaagaaggggtcaggaccgccaggacttcttaccgctgcatcctcagagcatgcttggtgaggagtaaaggaaaccaaggttttcatcagaccctgaaagctgtttgcctgaaaaatggcatctatgcctccaggactctggcgagaattgatctaaatgaagccctcactcagcccgtctatgaccagatcgaccctgtttttggaagcatttttaggacggggaagcccactggttcagctctgatgcctcacatagatgcttttaagcagtccctgcaggagaaaatgacagaaattgggataagaagtggctggaaatatgatagctgcaaaaaaaatttcctgatccaggagataagtgccatcctcgggggcctggaggaccacatcctcagaaggaagaggaggatctacgagtccctcactgcctctgtccagagtgacctgaagctctgttacgaagaggcagctcagatcacgggcaaaaaagcgtgtgagcggatgaaagatgccatcagaagaggagtggaccggcaggtggctgagggcatgtttgaaagggcccaggaaaggatgcagcaccagtttcagcagctgaagactggaatcgtggagaaggtgaagggcagcatcaccactatgctggcccttgcttcgtcccagggggatggcctctacaaggagcttgcagctgtggaccttggtgtaggcaaccatgtccctttcaggccatgggctccatcaggcccccggtataaactggagagggtaacctggtacaaacagcaattaagtaatttctagccaaatttaaaatgcacatatcatttggcgcagcaaccctacagatatccttatatggggggagggtggcatatagacaaggttattcagggtaacattctaaagtcagaaatggggacaactcaaatatctgtaatttatctgtaaaatggtgacaatggtagtacctaccctgatactgctagggttgtcaggaagtttaggataatgcttacaaaatatggacacattgtacttaatagtacttgataaatggt

SEQ ID NO: 465668 - DNA, 805 bp, Homo sapiens
cgctatatctattggtcaccagcagtcccccacgttagactatctaccggtaactaaaatcaaagtggggtcgctatgctcgagatctcttcagtactctgggctacgttccattgcttgactatgttagctaaagttcatctctgcggcctggagtgatgtgagtcagggcagccatatatacagctggtagctagatctctgatgagctcccatgcctgacagtgtgttgcgagctcgttggtggatcatgaaaattgtgaaatgagtgatgcatgatagatttggaacgtcctctgccactcatgtgtagaccgatccgcaaagtttgcgtctagtgagattcaaacaggaagaatataggtgacaacatggagttagatgaaacaggaacaaaacatgttaaaattgttgcagaagatgatgaggacttcacaagtgtggcatctcatgtattctaaagtatatggtgaccatctaaggaagttggtttgaatgtgcaggtctagcaaagaacatgccctggatataaaacctaggaatcaccatctgatcgaagatggagatgaatgacttcaccctagggcaagaaggacttaagaagaataggaaggatggcaggaatggaggaaaacattttggatggaaagatgagacactgaaacaatttgaagattggaaggtgagagtctgaggtccaaagctttacaccagttgttgaagaaccttgatcacaggccagccaggacctcaaaggctcaagagaattgcatagctttcttatttaataaattctgtagttcac

SEQ ID NO: 465669 - DNA, 803 bp, Homo sapiens
cagggtatgtaaatgtgggagctcaaaggagggacatctaactccaacagtttgccagttgtggggaagaaaggttttcaaagggaatgcttccagtttttgcccattcagtatgatattggccgtggatttgtcatagacagcgcttattattttgaggtgtggcagtgcacagaggactgccacatgcctctggctcaagaccaagccttgaggaccacggagataaagaagttccaatgccacctgtcccagtgcaccatgcattgcaacgacaaagccagagattcactagatgcagggacctttcaccagtgtaaccatcccaaatttgcatcttgtctgatgctaactgaggaagaagggcacctggagtttgaccagcaggaacaaaacatgttaaaattgttgcagaagatgatgaggacttcacaagtgtggcatctcatgtattctaaagtatatggtgaccatctaaggaagttggtttgaatgtgcaggtctagcaaagaacatgccctggatataaaacctaggaatcaccatctgatcgaagatggagatgaatgacttcaccctagggcaagaaggacttaagaagaataggaaggatggcaggaatggaggaaaacattttggatggaaagatgagacactgaaacaatttgaagattggaaggtgagagtctgaggtccaaagctttacaccagttgttgaagaaccttgatcacaggccagccaggacctcaaaggctcaagagaaatgatgacaaggtttgcttggcttatttagagctgggct

SEQ ID NO: 465670 - DNA, 957 bp, Homo sapiens
taaagagggaattatgacacactgctggccccagcaccctgatgatgtgactctcctgcatgtgctggagccacagaaggaattaaaattgacctgcaagacgtctttacttcatggagatctgtagaagctgaagtccaaaatgtgacgatgaagctcggcaattacaaaatctatagataaagaaagactgccaaggaagagtaagatattcattgacacaaatgctgttgtatgaaccatgtcccaatgaaagtagacaactgtaatgtccttgagaatattttctgcaatatttgtggcaaattcatttatagaactggatattaatatattactacaggggctcaataggctcagtaatgtcacttctaagattctacagaaaggctgtttggaacctgatttgtcaaaacacaagttagatgctggctcaataggctcagaaatgccatttttaatttctaccaaaagagtgtttggaacctgtttcatcaaaatgcagatgcttcctgccctcaaacatcggattccaagttcttcagttttgggactcggactggctctccttgctcctcagcttgctgacagcctgttgttggaccttgtgatcattatcaagaaattaaaaagaaagaagaaaaaggagaagtgggcagacacgtgtttgttatgtgatagggaacatgtatctcactgagctggtacaggtggtgcacccattcctaacttgttacaaccatccaacaagtgaccttttgatgaagggatcttttattttaagtttcttcaggcagattcctgaggtcttatttgcatctgacacaggtacagcatgttacctttacctaaagcatttttttctcctttaagagaaaaaataaaccttaccttataagtcctgcatttaatcaatagctttttattggctacctggtttatgccaggcactataca

SEQ ID NO: 465671 - DNA, 5804 bp, Homo sapiens
cctccaggccacaggtccctcggggctcccagacagagaggcttagggcagccccaacggaggggctgtccttccactgctaagcggctgctgcagtcaagctctcctgtccctcctgtgccgccttcctccccggatgggccccgtgatgaggtctctgtgcgatggggaaaccgaggccccagcagacacctgggatgcagagacgccggcaccgctatgtgtcctcgggcaattcgctgaacctttctgggcctcggtttctcaccaattccaaaagctgattctgctaccgactgctgtgagggtcccaggggacgggaaagcccgggcagcgcccaccggggctcaggagcttgctgactccgagggggtggggccgggcctgggcaaggggtggggccgggcctgggcaaggggcggggacggggcctgctcgacgtgctcggcgctcccggggtgcctgctcggcgctccgccggccgccctgcgtacgctcgcaaggcgctcgcagactccggagtcgccaacatgtcgaccgccatgaatttcgggaccaagagcttccagccgcggcccccggacaagggcagcttcccgctggatcacttaggtgaatgtaaaagctttaaagagaaattcatgaagtgtcttcataacaataattttgaaaatgctttgtgcagaaaggaatcaaaagaatatttagaatgcaggatggagagaaaattgatgctacaagaaccattggagaaactgggatttggagacttgactagtggaaaatcagaggcaaaaaaatgaattttgatgagaagacccctgggccgtgttcagtggtctctcaggacggagggcatcatcctgcctcttaggttggctgaggcctgcgtgtggtgtccttagaaatgggcttcgaatagaagctccagccctgtgggggcgtctcctgggtagggagtggcgtcccgttttcccttaggagggtgtttctgcattgaacccctgagtgggacggcgttcccggcaaagctgggagggaggcgagcgtggggcaagacccttgtcttcgaggccggggccctcttgtatggggcggttttatgttgcagtcctctgatactttctgagttcaaagaggtaaatgtataaatttcagtcccttctgaacacagatatcatcagaaaattaccattccctagcaggatgttttcgtgtttgtattcgtatatgccagttcatttcctttgaaaaaaaaaaaaagtggaacacaaagtaggaagtgagaaccttctggctttggatggattgacttcttgattctttctggttttgcctgaacaccaagtagcttcataatcaaagggtcattttctggtttgtatcagaccgtatttataaagttgggtatttaatttcagtaactcctgtattttaacagaaaaagaacctgagtccatttgcagttaggctcgcaccagctgtcttctgtgccagccagctccgcccgagaccccggcacgtgttcgcagcacagcctggcaggggccctgagcggagttctcagcccgtctgtgccaaagttgcctgtgggtcacggaaacccggcccatgtccacccagtgcgtcaggccagccggggcccaaacctgtggatggaacgcaggtgcctgcacatctggggcctcagccagacctgtctccttcccaggcactgtcggaaaggggctggctcctgtctggtcagtggaggatggtggcaggagacggggtggggaggtccaggtcacgtcctctctggcgaccctggcagtggctgtctccaagccctggcaggtggggccaccaatctggccgacctcaggctctgggaaacaggctgccctcgtccctctgcctgtgggtggctgaggcttctcagcccatctccagttctctgcagcaaaggccctctgtttctgtcctgcagtggtggccctttcgtggttaaacatgtccctcccctcctcacagaactgagtacctattgcggctgggcccgcccaaccctgtgtccctgcacccatgggttctaccacctgattcggctgcagctgtcactgtcccgtgtctgctctctgtcaggcctctgagtgctgcagacgtattaacatatcaccgctagttgatggaaagtcttgtttcttattagaatattttgtgtaggcacagggttgccccagcactgtctatagcaaccccagtgtcctcacagtgcacgtgagccgtgacgcagccaccgtggagtcggcgctgacgcggtgtggccacgtgccatgagctcgccaacgcagtgcggctatatggcgtgagcttactgtgaagtggagacaggcagggacacaggaaactacaaacgagaaatccagaaggaggagctggaactgatgggcatagccggccgcgagcccctccgagcacccctgggggtggagttctggctgtcatggcagagggtttcacatgctcaaaaagtaaatgaaccaggatgtgaggggaacacaacagaccatgccgacggagctcccgggcccaggccggggcctcttcccatcgcactctgacccgccgtcgggagtgcccaggcccgggtcgggcctgcctctccgctcgcaccgcactctgacccatcaggagtgtggggaagaccgtcgaccaaaggtgggaaagacaggaaagatactgtactctaagtagtaaatttgttttttgcgtggacgattctgaagctgtattctgagatggaaaaaactagaaatacatcgtggatgatgagagccaggtgtattgagctcctgcttttctaacgtacaaaggtaactggatagagaaacggagtgatcgccctcacctggccagggtgtgctccgagaccccagcaggtgccgaagccgcggatagtcccgaatcctgtccaggcgctgttttttcctgtacgtacctgtgatcaagtctgagatgtgacagcaaaactgacagaacttcgtgcttccctcttcaaaatgtcacagatgggcactgtgttcttaccggagatcttagcaacctcggcatctggctgtttttcttataggtcaggagtttccaccttttcccttaaaggaagcgcttggcagcttctctggtgtgtctgagtcgccagcatcaccactgtcctgttctggggccattcttaagtaaaataaaagcttcttggacccaagcaccacatcaccgcgatggctggtctgatcaccgagatggctgctgagtgcctggcaggcagggtggcgtggatggcccgaaacgctggacggagggagggttgatgtcccagcaggacggctgctcagaacagcacagaatcaaaaactcatgaatggtttatttctggaattttccacttagtatttttggactgtggctgaccatgggtaactgaaaccgtgtgtaagggggactgttgtgaggggctgtgcacaaatgcttcccagctcttgagggcctggacgcagtgacccgtgcactcagggtcttggccctgataccattctgtaaccaaaaggaaccagggccaggccagagaaggtatcagatgagctagagagtgaagaattgctgggatgaggagacttgttgaaataacacggggggatgggaaggagcatacggtggccagcctggggcagtgtgagcgtgaaaataaacaggctgggcgcagcggctcacgcctgcaatcccagcactttaggaggccaaggtgggaggatcacttgaggctaggagttcaagaccagcctgggcaacatgggtgaaaccctgtctctacaaaacaagaaaagtcagccgtgcgtggtgtcacccgcctgtagtcccagatactcaggaagctgaggcaggaggatcacttgagccagaggttaagtctgcagtgagctgtgattgtaccactgctctccagcctgagcaacagagccggaccctgtctcaccaaaggaaaaaaaaaaaaaaaaaagaaagaaaattaattattgtaatgggctgtagccctcagaataaattgatatccagtagtctatacaacataagtaattgcgtaaacatgtcagtggggggagggccaggtctgtcttattaattctaatatagaagaaattttgggaacaggaaactgctgttgcagaaaccacactggtgacaggtgcagattacaaccctcagcgggccgggcgccagtggctcacgcctataatcccaacactttgggaggccgaggcaggcagatcacttgaggccaggagttcaaggccagcctggccaacatggagaaaccctgtctctactaaaaatacaaaaattagctggggctggtggcgtgtgtctgtaatccagctattcgggaggccgaggtgggagaattgcctaaaccaggaggcagaggttgcagtgagcagggattgtgccaccacactccagcctgggcgacagaaccgtctcaaaaaaaaaccctcagttgccatgaagtgagtggtgacgtgtggtgtgaagcaggtgtctgctgtcttgagaaacctccccttgagatgcatagtgacctccgaggagacagtcatgtcacagcagaacggcagaggcccccttaacccagcagccaccgccgggagcgagccgcacaggccgcaccgacctgggggcgtccctgagggcacggtatcacctctggttctcttgcccaactgcatggcctgaatgtaatcccaaggagacaacagacacagacccaaaccgaggagccttctgcgaagtgactggcagcgctggcccagtgttatgtaagatgttatttggggaactgggtatacacactgtcctatttttggaactttttggaagtctgaaattattttgaaatgaggaaaaaaaaatatgctttgtatgaaactatagtggaatagattgagtcgattctcgtttcaaaataacttcaaagagtttccaataggcatgatgccggcatgaatggtttcagcaggtcacaggcagagaagccggaatcccaaaatagcgccattgtgtggacaacctgactccttacaaacgtgcagtggcttcccaacgctgcctttgagtttctgggtctggctgctgaatgtgttgtgcttaagaatccagacaccctgctgttcctgccagagcttctcacgagatatttcgggtagttcatcatctgtcatgtgcagaatgcattttatttctcatagacgcttgtcatgataagctggccacattattaaaaggctcccaaagacaatttccagagcgttttccaagcgttccccttgggcatgaggtaaaccggaggtagcgtggtcgcaggcctggcccggtgtggcttcccaggaggggaggtctgacctggaggcccagagccccccagggtcgggtctgcagccccagggctgatgcgtggggcctcgtttgcacaggccgtgtagccggagctcagcactggacctgttccacccaggcctcaggagcaaggcaaactgacttcctgaagcttcctgtatcggttcctctggccacagtaacagattactgcaagcccagcggcttagagcaccgcaagcattactattccagagcagagtccaaaaggggcccaggccagacacgatggcccacacctgtcatcccggcagtttgggaggccaaggtgggaggatcgcctgaggccaggagtttgagaccagccctggcaacgtagtgaaaccctgtctctaca

SEQ ID NO: 465672 - DNA, 1201 bp, Homo sapiens
cagtctcatctgcctccactcggcctcagttcctcatcactgttcctgtgctcacagtcatcaattatagaccccacaacatgcgccctgaagacagaatgttccatatcagagctgtgatcttgagagccctctccttggctttcctgctgagtctccgaggagctggggccatcaaggcggaccatgtgtcaacttatgccgcgtttgtacagacgcatagaccaacaggggagtttatgtttgaatttgatgaagatgagatgttctatgtggatctggacaagaaggagaccgtctggcatctggaggagtttggccaagccttttcctttgaggctcagggcgggctggctaacattgctatattgaacaacaacttgaataccttgatccagcgttccaaccacactcaggccaccaacgatccccctgaggtgaccgtgtttcccaaggagcctgtggagctgggccagcccaacaccctcatctgccacattgacaagttcttcccaccagtgctcaacgtcacgtggctgtgcaacggggagctggtcactgagggtgtcgctgagagcctcttcctgcccagaacagattacagcttccacaagttccattacctgacctttgtgccctcagcagaggacttctatgactgcagggtggagcactggggcttggaccagccgctcctcaagcactgggaggcccaagagccaatccagatgcctgagacaacggagactgtgctctgtgccctgggcctggtgctgggcctagtcggcatcatcgtgggcaccgtcctcatcataaagtctctgcgttctggccatgacccccgggcccaggggaccctgtgaaatactgtaaaggtgacaaaatatctgaacagaagaggacttaggagagatctgaactccagctgccctacaaactccatctcagcttttcttctcacttcatgtgaaaactactccagtggctgactgaattgctgacccttcaagctctgtccttatccattacctcaaagcagtcattccttagtaaagtttccaacaaatagaaattaatgacactttggtagcactaatatggagattatcctttcattgagccttttatcctctgttctcctttgaagaacccctcactgtcaccttcccgagaataccctaagaccaataaatacttcagt

SEQ ID NO: 465673 - DNA, 969 bp, Homo sapiens
atggaaaagagggctgggactagggtgatgtaggggatgcacctggcttaggtgcaaaatttgggggataccaaaagaactcagtaataaatcatattttaatgaaatatcttgaaaaggcaaaattaatgcaaagatacatgattaacaaaacatccaaagaggagtatttaacaaaaatggagaagcagagaagcagaagaattaggagaatatgctgtcacatgagccaaggaattaaagaattcaggaaggaggaagtactgctgtcagatgttcaacagaggtcattttagaaaatttaccttggtttttgaaatcctttcaaagagcagtatacacaatgtgagcaagtatccttcgttcattgccgtcattgatatggtttggatatttgtcccttccaattctcattccagggttaagcttcttctctgccctcagtaatgtggcccttccccttgtctgtatattttggagacatgaagcatgtgggatggcctcacagtcagctggggtttgagggtgaaattcaatgactttcgtgaactccttggctcctatgtgctcttcacctgggaggaccagggcatgtgcagggatgaccaccttctccctgggacctgaacagggcagagaaatggtgacaaaatatctgaacagaagaggacttaggagagatctgaactccagctgccctacaaactccatctcagcttttcttctcacttcatgtgaaaactactccagtggctgactgaattgctgacccttcaagctctgtccttatccattacctcaaagcagtcattccttagtaaagtttccaacaaatagaaattaatgacactttggtagcactaatatggagattatcctttcattgagccttttatcctctgttctcctttgaagaacccctcactgtcaccttcccgagaataccctaagaccaataaatacttcagt

SEQ ID NO: 465674 - DNA, 565 bp, Homo sapiens
cccagggaccctgtgaaatactgtaaaaggtgacaaaatatctgaacagaagaggacttaggagagatctgaactccagctgccctacaaactccatctcagcttttcttctcacttcatgtgaaaactactccagtggctgactgaattgctgacccttcaagctcgtcctcatcataaagtctctgcgttctggccatgacccccgggcccaggggaccctgtgaaatactgtaaaggtgacaaaatatctgaacagaagaggacttaggagagatctgaactccagctgccctacaaactccatctcagcttttcttctcacttcatgtgaaaactactccagtggctgactgaattgctgacccttcaagctctgtccttatccattacctcaaagcagtcattccttagtaaagtttccaacaaatagaaattaatgacactttggtagcactaatatggagattatcctttcattgagccttttatcctctgttctcctttgaagaacccctcactgtcaccttcccgagaataccctaagaccaataaatacttcagt

SEQ ID NO: 465675 - DNA, 1061 bp, Homo sapiens
atggaaaagagggctgggactagggtgatgtaggggatgcacctggcttaggtgcaaaatttgggggataccaaaagaactcagtaataaatcatattttaatgaaatatcttgaaaaggcaaaattaatgcaaagatacatgattaacaaaacatccaaagaggagtatttaacaaaaatggagaagcagagaagcagaagaattaggagaatatgctgtcacatgagccaaggaattaaagaattcaggaaggaggaagtactgctgtcagatgttcaacagaggtcattttagaaaatttaccttggtttttgaaatcctttcaaagagcagtatacacaatgtgagcaagtatccttcgttcattgccgtcattgatatggtttggatatttgtcccttccaattctcattccagggttaagcttcttctctgccctcagtaatgtggcccttccccttgtctgtatattttggagacatgaagcatgtgggatggcctcacagtcagctggggtttgagggtgaaattcaatgactttcgtgaactccttggctcctatgtgctcttcacctgggaggaccagggcatgtgcagggatgaccaccttctccctgggacctgaacagggcagagaaatgggaagctcgggtgcaaagggagtggggaagatgggtccgggcttacagtactgaacccagggaatgacaattaactgtgtgtgttgctgcaggtgacaaaatatctgaacagaagaggacttaggagagatctgaactccagctgccctacaaactccatctcagcttttcttctcacttcatgtgaaaactactccagtggctgactgaattgctgacccttcaagctctgtccttatccattacctcaaagcagtcattccttagtaaagtttccaacaaatagaaattaatgacactttggtagcactaatatggagattatcctttcattgagccttttatcctctgttctcctttgaagaacccctcactgtcaccttcccgagaataccctaagaccaataaatacttcagt

SEQ ID NO: 465676 - DNA, 750 bp, Homo sapiens
gtttcctctttcggccgcgctggtgaacaggacccgtcgccatgggccgtgtgatccgtggacagaggaagggcgccgggtctgtgttccgcgcgcacgtgaagcaccgtaaaggcgctgcgcgcctgcgcgccgtggatttcgctgagcggcacggctacatcaagggcatcgtcaaggacatcatccacgacccgggccgcggcgcgcccctcgccaaggtggtcttccgggatccgtatcggtttaagaagcggacggagctgttcattgccgccgagggcattcacacgggccagtttgtgtattgcggcaagaaggcccagctcaacattggcaatgtgctccctgtgggcaccatgcctgagggtacaatcgtgtgctgcctggaggagaagcctggagaccgtggcaagctggcccgggcatcagggaactatgccaccgttatctcccacaaccctgagaccaagaagacccgtgtgaagctgccctccggctccaagaaggttatctcctcagccaacagagctgtggttggtgtggtggctggaggtggccgaattgacaaacccatcttgaaggctggccgggcgtaccacaaatataaggcagaagcaggaagcagaagcaggaaggcagaagcaggaagcagcgttttacactatatgaggtcctcctgagtgctgatcaaatgacatccgtgtgagtttccaacagccctatggcttgaaagagatcctggcagag

SEQ ID NO: 465677 - DNA, 1269 bp, Homo sapiens
gtttcctctttcggccgcgctggtgaacaggacccgtcgccatgggccgtgtgatccgtggacagaggaagggcgccgggtctgtgttccgcgcgcacgtgaagcaccgtaaaggcgctgcgcgcctgcgcgccgtggatttcgctgagcggcacggctacatcaagggcatcgtcaaggacatcatccacgacccgggccgcggcgcgcccctcgccaaggtggtcttccgggatccgtatcggtttaagaagcggacggagctgttcattgccgccgagggcattcacacgggccagtttgtgtattgcggcaagaaggcccagctcaacattggcaatgtgctccctgtgggcaccatgcctgagggtacaatcgtgtgctgcctggaggagaagcctggagaccgtggcaagctggcccgggcatcagggaactatgccaccgttatctcccacaaccctgagaccaagaagacccgtgtgaagctgccctccggctccaagaaggttatctcctcagccaacagagctgtggttggtgtggtggctggaggtggccgaattgacaaacccatcttgaaggctggccgggcgtaccacaaatataaggcaaagaggaactgctggccacaattacggggtgtggccataaatgtgtccctgcaggagggggatctacggtgggaggagcagcagcctgtggagcatccttttggaggtggcaaccaccagcacatcggcaagccctccaccatccgcagagatgcccctgctggccgcaaagtgggtctcattgctgcccgccggactggacgtctccggggaaccaagactgtgcaggagaaagagaactagtgctgagggcctcaataaagtttgtgtttatgccacctggctgtgcccacccccatggtttcaaagggaggggtccctgctgggaggatttctgtgggatccccctggttggtactgggagggagttagactactgaagtagaccaccaagtggacactgggccccatttacaggagttaaggatgaggagcaataggttaaacccaagacaggcttctttggccagtaagcatcctttcttggccctaaggaagggtgcggttcccgtttctctgtaaatcgaagggcctagttcttgtttgcggcgcctttcgtgcatcattagggagagaatttctcagaaaaagggaaaaactaatatgttttcgcctctgaccatcgccccagttctgaggcctgtgggccgtggct

SEQ ID NO: 465678 - DNA, 770 bp, Homo sapiens
tgggctccatccccaagcagatagcatgatctgttccttttccacctggtgcttggcagtgtcatgcacaccttgggcacttactgaatactcattcatagtggtgaagccatccatggcttcccagcattcacacccttccctcccgacacgagtgtacacagtcctggaggaactgagtccaggaaccatcgtggccaatatcacagcggaggatcctgatgatgaaggttttcccagccacctcctctacagcattaccacttgactggtacaatccaagtggcccaaaggatagaccgagatgcaggtgaattgagacaaaatcccaccatttccctggaagttctagtgaaggacagaccatatgggggtcaggagaatcgcatccagataaccttcattgtggaagacgtcaacgacaatcctgccacatgccaaaagttcaccttcaggtatgcacactttgaaagttgggctggacattctatctctttggtggccctctgcccttctgcttctctggtatattctcaggagaattataagcatttggagaaacagctcagtagaataaatcgatgtgaactgttcactgttgtccacaggtttccttaattattttttattttgctcccttctatatctggctcatctctgttggtgaaaaggaccacagggacttgttaggccctccctggactgtgcctgttctttgtttattgccacgggtggcaagatggggctgttagttagcagttataatagac

SEQ ID NO: 465679 - DNA, 798 bp, Homo sapiens
tgggctccatccccaagcagatagcatgatctgttccttttccacctggtgcttggcagtgtcatgcacaccttgggcacttactgaatactcattcatagtggtgaagccatccatggcttcccagcattcacacccttccctcccgacacgagtgtacacagtcctggaggaactgagtccaggaaccatcgtggccaatatcacagcggaggatcctgatgatgaaggttttcccagccacctcctctacagcattaccactgttagcaaatatttcatgataaatcagttgactggtacaatccaagtggcccaaaggatagaccgagatgcaggtgaattgagacaaaatcccaccatttccctggaagttctagtgaaggacagaccatatgggggtcaggagaatcgcatccagataaccttcattgtggaagacgtcaacgacaatcctgccacatgccaaaagttcaccttcaggtatgcacactttgaaagttgggctggacattctatctctttggtggccctctgcccttctgcttctctggtatattctcaggagaattataagcatttggagaaacagctcagtagaataaatcgatgtgaactgttcactgttgtccacaggtttccttaattattttttattttgctcccttctatatctggctcatctctgttggtgaaaaggaccacagggacttgttaggccctccctggactgtgcctgttctttgtttattgccacgggtggcaagatggggctgttagttagcagttataatagac

SEQ ID NO: 465680 - DNA, 1552 bp, Homo sapiens
cacttcccaaccccgtgaccacatactagcggtgactcagctggcaagtaggggccaggactaatcaatcctgactgtggctgctggtatcagtctctgagcggccatgtggcaggacaccacttgggtacttgtcactctccattcttggggagtggccacccaggagaggtttgttgtaactgagtacaaggagttgacttcacaggagacatttggtgaggaagatccccagggatctgagccagtagaagcctgtgaccacatcagtaagtcagaggggagcctggaaaagctagtggagcagagaggccccagggcagtcacactgaccaacggggagagcagcagggagtctgggggaaacctcaggttgctgtcaagacctgttcctgatcagagacctcacaaatgtgatatatgtgagcaaagttttgaacagagatcatatctcaacaaccataagcgtgtacacaggtcaaaaaaaacaaatacagttcgtaactctggggaaatcttcagtgcaaacttagttgttgaagatcagaaaattcctactgggaaaaaattgcattattgcagttactgtgggaaaacattcaggtacagtgccaaccttgtcaagcatcagcggcttcacactgaagagaagccctacaaatgtgatgagtgtgggaaagccttcagccagagctgcgagttcatcaatcaccgaaggatgcactcaggagagattccctaccggtgtgacgagtgtgggaagacattcacccggaggcccaacctcatgaagcaccagaggattcacactggggagaaaccctacaagtgtggggagtgtgggaagcactttagcgcctactcttccctgatttatcaccagagaatccacaccggagagaaaccctataaatgtaatgactgcgggaaagccttcagtgatggctcaatccttatccgacatcgtcggactcacaccggagagaagccatttgagtgcaaggaatgtggcaaaggctttacacaaagttctaaccttatccaacatcagagaattcacactggagagaaaccctataaatgtaatgaatgtgagaaagctttcattcaaaaaaccaaactcgtggaacatcagagaagccacactggagagaagccctatgaatgcaatgactgtggcaaagttttcagccaaagcacacacctcatccagcaccagagaatccacacaggagagaagccctacaagtgcagcgagtgtgggaaggccttccacaacagttccagactcatccaccaccagaggctgcaccacggagagaaaccctacagatgcagcgattgcaagaaagccttcagccagagcacgtacttgattcagcaccggaagatcaacaccggggaaaaaccctacaagtgcagcgagtgtggaaagccttccggcacagttccaacatgtgtcagcatcagcggattcacctccgggaggacttctccatgtaacgtggcgcggtgtccgagggcagagtccagctgagcacttcttgcatgc

SEQ ID NO: 465681 - DNA, 1088 bp, Homo sapiens
cagcttttcctgaaaacccaaatgcgtagagaggaagaagctgctcccaatgctgcagacataggcacctcagaagatccctggcatgaggagttggctccttcaggaaatgccctcactttccgagtctggtcatgccacaggacagatagatgtgaggggaatggtgaggccctccagggccttgtggattcttgtaacatcattggcttttactccatgggaggagacaagccacaggctgcttatttttattattccattttgtcaattccaattaactcgttcatcttaatctcttcattattctttcactgtaatactagggattataacatatctcctccagtcattctggtctgccctaaattagagtcttgccacttcctggacaatgaggaaccatagagcactgtaacaccattaaacatttttcctggatagacgcatcatccctgtcacatcatctaattctacagatacggtaagccccacgggacattcttgttattgttttgtgtactcattaaatttaccaatgtattaaccctttctgtggctctccgttccttcttgcgcgtctacacttccatttagaatcatttttcttctgcccgaagaactctctttggtgttcattgtagtgcagatctgctggcaataaagtctgtcgattttcacttctctaaaaatgcctttatttcatcttcgctttcaaagcatatttttgatgggtataagattgtagacaggcaattatgttttttcagcagttgaatctatgtcattctgttatcttccacttccatcgatcttattgagaaattcgccgtttacttatggtttcttctttgaaggaaatgtatagtttttctctggttgtgtttaagatgttccctttgtctttcactcatggcagttttactatgatgtggtgaagtgtatctttccttgtttttattatgctaggagtgcttgaatctttgatttcacgtatttcactagctttggaaaatcctcagctaatatattttcatatagtgcttctgtagaatttgtttcctgttttgttttttgagacaggatct

SEQ ID NO: 465682 - DNA, 826 bp, Homo sapiens
cagttacgcttctgttcatttgtcatgagactgttttcttttacccccatgaacatgatggacaacaattgctttttcctgaagagacttagtaccctgtggctgagcttaagcgggactctagacagcattgattgcattttcttcttcctctacgaactgggatttctccttctgtttttctactgcctagaggtgaatctgtatttgtcaatatttaggttcaccttccagacacgctccaaaacagtccctcagaattgtcttgagatgaaacaaaaggtgatgaaggtccagaatgatgctcacccaggccagcgcacacagcacagtgacccgtgcacaggatgcactgagcacacacggcactgggtgaaccatgaacagaaggagaagccagcctgggtctgcaaaatatactttgcaggaaaagcagacacagtggagcagagcgtagcagctcctggtaggacgctcatgacccacatcactgaaccagataggagcagggaaaatatcccaagtaatagaacggcttgacttgacccttgggtcagatatgtctgtgtttcaatcagcattgtcaccttctaattttgtcaccttgaaaatatgattgtatttattttaacttcactttttcattaactgtaaattatgttttatcagtagagcttcaaagatttgaataatttttgctggattcttcaaacatgaagtattttttgaattgaaaactaactgaatgactaactggtgtccaagcctactcacaccaatcatggaaggagcctttgtcactgccagaagatatagagccttggta

SEQ ID NO: 465683 - DNA, 911 bp, Homo sapiens
  misc_feature (1)..(4): n is a, c, g, or t
nnnnttttagagaaaagacagtctgtaactgtgattaaagatggcatccttacgccttttcatttttgtcgtagataaaaagtgtccgtatgtgtggtttcttctgacaccaaccaattcttcagtaccagctggcacaatggtggagtggaaagtcccggaccttgttcccccacggactctgactgacaacaatatacagtccaaaaggatgtatgagaattacagaaaccagtttagaagtcacagtaccccaggcaagctcaaagccaagaacagctgcattgaacctgttgccctgccagacaacttgcagtgccacagacaagcaccagagggatcgagagattacaagcaactgaaaagaaactggcagacctctctaattgggacattccatgtacaagcccagagaagattcatccccagaaaaggtttgagaggccccagaatctctagctgagctgattggtgaagttcttctcctgtaccaagccagtccataaagactgggagaggtggctgttttttcagataccccaaatcccagcaaaaaaataatgagacatatgaagaaacagagaaatatggcccaattaatggaacaaaataaatctccagaatttgaccctagagaaacagagataaatgaattatctgacaaagaattcaaaatgatcatcttaaagaagcttagtatgctgtgagagaacagagatagtcaagcaaatgaaatcagaaaaaatgcaataacaagaatatcaacaacaagacagaactataaaaaaagaaccatacaaattctgcatctgagaaataactgaattgaaaaattaactagagggattaaaaagctgacccagtcatgcagaagaatcgtcaaactcaacagctcatttaaattcatcaaa

SEQ ID NO: 465684 - DNA, 1192 bp, Homo sapiens
aggctggccgtggcgcgccggaaggtgtagcggccctgggccccgccccggaagataaggccgctcgctgacgccgtgtttcctctttcggccgcgctggtgaacaggacccgtcgccatgggccgtgtgatccgtggacagaggaagggcgccgggtctgtgttccgcgcgcacgtgaagcaccgtaaaggcgctgcgcgcctgcgcgccgtggatttcgctgagcggcacggctacatcaagggcatcgtcaaggacatcatccacgacccgggccgcggcgcgcccctcgccaaggtggtcttccgggatccgtatcggtttaagaagcggacggagctgttcattgccgccgagggcattcacacgggccagtttgtgtattgcggcaagaaggcccagctcaacattggcaatgtgctccctgtgggcaccatgcctgagggtacaatcgtgtgctgcctggaggagaagcctggagaccgtggcaagctggcccgggcatcagggaactatgccaccgttatctcccacaaccctgagaccaagaagacccgtgtgaagctgccctccggctccaagaaggttatctcctcagccaacagagctgtggttggtgtggtggctggaggtggccgaattgacaaacccatcttgaaggctggccgggcgtaccacaaatataaggcaaagaggaactgctggccacgagtacggggtgtggccatgaatcctgtggagcatccttttggaggtggcaaccaccagcacatcggcaagccctccacatccgagagatgcccctgctggccgcaagtgggtctcattgctgcccgcggactggacgtctccggggaaccagactgtgcggagaaagagaactagtgctgagggcctcaataaagtttgtgtttatgccacctggctgtgcccacccccatggtttcaaagggaggggtccctgctgggaggatttctgtgggatccccctggttggtactgggagggagttagactactgaagtagaccaccagaaacagaataggacacaatcgttgagcctggtgttctggaccataccctcactctgtcagctccctgctaactttctcagcacctgaggcagtcctttgcccagggtcttttagcgacaccctttccctccatactggctacagccctgctgatgt

SEQ ID NO: 465685 - DNA, 1016 bp, Homo sapiens
tctctccagttcagagttttctgggaaaccacattttaaaaatgggttggtgccagtttgggaaactgctgttctcagcctgtgctgcttctctctgcagagacgccgtggacctgtcttctgctggcacggcaggcgtgctcattggctactgtccccagcaggatgccctggacgagcttctgactggttgggaacatctctattattactgtagcttacgcgggattccaaggcagtgcatccctgaggttgctggagacctcatcaggcgcttacacctcgaagcccacgcggacaaacctgtggccacctacagtgggggaaccaagcggaaactctctacagccctggccctggtggggaaacctgacattcttttattggatgagcccagctctgggatggatccctgctctaagcggtacctgtggcaaacaataatgaaggaggttcgggaaggctgtgctgcggtgctgacctcccacagcattttggtcacagcaatttaacaagcctctaggaagttccaaactcccttattttcccatcttctcctgagccctccaaactgttccaacctctgcccattatccagttccaaagctgctttcacattttcagtaattttaaaggtatactttataattattttaaaattttctcatgggagtgataaatgtaaaattttgattagatttactatatctgtattataatatattttcattattataataatataattatagattaccaattttgtaacatatttcaaattgaaatgtcaaaatataatttaaattataattacacattaaaatgttatttatggtattatattttatattatgcaccatattaaaatacaacttatttatattttacatataattaatttacttatgttttatgtttacacttaaggtaatatttaatatttatactaacatattaatattattttatattacactaattttcatattataacagtttttccattttcaaaatat

SEQ ID NO: 465686 - DNA, 1102 bp, Homo sapiens
gccagttaaaaagctgctgaacaccacacacagcgctggaatggcaaatgcgtctgcaatctggggagccttgtagagaattctgtctcacagtggacgatccagaaggtcatgatgcaccagtgaaggacgatgaagatcccaaagtacagctggaaaaccgaggcaaagagggcaaacgtgatgaccctggcggcgatggtgaagaagtgccagcagaactggatgatgacggccatgtagctgatgggcttcttgtcatctcgagagtcccggagggccttctggtaggaggccaaggcccaggccagggacacgagggaagctgccgctgtgaaacctacaaaggcaaacaggaagacagtgtgtcagaaatcagttgcagcaatgccccctggaatttgcacaggaagacgttacttaaggctgctttccaaagcagtgaaaaaataagtcagaacagctgtgctgatggctgggactctctcaggacagcttggaaggcccgacctggcagctctctgggcccaccggagctctcctgccttgtcttgtacctgcctctctgtgctccagccacactgccatctctccgtttctcaaatgctacgtaaagccgcattctcttcccacagatagaaaatgctgtgctcgcccttgaaaagcctctctctccaatgaattcccactcattcctcaattttcagttgaagcatcattcattcctttgggaaaccttttctagcccctaacaccctgcattggtcctaacataccttggcatgactgctgtagctctgtatctgcgtgggtactgacggatgtgactccaggagggagggtgtgcagcctgtggctcaccacggtatccccagcacctgtctctctgcttgcctattaacttcctaaattagtgcattttcccctgtcatttaaaaaaaaactttaattttttcatttgtatatatcgacagagcacaagtacagatttcttgcatgcctatgttgtattgtggtaaagtctgggcttctatgtgtacccatcactcaaatagtaaacattgtgcctgagaggtaatttttcagccctcacccccctcca

SEQ ID NO: 465687 - DNA, 3675 bp, Homo sapiens
  misc_feature (860)..(860): n is a, c, g, or t
  misc_feature (863)..(863): n is a, c, g, or t
gctccacggttatatactggatgcatgcttcatgctgaactaagtgctgaggtggagttgggggaggctgtttctgactgtcccactgggcccatcaaatttgcccacaattaccccctcccctatgggtgctttgtcttaggtctgttctgcttcaaaagactccaaccaaacattgaagggacatcttcctcagcaggtacccagccagatgtggatgagtgtgtggaggggactgacaactgccacatcgatgctatctgccagaacaccccgaggtcatacaagtgcatctgcaagtctggctacacaggggacggcaaacactgcaaagacgtggatgagtgcgagcgagaggataatgcaggttgtgtgcatgactgtgtcaacatccctggcaattaccggtgtacctgctatgatggattccacctggcacatgacggacacaactgtctggatgtggacgagtgtgccgagggcaacggcggctgtcagcagagctgtgtcaacatgatgggcagctatgagtgccactgccgggaaggcttcttcctcagcgacaaccagcatacctgtatccagcggccagaagaaggaatgaattgcatgaacaagaaccacggctgtgcccacatttgccgggagacacccaaggggggtattgcctgtgaatgccgtcctggctttgagcttaccaagaaccaacgggactgtaaatgtgagataattgggatggcagtgacatgcaactatggtaacggcggctgccagcacacgtgtgatgacacagagcagggtccccggtgcggctgccatatcaagtttgtgctccataccgacgggaagacatgcatcgntgngtgagacctgtgctgtcaacaacgggggctgtgacagtaagtgccatgatgcagcgactggtgtccactgcacctgccctgtgggcttcatgctgcagccagacaggaagacgtgcaaagatatagatgagtgccgcttaaacaacgggggctgtgaccatatttgccgcaacacagtgggcagcttcgaatgcagttgcaagaaaggctataagcttctcatcaatgagaggaactgccaggatatagacgagtgttcctttgatcgaacctgtgaccacatatgtgtcaacacaccaggaagcttccagtgtctctgccatcgtggctacctgttgtatggtatcacccactgtggggatgtggatgaatgcagcatcaaccggggaggttgccgctttggctgcatcaacactcctggcagctaccagtgtacctgcccagcaggccagggtcggctgcactggaatggcaaagattgcacagagccactgaagtgtcagggcagtcctggggcctcgaaagccatgctcagctgcaaccggtctggcaagaaggacacctgtgccctgacctgtccctccagggcccgatttttgccagagtctgagaatggcttcacggtgagctgtgggacccccagccccagggctgctccagcccgagctggccacaatgggaacagcaccaactccaaccactgccatgaggctgcagtgctgtccattaaacaacgggcctccttcaagatcaaggatgccaaatgccgtttgcacctgcgaaacaaaggcaaaacagaggaggctggcagaatcacagggccaggtggtgccccctgctctgaatgccaggtcaccttcatccaccttaagtgtgactcctctcggaagggcaagggccgacgggcccggacccctccaggcaaagaggtcacaaggctcaccctggaactggaggcagaggtcagagccgaagaaaccacagccagctgtgggctgccctgcctccgacagcgaatggaacggcggctgaaaggatccctgaagatgctcagaaagtccatcaaccaggaccgcttcctgctgcgcctggcaggccttgattatgagctggcccacaagccgggcctggtagccggggagcgagcagagccgatggagtcctgtaggcccgggcagcaccgtgctgggaccaagtgtgtccagtgctccccagggcactactacaacaccagcatccaccgctgtattcgctgtgccatgggctcctatcagcccgacttccgtcagaacttctgcagccgctgtccaggaaacacaagcacagactttgatggctctaccagtgtggcccaatgcaagaatcgtcagtgtggtggggagctgggtgagttcactggctatattgagtcccccaactacccgggcaactacccagctggtgtggagtgcatctggaacatcaaccccccacccaagcgcaagatccttatcgtggtaccagagatcttcctgccatctgaggatgagtgtggggacgtcctcgtcatgagaaagaactgtgggtggcttgcagagctgggccagggaagggcagtccaaatctggttaaggcggagaacaaagagagagactgatacaggaagaaatggggcagtgaagttagggatctatgagggtgaaatagtgagaggcctttaggaagagagaagctaacaaaggaaaacagcaatgacacatgtttggtagaaaacagagttaagaaagctagcagtggggctagaactccaatggcgttacatgtatcactttcctatcctagcatttttgccattccattcatttaaatgtcatatttattacactatgtgagtgcccagccggcagccccctaccctcagacaaggaactctctcctctctttttggagggaaaaaaaaaatatcactacacaaaccaggcactctccctttctgtctttctagtttcctttccttgtctctctctgcctgcctctctactgttcccccttttctaacacactacctagaaaagccattcagtactggctctagtccccgtgagatgtaaagaaacagtacagccccttccactgcccattttaccagctcacattcccgaccccatcagcttggaagggtgctagaggcccatcaaggaagtgggtctggtgggaaacggggaggggaaagaagggcttctgccattatagggttgtgccttgctagtcaggggccaaaatgtcccctggctctgctccctagggtgattctaacagcccagggtcctgccaaagaagcctttgatttacaggcttaatgccagcaccagtcctctggggcacatggtttgagctctggacttcccacatggccagctttcttgtctatacagatcctctctttctttccctacgtctgcctggggtctactccataagggtttacaaatggcccacaacactgagttagtggacaccggctaaatgaggaagagcagcaggcattgtcatggtgaatgccccgctgtagctccctgagagaaagactgtaactctgcaggacagaaacaaggttttaaagcattgccaaaaaaaagaaaacagaaagaaaaaatgtatcatctaaaggactagacacagaacaattggaagtcaacttcaaacactaatcccttttcttgtcttccctggcccagccacctcctcagccccatgtgatgctccctgggggagccctactccccttgctacatgttgtccttaaacatggttattgacctgaagccagcct

SEQ ID NO: 465688 - DNA, 433 bp, Homo sapiens
agtgagaggcctttaggaagagagaagctaacaaaggaaaacagcaatgacacatgtttggtagaaaacagagttaagaaagctagcagtggggctagaactccaatggcgttacatgtatcactttcctatcctagcatttttgccattccattcatttaaatgtcatatttattacactatgtgagtgcccaggtatcaaggaggaattgtggaatgagcccagtgggcaatgggagagggtgtggggtagggtgtgtgtatgcgaagggggagcctttgtcagaatgattctcttgccctatacccccaccaccagctgtacagcccacgttctaggagggcttgggtagcctgccctgctgctctactgacctgctgcttgccttcccagcatccccatcctccattaccacttatgagacctgccaga

SEQ ID NO: 465689 - DNA, 2497 bp, Homo sapiens
  misc_feature (860)..(860): n is a, c, g, or t
  misc_feature (863)..(863): n is a, c, g, or t
gctccacggttatatactggatgcatgcttcatgctgaactaagtgctgaggtggagttgggggaggctgtttctgactgtcccactgggcccatcaaatttgcccacaattaccccctcccctatgggtgctttgtcttaggtctgttctgcttcaaaagactccaaccaaacattgaagggacatcttcctcagcaggtacccagccagatgtggatgagtgtgtggaggggactgacaactgccacatcgatgctatctgccagaacaccccgaggtcatacaagtgcatctgcaagtctggctacacaggggacggcaaacactgcaaagacgtggatgagtgcgagcgagaggataatgcaggttgtgtgcatgactgtgtcaacatccctggcaattaccggtgtacctgctatgatggattccacctggcacatgacggacacaactgtctggatgtggacgagtgtgccgagggcaacggcggctgtcagcagagctgtgtcaacatgatgggcagctatgagtgccactgccgggaaggcttcttcctcagcgacaaccagcatacctgtatccagcggccagaagaaggaatgaattgcatgaacaagaaccacggctgtgcccacatttgccgggagacacccaaggggggtattgcctgtgaatgccgtcctggctttgagcttaccaagaaccaacgggactgtaaatgtgagataattgggatggcagtgacatgcaactatggtaacggcggctgccagcacacgtgtgatgacacagagcagggtccccggtgcggctgccatatcaagtttgtgctccataccgacgggaagacatgcatcgntgngtgagacctgtgctgtcaacaacgggggctgtgacagtaagtgccatgatgcagcgactggtgtccactgcacctgccctgtgggcttcatgctgcagccagacaggaagacgtgcaaagatatagatgagtgccgcttaaacaacgggggctgtgaccatatttgccgcaacacagtgggcagcttcgaatgcagttgcaagaaaggctataagcttctcatcaatgagaggaactgccaggatatagacgagtgttcctttgatcgaacctgtgaccacatatgtgtcaacacaccaggaagcttccagtgtctctgccatcgtggctacctgttgtatggtatcacccactgtggggatgtggatgaatgcagcatcaaccggggaggttgccgctttggctgcatcaacactcctggcagctaccagtgtacctgcccagcaggccagggtcggctgcactggaatggcaaagattgcacagagccactgaagtgtcagggcagtcctggggcctcgaaagccatgctcagctgcaaccggtctggcaagaaggacacctgtgccctgacctgtccctccagggcccgatttttgccagagtctgagaatggcttcacggtgagctgtgggacccccagccccagggctgctccagcccgagctggccacaatgggaacagcaccaactccaaccactgccatgaggctgcagtgctgtccattaaacaacgggcctccttcaagatcaaggatgccaaatgccgtttgcacctgcgaaacaaaggcaaaacagaggaggctggcagaatcacagggccaggtggtgccccctgctctgaatgccaggtcaccttcatccaccttaagtgtgactcctctcggaagggcaagggccgacgggcccggacccctccaggcaaagaggtcacaaggctcaccctggaactggaggcagaggtcagagccgaagaaaccacagccagctgtgggctgccctgcctccgacagcgaatggaacggcggctgaaaggatccctgaagatgctcagaaagtccatcaaccaggaccgcttcctgctgcgcctggcaggccttgattatgagctggcccacaagccgggcctggtagccggggagcgagcagagccgatggagtcctgtaggcccgggcagcaccgtgctgggaccaagtgtgtccagtgctccccagggcactactacaacaccagcatccaccgctgtattcgctgtgccatgggctcctatcagcccgacttccgtcagaacttctgcagccgctgtccaggaaacacaagcacagactttgatggctctaccagtgtggcccaatgcaagaatcgtcagtgtggtggggagctgggtgagttcactggctatattgagtcccccaactacccgggcaactacccagctggtgtggagtgcatctggaacatcaaccccccacccaagcgcaagatccttatcgtggtaccagagatcttcctgccatctgaggatgagtgtggggacgtcctcgtcatgagaaagaactcatccccatcctccattaccacttatgagacctgccagacctacgagcgtcccattgccttcactgcccgttcc

SEQ ID NO: 465690 - DNA, 2914 bp, Homo sapiens
cctctctttctctctctctctgtctctctctctctcgtctctcttcctttcccccctccaccacttgggacctgagcgagaggactgcagcaggcgagttccggaaggctgaatccccaggtcccagccccggaccgcggcaactcgcccctgcggcaccgccggcccggctgcgcccccactcagcgatggaggtaaagaggcggcggccgcgcgccctgccccggctgccgctgccgagtccccgctgctctcctttccccttcagtttcctgggcgaagcagagggcgacatgggtgggtgggttgctgcgctggggcgaggtggggtcgatgttgttttttcattgtctggagctgcaggggaggcgaggcgcggggaaaggggcgaggggagccggggtaattaacacgggggaggcacccctccgtctcccacttccacccacacccccatccctccaccccctccgctttgcaggaaaaagcctggatgcgaaaggatgggggagaacaaagagcctttggaagacgtcgctgttatctcattgtctgtgtgattgggggagctgcggcggggaggatgctgtggtcccttcctccggcgttccccacccccatccctctccccgctgtcagtgcgcacgcacaacgcgccgctttttatttctttttcctggttttcttattccatcttctacccacccctcttcctttctttcacctttccttccttccttcctcctttccttcctcaggagaaaggcctctctctccgtgttcacagcggaccttgatttaaatgtccatacaattaaggcacgcggtgaatgccaagaatggggctggctgagcaccgtgggtcggcgagggcccgccaaggaaggagcgaccgaccgagccaggcgccctccgcagacctccgcgcagccgcgggcgcgaggggaggggtctggagctccctccggctgcctgtcccgcaccggagcccgtggggtggggaggtgtgcagcctgtgacagacaggggcttagagatgcaaagagactcagggagagaaacagaagctgattctgtgacagaagcagatctgtgcagcacagatgcggctcttcatttgccctcctaaagcagtgtttagagtcaggcagaggttaagtgtgttgcacctcacctagatacttccagaaccttctctgggtctgcagaatgtggcacaacctgcttgcccccgcagagagaaagctgcagtgcacatcctgcagactgcaggtgctgggctgcctctggagtcccagaaggcaagcttggctgcaggacagaaagggagaacagcttctctcacccctgagccttcacaagcccttgtctatttgccgttgccttcaaaatatacctcccccgaaaccagtagctttctgagtcctggtgtcccctccgccctttctggacaggtttgggaagaagaaagcagtcagtgctgggccttattggggtgtgaagcgccttgctctgccccttctgctcactgtgaaggccgctggatgcttctcttaggcatggtttaagcctccgattactaaaccccttgccccacaaacgtccacattgacgagcctctttttagtaactgcttccccgtaattccttcagaggttgctgtacccttcgctgatgtgctgccctcctgtaaaacctccagatgccttcccacgtaatgcccctttcagatgctttaagctgagagcttaaaccacaggtaccatggctgacgcctgccaggtttctgctgcagataatctatgatgggaggggcatattttttacttcattacttatgtaaactcttgttccagaaagctttaatgtgtgtgggagtgttctgggtctattaggtctgtgcgcatgggtgtgggcatttgcctgtgtccaccgggtgggtctcattatgaaatgtatgtttatgtagggctttaatggctgaaaatggcaaagagatgaatagaccacttggccccatgtgtaattgccaggccccttctgtgctcaaatgaggtgtccgagtgaaggtcagcccttcccttctgtatttggggcctatttatgccaccagtaattttataagaaatctgaatagttctcccctttgagtgcatttaactctttagtatcttctctcttacctatttgagcccctctagctacagtctggcttaaatgaaaggggaattatatgcttaagaaaaagtaggacacggttgaggcagtttgctgactgaatacgcgaagaaggacctgatgggctcatatgcaccactgccatcacagtccccatcgtgatgcaagcttatatgattcttgagaaacagcccagatctcctcttaagcggaaaagagattgaccttctagcagaggcaaagaatggagtcttctgggggcagctgcaaagcgttctccctaggacagatggagcctccctttcctcatctactctgtgggtggtttcagggcccacgagtcaacatgaggagttgtgctggtggtatgtgtgttggaggctgggctggctgattcacagtgacgaggatgtcaataataacaagaatgagaatgatggtacctaataaagactttttttcccaagtcccatctacaattctttcattgggtgttttgccaagtctttctcaatctcatctcagctttttttttttttttaaagaaaatgtattcaatacttaattgcatcacaaatgtagacatagaagaaaggacttcaaacggaatttatgggaggcaatgtgtgcggctttttgccttatagagctgtgtagaaggtctggaatgatcttccagcaccaaatttagatggcctcaaaaaaaaaaaaaaaaaaaaaaaaatcaggccttatt

SEQ ID NO: 465691 - DNA, 1835 bp, Homo sapiens
ggaattttgcttttagacttttactgggcccaggacagcaccttgtctcatttgaacaagacatctggagcctggagatcccagggctgatatggcaacagtgcgatgccccccatggatatggggtcgttccatgtttcttccctgccttcctcagcatgttaacctttcagcttcacatccgcatcctcatggtcacaagatggctgacaagctccagctctcccatccctagaaagacttcagctggcaaagcaacgcaaatggctgagcgtcgaggatagaagtggctgaacagcgagcagagaagcaactgagcatcggaggttggagatagatgcagctaacttcagatactgtggttttagagaggggcctggccagagacggctgggttccagggacagaccaccttcccatcccctttccagcctccctttccactgagagctgctcgctgctcaataaagtcttctacattcatcacccttcaaacagttcatgtgacctggttcttcctggttcgtcggacaagaacccgggtgccaagagggcaagggctgtcaccctgaccctccactgagtcggttggtacttggccatccctggacagcagagctgaaagagcatgggttgtaacacgcttggactctactgcggggtctgcacagagtctgctcccgccagagaggagcagccggacggttccagcatgaagacttacgccagtcatcgccagccacttgcccagctaggctcctgcggcagtcaaaaccccatcctcatgcctaggaacctgctgagacttaccagaggccaccaggaccgagaggagctgtgggtccacccacccttcctccctcccgctctctgtcctgggaggctgatacatatgtaccacagcatggcccttgtggcctctggcttctgggtgtggctgctgggggctttgcaggcggctgcgggagggcagggagttgacatcacagactgtgcctacttttgcatttctgaagaccggatgactctgcctggacccgagacttgtgacccactgggtcctgtggccccacccacaagcaaactcaacacaccaggaccatttcccacacccctatgattgcatccccaaccaatcagcagcacccattccctaaccctcttcccacaaactatccttgaaaatccctaagccctgaatttgcagggaggctgatgtgggtcataatacaactccagtctcagctggctctgcatgaattaaacattcgctattaccattctcctgtcttgataaatcagctctatctgggcagccagcaagatgagcctgtcgggtggttacactacttagatttaaatatcaacatattcagctaaaagagttgaaagcaattgcccgagtgtggaaaaaagggggggagggcaaagagagtgagaaaatgcttttttagtaagaaaccttatagaagtatttgctaatctgtttgtacatcccttggattaaataaatagaaaaaaaaaaaagattgaagtcatctgtgaagtggctctgcagccagtcttgtcccttcctcctaggggatgggcagcagctcagatccagggccctcttctccatcttcctccccctcctccctcctcatacacagtctgactgcagcttcccagctggagcagaaagcaaaagagaagtgattgtacctaatcacctaggtcattttctcagaaattgctttctttttcaccttttttcatgaggaacaaaaaggaacaggagaggcagcccaattgctgttcctgtgagctccggctctccgcagggggctggcctg

SEQ ID NO: 465692 - DNA, 862 bp, Homo sapiens
ggctggagagtgatggagcaggaggagcccacatggaggagtgacagcgtagacacagaggacagcggctatggaggagaggctgaggagaggcccgagcaggatggagtgcaggtggctgtggtcaggatcaagcgccccttgccctcccaggtaaacagatttacagagaaactcaactgcaaagcccaacagaaatatagcccagtgggcaacttgaaagggagatggcagcagtgggctgatgaacacatacaatcccagaagctcaatcctttcagtgaagagtttgattacgagctggccatgtccacccgcctacacaaaggagatgagggctatggccgccccaaagaaggaaccaaaactgctgaaagggccaagcgtgctgaggagcacatctacagggaaatgatggacatgtgcttcattatctgcacaatggctcgccacagacgagatggcaagatccaggttacttttggagatctctttgacagatacgttcgtatttcagataaagtagtgggcattctcatgcgtgccaggaaacatggactggtagactttgaaggagagatgctatggcaaggccgagatgaccatgttgtgattacgctactcaagtgaaccttcaaaaacaaaagccaaatttggcccactatggtcttaatgctaaatgctcatgtaggtaaaatgaaaatgcaaactctctgtaataagttagtaaatattaaacaatttttacataaacgactttctggcattctatttctatctagaatgaggaattttggagattttgagaaggcacaaagcatttcagaaagcacatagaatgttaatgtataataatagtatt

SEQ ID NO: 465693 - DNA, 1935 bp, Homo sapiens
tttgggtgagaagtgcggcggcttttcccagggatggagtttagaggacgctaatcctatgtgtgagcggcggaccccgcccggacttcccggaggcgcccggttagtgaggcgacggcgcccacccgcgttcgcgggctcccggccgccactccccggagccgccggcccgccccagccccgcgcgtcgcccgggagggcgggctgcactccctccacgtacctggctggcagagcgtctccagggacaaaaggtgccctgggatcaaagccgagcccccgcccccgcggggatgctgccctccggaaggaggggcgctgcccccaagatcccagactgcttgggaagttggacatgcatattcccaaagagaacagtgttggaagaagacaggagagcagctcgcgggttgggggtagagggtaggaaaagagggcaagatggaggactaccactcgaggccagcctccactgcctgttagggcggtagaacctaagagccggtccaaggcaacacaaaagacagtgaggctaggtctttaattgcagccaacgatcaagaaagcaactccatcaaatgacactgtctttttaaaaaaaattttttttttttgagacagaagcgagactccgtctcaaaaaaaataattattatttaaaataatcattgggcctggcgcggtggctcacacctgtaatcctagcactttgggaggccaaggcgggtggatcacgaggtcaggagattgagatccagcctggccaacatggtgaaaccccatctctgctaaaaatattttttaaattagctgagcgtggtggtgggcacctgtaatcccagctagtcgggagactgaggcaggagaatcgcttgaacctgggagtcgaaggttgcagtgagccgaggtcgtgccactgcagtccacctggccaacacagcaggcctctctctaaaataataattattattattgttattcttgacaggccagtgtagaacaggtggggcatctgtggtatgacagaactgggttccaattctgtcccttcacctgtcccaggttcctcatctgaaaactgtgacccagtaaacctaatttcatgagcagctttcattaaaattgaaataatgttggaaaatgccttgtaaccgtgcttgatatagagtagttacttagccagttatttcctctcttcttccaattcctaacaaaatggaaaaacgtttggttgctaggaaagagctctaaggggattttgttgttgtttgagacaaagtttggctctgtcgcccaggatggagtgcaatggcacaatctctgctcactgcaacctccgccatagacaggagccaagcatagtggcgtgcacctgtctgtagttccagcctcttaggaggctgaggcaggagggttgcttgaggccaggagtttgagtctagcttgggcaatatattgaaaccttgtctcttaaaaaaaaaaaaaaaagaggccaggtgtagtggctcacgcctgtaatcccagcacattgggaggccgaggcagtggatcacttgaccccaggagttggagaccagcctgggcaacatgcaaacttccgtcttctaggccgggcgcggtggctcaacacctgtaataccagcactttggtaggccgaggcgggcagatcacgaggtcaggagatcgagaccatcctggctaaggtgaaacccagtctctactaaaaataaaaaaaaaattagccgggtgtggtggctggcacctgtagtcccggctacttgggaggctgaggcaggagaatggcatgaacccaggaggtggagcttgcagtaagccgagaccgcaccactgcactccagcccaggcaacagagctagacgccctctcaaataaaagtaaataaataaataaaattatgtcattaaaaaaaaata

SEQ ID NO: 465694 - DNA, 764 bp, Homo sapiens
cctatatttggagagggctctttatgttaaatctcaaattccttatgaaaataattcattttatgcaaataattaggacaaatataatggaactgaaacttgttttgcaaataaattggtgctgctgtgatttgtctttggtaaaaatagggaactggagagagaaaaattatgtctcaagtaaaaaactatattatacctgttgttggattccaactcggtctattgtttttgagtctctactggtgacctcaaatctgatttgttttcaaggtcattcagcggcatcactcaaattttcaggtgtccttcaaaaatgtcatgtgctcataaacacttcaaattctcagtggttctttctgaattataaactccatgaagacccaattccatcagcagccattggaagtttttgacaaaatgggaagatcactgctgtatatttgtagtttaaatagcgagcatttaaagctttctctgaggcagtttctggaaagttaaagactaatgagaaaaacagctgaagaaactctccccaatgagtttatgtccctaagcgatgaatttttgaatggtgcaatgttctaacatgtgatggacagcgaattcccagagaatcatcaagtacactttggaataaatgaacagcaggacatattttttaaggagtgctgagccgcagtaaaactccagagaatgctctaatttcttgatttatttcctggatttcctcctaataaacaaagaatgatgaaagcaaatat

SEQ ID NO: 465695 - DNA, 1795 bp, Homo sapiens
cctcttcaggctttgtggttctgcagcatctgggcccgccaaggactctctctcccattcacccaaacaacagatgctcttaaggaatggtaccagctcctccttgtacctctggtacctctgtgaatccatctggtcctggactttttttgattggaccctcagctgcaggtctgttggagtttgctggaggtccactccagaccctgttttcctgggtatcagcagtggaggctgcagaacagcaaatattggtgaacagcaaatgttgctgcctgatcgttcctctaggtggagtctacagaggcaggcaggcctccttgagctatggtgggctccacctaattcgagcctcctggctgctttgtttacctactcaagcctcagcaatggcaggcgcccctcccccaacctcgctgctgcgttgcagttccatctcagactgctgtgctagcaatcagcatggttccgtgggcatgggaccctccaagccaggcacgggatattatctcctggtgtgctgtttgctaagaccatcggaaaagcacagtattagcgtgggagtgacctgattttccaggtgccgtttgtccccccttcccttggctaggaaagggaattccctgaccccttgtgcttcctggctctgtcccatcagcttcctccacagagcctgaaccggcaccagctccactctgcaggaaggaggatgtggaaatgaagaggcaggctctgatgactcaacacagccacccaaacaggcaatctccctgggacttgctcaggggatttttacccccctacatgaagcagagaaacagtgagtttcctccaagatgtcaaatccaagatgggtgttcctgatctgcctgtagctctcctccaacccagactcctttcaaactgtggctccaccatcttcaatatggagcttccaagatcgccctgctgccctgcatcaagcctgcaaaagaggatagggggtcaggccactcatatttcattggcccaaattcagtcacatggccacactcactgcaagggaagctgggaaatggagtctagctctgtgcccaagaagcaaagaaaaacagatttgatgaagacttagtcaatctctgcaacaatgaaacagataagaaggcaaaagaaaaagaattttacaacctgaggagggagagaaaattcagttaacaaaaagatagactacatgccaaggtagtctgcagaattctacctacccaaattatgtgttaaattgtgaaagaagttatgataaaaataggatgagggtgaaatttgaaaaatgctctggggacacatagcacactccttccctggtgacacagtaggcagaaccaagccaactataaaaggaagctcagtgtgtttaatctgttgctcggataaaaccatcctggaaaaactcccagttttacaatctaactgatcatcagtatctcagttatacaaataactccagcctgcatgaaataccttcttgctccccttgacttgtaaaaataactttgtttcaatggaaaaggtgtagaaaatggacgttgaagccaatcaaactcatagtatcaatactttgtgttaagctttaggagtaagttttgtaatcattgcaatcagcttgtttttgttatttaagcagcttaaaatgattaagataatctgacatattagccttacgattttattttggaatgataaactaatactcaatttgtaattttcacttgaaagttgcagaataattgaatatgttctttaaaagtgtttgaatatt

SEQ ID NO: 465696 - DNA, 1089 bp, Homo sapiens
ggggattgggcagtgcaccagaagaatctaccacattcccgaggtttacttcaagatgcaattgggcctgcctgtcaagcctttgcagtaaacattccatgcatatctaatgagtgacacaaacacagcttggtcaaatccaagatgggtgttcctgatctgcctgtagctctcctccaacccagactcctttcaaactgtggctccaccatcttcaatatggagcttccaagatcgccctgctgccctgcatcaagcctgcaaaagaggatagggggtcaggccactcatatttcattggcccaaattcagtcacatggccacactcactgcaagggaagctgggaaatggagtctagctctgtgcccaagaagcaaagaaaaacagatttgatgaagacttagtcaatctctgcaacaatgaaacagataagaaggcaaaagaaaaagaattttacaacctgaggagggagagaaaattcagttaacaaaaagatagactacatgccaaggtagtctgcagaattctacctacccaaattatgtgttaaattgtgaaagaagttatgataaaaataggatgagggtgaaatttgaaaaatgctctggggacacatagcacactccttccctggtgacacagtaggcagaaccaagccaactataaaaggaagctcagtgtgtttaatctgttgctcggataaaaccatcctggaaaaactcccagttttacaatctaactgatcatcagtatctcagttatacaaataactccagcctgcatgaaataccttcttgctccccttgacttgtaaaaataactttgtttcaatggaaaaggtgtagaaaatggacgttgaagccaatcaaactcatagtatcaatactttgtgttaagctttaggagtaagttttgtaatcattgcaatcagcttgtttttgttatttaagcagcttaaaatgattaagataatctgacatattagccttacgattttattttggaatgataaactaatactcaatttgtaattttcacttgaaagttgcagaataattgaatatgttctttaaaagtgtttgaatatt

SEQ ID NO: 465697 - DNA, 1052 bp, Homo sapiens
ggggattgggcagtgcaccagaagaatctaccacattcccgaggtttacttcaagatgcaattgggcctgcctgtcaagcctttgcagtaaacatgtcaaatccaagatgggtgttcctgatctgcctgtagctctcctccaacccagactcctttcaaactgtggctccaccatcttcaatatggagcttccaagatcgccctgctgccctgcatcaagcctgcaaaagaggatagggggtcaggccactcatatttcattggcccaaattcagtcacatggccacactcactgcaagggaagctgggaaatggagtctagctctgtgcccaagaagcaaagaaaaacagatttgatgaagacttagtcaatctctgcaacaatgaaacagataagaaggcaaaagaaaaagaattttacaacctgaggagggagagaaaattcagttaacaaaaagatagactacatgccaaggtagtctgcagaattctacctacccaaattatgtgttaaattgtgaaagaagttatgataaaaataggatgagggtgaaatttgaaaaatgctctggggacacatagcacactccttccctggtgacacagtaggcagaaccaagccaactataaaaggaagctcagtgtgtttaatctgttgctcggataaaaccatcctggaaaaactcccagttttacaatctaactgatcatcagtatctcagttatacaaataactccagcctgcatgaaataccttcttgctccccttgacttgtaaaaataactttgtttcaatggaaaaggtgtagaaaatggacgttgaagccaatcaaactcatagtatcaatactttgtgttaagctttaggagtaagttttgtaatcattgcaatcagcttgtttttgttatttaagcagcttaaaatgattaagataatctgacatattagccttacgattttattttggaatgataaactaatactcaatttgtaattttcacttgaaagttgcagaataattgaatatgttctttaaaagtgtttgaatatt

SEQ ID NO: 465698 - DNA, 1132 bp, Homo sapiens
cggccgagagctccaccgctgaggccaacgaggccacgcatttatttttagcaccaactttaaggatttttattatgacaatagaggttaatgagcattttcacaagataaacaaaaaatccccccaaatatgtaagtgttttaacataatgattgcagtttatttttcactcaggtcaaatccaagatgggtgttcctgatctgcctgtagctctcctccaacccagactcctttcaaactgtggctccaccatcttcaatatggagcttccaagatcgccctgctgccctgcatcaagcctgcaaaagaggatagggggtcaggccactcatatttcattggcccaaattcagtcacatggccacactcactgcaagggaagctgggaaatggagtctagctctgtgcccaagaagcaaagaaaaacagatttgatgaagacttagtcaatctctgcaacaatgaaacagataagaaggcaaaagaaaaagaattttacaacctgaggagggagagaaaattcagttaacaaaaagatagactacatgccaaggtagtctgcagaattctacctacccaaattatgtgttaaattgtgaaagaagttatgataaaaataggatgagggtgaaatttgaaaaatgctctggggacacatagcacactccttccctggtgacacagtaggcagaaccaagccaactataaaaggaagctcagtgtgtttaatctgttgctcggataaaaccatcctggaaaaactcccagttttacaatctaactgatcatcagtatctcagttatacaaataactccagcctgcatgaaataccttcttgctccccttgacttgtaaaaataactttgtttcaatggaaaaggtgtagaaaatggacgttgaagccaatcaaactcatagtatcaatactttgtgttaagctttaggagtaagttttgtaatcattgcaatcagcttgtttttgttatttaagcagcttaaaatgattaagataatctgacatattagccttacgattttattttggaatgataaactaatactcaatttgtaattttcacttgaaagttgcagaataattgaatatgttctttaaaagtgtttgaatatt

SEQ ID NO: 465699 - DNA, 600 bp, Homo sapiens
ttggcttagggctcgctgatgacaggccacttctattctgtccctgaagtgtcagctcctggccaggcggtggggcaggccccacttcatgctggttctgtggctttgaactcacgagcctgccacccttcagagggctctgagcgggctgtgtgccgggcgagaacactgcctgggccggggccactgtggcatgagaagggccgcctgggggcccggggcctagagcaggcggtcatgactctgtgggtcctgccatcctcccgttttggaagtgaggagactggggtcacattgatggggttcaggtcacgcagcagtaagtactggatcctggattcagacctggtggtgcctccaggttctagaaccttgactcgtgtggctcctggtctggttgttggaccccaggcccggaaggacgccttagtagagtgtgggctgcattgtcactgcaacaggttgctgaagacatgaggagagtagcttgcattcctttgccataattatgcaaacgtgcaggacttttaggggacctctctgaaatagagcaaacttcattagggaatcaaaggaaaagattggctcagaatttagtgg

SEQ ID NO: 465700 - DNA, 290 bp, Homo sapiens
aaacgcatttattcccaataataatcattagtgtattcagataggtatatgtgtttcaggtttgtgatatagtaggaagaagaatacccttctttgttaaggtgcttgtttttacacccagcaccaaatccctcccaggcttctgccagccccactcagtcttagttccaatactaatggtctattatttactcccaaactcccttacatctattcaattagtccttcagggagtcgttggttcccgaagcaagggggtaaccggagctcgaaatttcgtacatcatggt

SEQ ID NO: 465701 - DNA, 1807 bp, Homo sapiens
aaacgcatttattcccaataataatcattagtgtattcagataggtatatgtgtttcaggtttgtgatatagtaggaagaagaatacccttctttgttaaggtgcttgtttttacacccagcaccaaatccctcccaggcttctgccagccccactcagtcttagttccaatactaatggtctattatttactcccaaactcccttacatctattcaattagtccttcagggagtcgttggttcccgaagcaagcagatatgcagcttaatccaggactagttaacgttcctggcgtcagcagactcaggagggagctgaacacctgtgtgtatccagcagcaagaagactgaatgaagaggtacagtaccatactactccactttcccccaccatggtgtcagcaggggatggtgggaagctgagccttcatcttcatcagcaaactaacactggaacagaaaaccaaataccatatgttctcacttacaagtgggagctaaatgatgagaacacatggaaacatagaggggagcagcacacactggggcctactggaggttggaaggaggcttcaggaggagcatggccctgccaagaccttgactttggagccactagactccagatctgtgagagaacaaatttctgccactttaaacctcccagtttgccctatttgctacagcagccttagcaaactaatacaaaaatagtgatatttaatgaatggcataggaaaatgtttattggaaaagtaattgagacttcaggaatatgggattatatgtttttataggaaacagattagggcattagaaaatgtttctttaagggaacaagataaattaggccaaatcagaccacactttgactaagatagataaacaaagagatacttgatataggcctagtctctacataaaagtgaagtggatataaatgtgaataattaatttattacatgacaaagacggtaaaaggagggaaaagaaaaaaaaactgttccatagacacatgcctttttgattaagactgataattctcagagcttgtctaccaagcaatctggcttaaagaaagcactaatggattttttcatgtagaagtgtattcatgttggaaaaggtgttgtaagcatagtactgaatatattggaatttttgaaaaacctatgcaactgtaattgctcagtgttttatgcagggcaatgtgtaattgctgtcttttgtttatttttagataaaagatctgcagctatggaattcttctccatgacattttcacagaacatactacttgtgatttatatcatgtccttactcaagggttatgtgagtcttcatgtgttaggtgagtctcttgaagatgacagatacttggttggtggatttttattcattctgcaattctgcatcttttaagaggagcatttaggccatttacattcaatgttagtattgaaatgcgaggtactgttctagtcatcatgctagatgctgcctgaatatggttttttttttcattgtgttattgttatatagatcctgtgaaatttatgctttaaggatgttctattttggtgtatttcaagattttgtttcaagatttagaaatccttttagcatttttttttgtgatgctggcttagtagtggtgaattctctcaggatttgtttgtctgaaaagggttttatctcttcttcctttatgaagcttaatttcacaggatacaaaattcttagctgataattattttgtttaaggaagctgtattagtctgttttcatactgctgataaagacat

SEQ ID NO: 465702 - DNA, 326 bp, Homo sapiens
ttggggtgtattaagaaaaacagctctgtggaagtttgagtgactcattgcagagaggaattgatgaagtcaacagctgctggaaaaacttctttttccttaatagctgtatcaacatgtggttgctattattcaagtaagaaaaatatgtatatcaaacatccatggtagtccttgctaaaattttcattagagagactcatgttttgacattaaaaaaagttcaaatgggtaccttagaggatgttttgttggagaacaaaatcatggagaaataaagtctaaaaagaaaaataaatggcaagcatgttgttaaaaaaaaaaaa

SEQ ID NO: 465703 - DNA, 953 bp, Homo sapiens
aggaaaagctaaggatgtggaaggcattgaaattcaaacatgggaagtcaagaagaggaaactcggacaaatgccactggaccgtctgttatctcttgacgtcttttccagttgtcgtagaacctctccaaggtactaagaaagtagaaacatccacactttggatggttaactcaacattgacattgatttttgagacattgacattaacattgatttttaggcaaaataatggaaactaccaggcccctagtgccacagactcttctcacaaccctgggtttgagtacttcctacaaaccaaatattgtatagtagtcctggaacatggcctatctataatcaagaaaaccaggtgttacaaaggtctaatttccgatacattgaatacatctgggtctttagtccaggaaagaatcacctccaagattaacttcctcttccttccacagccccttgactgggcaaacttcaaacaagtgactgagctcccttagctgccactgattggaccaggatggacaacaaatgtaggaggagttcatctggatctagcctgagccagtcagatatcccctttgaatccatgcctatagaaatacaaaaaaatggaagccagaggatgatggatccttgaagtaataagtcagctctgtggaagtttgagtgactcattgcagagaggaattgatgaagtcaacagctgctggaaaaacttctttttccttaatagctgtatcaacatgtggttgctattattcaagtaagaaaaatatgtatatcaaacatccatggtagtccttgctaaaattttcattagagagactcatgttttgacattaaaaaaagttcaaatgggtaccttagaggatgttttgttggagaacaaaatcatggagaaataaagtctaaaaagaaaaataaatggcaagcatgttgttaaaaaaaaaaaa

SEQ ID NO: 465704 - DNA, 1152 bp, Homo sapiens
aggaaaagctaaggatgtggaaggcattgaaattcaaacatgggaagtcaagaagaggaaactcggacaaatgccactggaccgtctgttatctcttgacgtcttttccagttgtcgtagaacctctccaaggtactaagaaagtagaaacatccacactttggatggttaactcaacattgacattgatttttgagacattgacattaacattgatttttaggcaaaataatggaaactaccaggcccctagtgccacagactcttctcacaaccctgggtttgagtacttcctacaaaccaaatattgtatagtagtcctggaacatggcctatctataatcaagaaaaccaggtgttacaaaggtctaatttccgatacattgaatacatctgggtctttagtccaggaaagaatcacctccaagattaacttcctcttccttccacagccccttgactgggcaaacttcaaacaagtgactgagctcccttagctgccactgattggaccaggatggacaacaaatgtaggaggagttcatctggatctagcctgagccagtcagatatcccctttgaatccatgcctatagaaatacaaaaaaatggaagccagaggatgatggatccttgaagtaataagtcagctctgtggaagtttgagtgactcattgcagagaggaattgatgaagtcaacagctgctggaaaaacttctttttccttaatagctgtatcaacatgtggttgctattattcaactgccatgttgtgagttgccctgtggagaggcccatgtggaaaggaactgagagagggctctggctaaaaccactgagacacggaggccctcagtctgacagcctaagaggaactgaatcccgccatcggccatgaactggagaaagaatgatgtctgcctgtccctgggccctgtgaagatctctgtggccactcgcactttgggaattttgctgcataatttcgaaaaaaactagtgcatgttgtcagcttcattcctagtatgtctaagccatgaactcaggtgggaaaagggggagggggatgatactctggtgttctaactggctaagcttcctcttgggaagaattaaaaataaacaggcaaaggaaaggaaggaaccacaga

SEQ ID NO: 465705 - DNA, 1320 bp, Homo sapiens
aggaaaagctaaggatgtggaaggcattgaaattcaaacatgggaagtcaagaagaggaaactcggacaaatgccactggaccgtctgttatctcttgacgtcttttccagttgtcgtagaacctctccaaggtactaagaaagtagaaacatccacactttggatggttaactcaacattgacattgatttttgagacattgacattaacattgatttttaggcaaaataatggaaactaccaggcccctagtgccacagactcttctcacaaccctgggtttgagtacttcctacaaaccaaatattgtatagtagtcctggaacatggcctatctataatcaagaaaaccaggtgttacaaaggtctaatttccgatacattgaatacatctgggtctttagtccaggaaagaatcacctccaagattaacttcctcttccttccacagccccttgactgggcaaacttcaaacaagtgactgagctcccttagctgccactgattggaccaggatggacaacaaatgtaggaggagttcatctggatctagcctgagccagtcagatatcccctttgaatccatgcctatagaaatacaaaaaaatggaagccagaggatgatggatccttgaagtaataagtcagctctgtggaagtttgagtgactcattgcagagaggaattgatgaagtcaacagctgctggaaaaacttctttttccttaatagctgtatcaacatgtggttgctattattcaaagtggatgaaataattctgcaagccagtgggaacaggaagcttcatgaagaggagaaaggcttagggctcagaaaccgcacagagcaggaggatagatgaatgtaaggaacagagctttgaggacagacacctctggattagacaatagctccaaaacttattaatgatggtgaatgggtgactttctaaaaccctttaaaccttatttgtaaaatgggaccatcaatatctattttgaaatcttgtataaatttgcaataatgtctgtaaagtatctgacaggagctcagaaatgacacaattctttaaatccactcacacccaacttttaaacaaaaagtagcagtatatcctacacacgatttttaaattttactatttaagttaacatcatgctatgaacatatttccatgtcattaaatattctattccatccaatatttaaaagctaatagaagtctgttaaatgcatatgccataatttatttaaccaattcggttgttttaatatttatgttgtttccaatatattatgctattgacaataaaatgatg

SEQ ID NO: 465706 - DNA, 1358 bp, Homo sapiens
  misc_feature (1358)..(1358): n is a, c, g, or t
aggaaaagctaaggatgtggaaggcattgaaattcaaacatgggaagtcaagaagaggaaactcggacaaatgccactggaccgtctgttatctcttgacgtcttttccagttgtcgtagaacctctccaaggtactaagaaagtagaaacatccacactttggatggttaactcaacattgacattgatttttgagacattgacattaacattgatttttaggcaaaataatggaaactaccaggcccctagtgccacagactcttctcacaaccctgggtttgagtacttcctacaaaccaaatattgtatagtagtcctggaacatggcctatctataatcaagaaaaccaggtgttacaaaggtctaatttccgatacattgaatacatctgggtctttagtccaggaaagaatcacctccaagattaacttcctcttccttccacagccccttgactgggcaaacttcaaacaagtgactgagctcccttagctgccactgattggaccaggatggacaacaaatgtaggaggagttcatctggatctagcctgagccagtcagatatcccctttgaatccatgcctatagaaatacaaaaaaatggaagccagaggatgatggatccttgaagtaataagtcagctctgtggaagtttgagtgactcattgcagagaggaattgatgaagtcaacagctgctggaaaaacttctttttccttaatagctgtatcaacatgtggttgctattattcaaagtggatgaaataattctgcaagccagtgggaacaggaagcttcatgaagaggagaaaggcttagggctcagaaaccgcacagagcaggaggatagatgaatgtaaggaacagagctttgaggacagacacctctggattagacaatagctccaaaacttattaatgatggtgaatgggtgactttctaaaaccctttaaaccttatttgtaaaatgggaccatcaatatctattttgaaatcttgtataaatttgcaataatgtctgtaaagtatctgacaggagctcagaaatgacacaattctttaaatccactcacacccaacttttaaacaaaaagtagcagtatatcctacacacgatttttaaattttactatttaagttaacatcatgctatgaacatatttccatgtcattaaatattctattccatccaatatttaaaagctaatagaagtctgttaaatgcatatgccataatttatttaaccaattcggttgttttaatatttatgttgtttccaatatattatgctattgacaataaaatgatggcctcgttggcctcagcggtggagctctgccgccggan

SEQ ID NO: 465707 - DNA, 1850 bp, Homo sapiens
ccactgcacccagccattgtgacaacttagtgatttttcccttagtggctctgacacaagaagcagacaggacaggatggggtggaggctcatggtcacagtttgagttttttctccctttaaagtattttccattcctgaggccagtgggatgaaggaagggaaacaaatcacacttaatcctcagatagtggttaattctcataattaaccaggtgtatttcaatttggctttttcgagatgggggggttgacaagcatttcagtttttaaatttttttatgatgaaaaataaaatctatgcaaaagtatgtagtacaatggacatccataaactcagctactgcgattcaataatggttgtatttgtcatatttgctttgtgtgtccatacatatatttaaccatttaaaagtaaattacggacaccgtatcacccccaagtacttcaacatatatttctaaaaaaaaaaaatgatgctgcctgcataagtaaatatgattggcacacctaacaaaattaatttcctgtatcatctaatacatatatatatgttcccaattgtctggaatgtaccttttagctgttttttcccaaaaccatgatcgtgcatcatatatggctgttctatctctgaaatcttttgatgttggaaacaggagccccctgtctcccttccctcgcagcttttcctgaacacactgctgtttgaggtgttcaactcactcctccatccttagcactgcctacaaacaagaaattggatctaaaggctcggttaatccaagctgctgcttcctttcggggcagctcctgggcccctgtgcacagcagggccacatagtgtctgacatccaccattagtggtaacattaggctcaggtggtaacaactggatctttaacctggctccccttattccttaagcatctctcagttgtgccctctctacgcttctcgagggctgtgtcctggcacctcttctgcaagcagagagccagggatgtggcccgccacctgggacaggtacctgctgtactccctctcagatccagaaaagaggtcatagcagtgaaaatgcaggtgagaccatttgattccaccccccaacccgcctgcaaatgtaagcagctttgtgggaggaactagtaaaaaaatttgcatgggaattggaaacatcctaaccaccttgagatcagacgacactgctctgtttccatgctacagggatcctgttaagtgtgacctgtgtcacagaccatcgccttcccctcggtagatgctgaattgaggaggaaggagaggagagcttgaatgaaggctgcattagtgcacgtggctcacataacagccaagatgctacagagccccttgctttcctcactaaggggtagcatgattgtgtgacctttggttataaagctgtgtgaaactcaagactttaaaacgtgctattaagacagaaggatatggtaagaatttttattctgtaagaatcttcaaagctcagcatgaagatacacatctttcccatgggaatccaggctagagaaatgcaagaaggcggttccctctagagtctcctttcctgggagatgcagctccagatgggtgggtttctgggcaggaggggagaggagggtaggtgtttattcaactgtttatttgggatcatgttatgcgtcttcaaaaagcgatataagagaaaatattggaaagatatttcaaaataagaattaccttgaagtaattcccataattaatgggtaacatttttgtgtatgtattttggctttttattgtaaaaataatgtattttcattgtagaaagttttttttaaaaagtaac

SEQ ID NO: 465708 - DNA, 3878 bp, Homo sapiens
tgggtgagtgtggactgcagtgtcgcctactccacccttgctggggagcatggatgttactggtgcccactttgcccccgccttcccccctgcccccggtcttgcctggtgccctcagagcctgagcctctcacccacacctgccatgtaattccggtcctcctctggctgtctcacagaggtcagcggaacggttccgtggagccgccctcccttaagcccagatgctcacaccgagcttcctgattgtccttcttgtcatggctgtgttcaagatgttctttctgtggggcgtctcttccttgctgggctgacagccctgggacagcggggacgccacaccctggggcacaccgcctagggtcccttgtgtggtggggggccaagagagactgctatggaaggtcaccgcaagggtttatactgctccatgcctgcagtgcttctggctctgttgcgggagcacctgaccccagtagccacagccaagaaggttttacttttaaatggcatcggcaggtgggtaagagttgatgatgctgctggcagcgcactggtgttggcggcctctgataaggcaaagccaccttttgctgctgtgttgccgcaagaacacgggtcatctggtgatgcggacacgttcccgttggagctggagcgtgtccccctcgctgctgtgaagaagcacagaggccgtggcctgtgccagcaacacgagtgcagcctgggcgactccctactctgggcctctggtgatctgagctgtgctctgcgggatccacttgtgggcccggcctcagcctggcctgactgcagcatgttctattaagtattcaaaacacgatcagcttgaaggcacatcctccccaacccttgcctgctgctgaggtcggggtctggggtgctcttggtggaggagatgcagctttcaggcctgcatcccagctctgcatgcagcccctgccacctcccacccaagtgccaggaagccactttgtctccctccattctacatgaaagcaccttcccaaagcttctctagtgtttcagggtcttggcccagggtggtgcttccactgggacatggtccccagggtttgtagggcccaggtttgggtcccgtgccggctgccacccagccccagataccacggctgcttcctgtgcagccaccgcatgacagcccccctcacaagatgcccacaggagatgcccgtgtgacagctgcactggctccttccatggctgagcactgggcccagggagcagaaggcactggaagcagaagggaggagccctgccctggcagcatgtgccagtggggttctgaaatgccctcccgtttacatgagaaaagtcggggggtgtggttggtgtgggccttctgaacttcagttcttggatttctcatttttgtaacgcgagtgctatctatgctataacattcttaatactctttaaaattgattcactttaaagaattgcttgctgaggaagctggtgggtgaggacagggttgcggatggtgggaggccctgtgaggaggggcgaggggcttcagggctggaactgccgaacagccagtggaggggccaaacctggggagcgtggggcaactcgtgtgggaggtgttctcgggcaggctcacctgcagcgtctttaagcatgcgctttcatagaatcctcttgcagatcctggggcacctgtgccgccaagagtcctgctcacctggctggctccttggtgccctgacccatggctcttctcacctgtgtgccacccccaagaggcttcttctttcttctgaaacaggccctcatctgtgaaccactgtccattgtggtcccctcctgttcattttgttcattttctgctcttctcttgcttgtttctcccttgacgccataaagtcaatttctcggtctaaatcctggttctcaaccctagagaggatcaatgtccccatatcaacaggaagtagagccagtgacatttctgcctcacccagagtgaggaccaggttggttgtgtgaggtgaagcagagctcttgcggggggctagtgtcatacccctaaccccgccttccattaaggccaaagctgggccctgcggggctttgtcccatggccagacttttttctccctttaaagtattttccattcctgaggccagtgggatgaaggaagggaaacaaatcacacttaatcctcagatagtggttaattctcataattaaccaggtgtatttcaatttggctttttcgagatgggggggttgacaagcatttcagtttttaaatttttttatgatgaaaaataaaatctatgcaaaagtatgtagtacaatggacatccataaactcagctactgcgattcaataatggttgtatttgtcatatttgctttgtgtgtccatacatatatttaaccatttaaaagtaaattacggacaccgtatcacccccaagtacttcaacatatatttctaaaaaaaaaaaatgatgctgcctgcataagtaaatatgattggcacacctaacaaaattaatttcctgtatcatctaatacatatatatatgttcccaattgtctggaatgtaccttttagctgttttttcccaaaaccatgatcgtgcatcatatatggctgttctatctctgaaatcttttgatgttggaaacaggagccccctgtctcccttccctcgcagcttttcctgaacacactgctgtttgaggtgttcaactcactcctccatccttagcactgcctacaaacaagaaattggatctaaaggctcggttaatccaagctgctgcttcctttcggggcagctcctgggcccctgtgcacagcagggccacatagtgtctgacatccaccattagtggtaacattaggctcaggtggtaacaactggatctttaacctggctccccttattccttaagcatctctcagttgtgccctctctacgcttctcgagggctgtgtcctggcacctcttctgcaagcagagagccagggatgtggcccgccacctgggacaggtacctgctgtactccctctcagatccagaaaagaggtcatagcagtgaaaatgcaggtgagaccatttgattccaccccccaacccgcctgcaaatgtaagcagctttgtgggaggaactagtaaaaaaatttgcatgggaattggaaacatcctaaccaccttgagatcagacgacactgctctgtttccatgctacagggatcctgttaagtgtgacctgtgtcacagaccatcgccttcccctcggtagatgctgaattgaggaggaaggagaggagagcttgaatgaaggctgcattagtgcacgtggctcacataacagccaagatgctacagagccccttgctttcctcactaaggggtagcatgattgtgtgacctttggttataaagctgtgtgaaactcaagactttaaaacgtgctattaagacagaaggatatggtaagaatttttattctgtaagaatcttcaaagctcagcatgaagatacacatctttcccatgggaatccaggctagagaaatgcaagaaggcggttccctctagagtctcctttcctgggagatgcagctccagatgggtgggtttctgggcaggaggggagaggagggtaggtgtttattcaactgtttatttgggatcatgttatgcgtcttcaaaaagcgatataagagaaaatattggaaagatatttcaaaataagaattaccttgaagtaattcccataattaatgggtaacatttttgtgtatgtattttggctttttattgtaaaaataatgtattttcattgtagaaagttttttttaaaaagtaac

SEQ ID NO: 465709 - DNA, 838 bp, Homo sapiens
tgcttttatgactaagagactgctggtaagtaagttcccccggatcctgtgcaggtccagagatgccatctagaatccagggcctagagtcagaaaccttaggaatctatgtggtcctctattctactgcagctaagctggcacccaagccacaagatgaagttcttctcactctttccctttccacaagcaggggagtctcttctctcctgtggccaccactgccccaggcccacagtataggaagagccagcaggaaactgggccgtttggcaaaacccactgtgaccatcagtacagatggagatgtcatcacaataaaaaccaaaagcatctttaaaaataatgagatctcctttaagctgggagaagagtttgaggaaatcacgccaggtggccacaaaacaaagagtaaagtaaccttagataaggagtccctgattcaagttcaggactgggatggcaaagaaaccaccataacgagaaagctggtggatgggaaaatggtggtggaaagtactgtgaacagtgttatctgtacacgaacatacgagaaagtatcatcaaactcagtctcaaactcttaaggctttctcaagctgtcatccaaactactgaggttgtttaaataaaactccaaagtaaaataaaaaaaaaaaaaaaaaagatttgcggccgcggttcgtgtcgttgcgcgccaagcagaacatgatccgccgcctggagatcgaggcggagaaccattactggctgagcatgccctacatgacccgggagcaggagcgcggccacgccgcggtgcgcaggagggaggccttcgaggccataaaggcggccg

SEQ ID NO: 465710 - DNA, 413 bp, Homo sapiens
ctaatttttgtatttttagtagagacggggtttcaccgtgttggccaggctggtcttgaactcctgacctcaggtgatgtgcccaccttggccttccaaagtgctgggattacaggtgtgagccaccgcgcccggcctctctttcaatatttttaaggaatgtatgtgtggatagtacttagtttgcacttttctaaatgttaatttcactaactatactgaaatacctcatatttcttttgtcttgtaggaaagtactgtgaacagtgttatctgtacacgaacatacgagaaagtatcatcaaactcagtctcaaactcttaaggctttctcaagctgtcatccaaactactgaggttgtttaaataaaactccaaagtaaaatattacgactattaatatgagagagcct

SEQ ID NO: 465711 - DNA, 811 bp, Homo sapiens
tgcttttatgactaagagactgctggtaagtaagttcccccggatcctgtgcaggtccagagatgccatctagaatccagggcctagagtcagaaaccttaggaatctatgtggtcctctattctactgcagctaagctggcacccaagccacaagatgaagttcttctcactctttccctttccacaagcaggggagtctcttctctcctgtggccaccactgccccaggcccacagtataggaagagccagcaggaaactgggccgtttggcaaaacccactgtgaccatcagtacagatggagatgtcatcacaataaaaaccaaaagcatctttaaaaataatgagatctcctttaagctgggagaagagtttgaggaaatcacgccaggtggccacaaaacaaaggtgaggcctacgacagtctttcagacacatttcaaaagaatgttagtcagatatcatcctcgagtaaagtaaccttagataaggagtccctgattcaagttcaggactgggatggcaaagaaaccaccataacgagaaagctggtggatgggaaaatggtggtggaaagtactgtgaacagtgttatctgtacacgaacatacgagaaagtatcatcaaactcagtctcaaactcttaaggctttctcaagctgtcatccaaactactgaggttgtttaaataaaactccaaagtaaaatattacgactattaatatgagagagcctttctttgcacaagcatcaataattttgcttgccaaattgcacatgcctgtatcatgtagtactttggcattcgc

SEQ ID NO: 465712 - DNA, 1218 bp, Homo sapiens
ttccgccaaagtgggagcacaggcagaggaggcaccaagagcgaatgagggctgtgagggctgccagcacactgtcacctctcataaggagtgattaatctgagcttctccagaaagtcctttcctgggagactatcggggtgcaacctggctggggcggggaggaggtgcagggcctggccagagcgggcctggccacgggcaagggacagcgacttcctgggccaggacaggtgagagcggcgcaggcccgagcccggcgtggcggcggtgtgcgggagaggccagcagagggcgccagagagccaggagcggcccgccgaagagcccgcgccgcccggatgcccagctccgcgccgcgcggacccaacgagcccgcgctcagactccccagctccgccgagaggacgctcgcgctgggtccttcttcttccccaagtgcaggcagagcccccggagtcatggccagcccttccggcagctccgaagccactggcaagccctgaggtagggatggctggcccaggagggaggaggacgacgtccctcccgaagagaagaggctgcggctgttgctggaggggggaagcgcacagcccgaggacggggaggacgcgccgcggccgggcagggaggagaccggcacccagacaggtggcgacggcaaaggatgcaggcagagcccctggagccatggccagcccttccggcagctccgaagccactggcaagccccgaggcagggatggccggcccaggagggaggaggacgacgtccctcctgaagagaagaggctgcggctgttgctggaggggggaagcgcacagcccgaggactgcgaggacggggaggacgcgctgcggccgggcaaggaggacaccggcacccagacaggtggcgacggcagaggagcgtgatggcatacacctgtaatcccagctacttgggaagctgaggtaggagaatcatttgaatctgggagacagaggttgcagtcagccgagatcgcaccactgtacttcagccagcctgggtgacagagagagactctgtttcaaaaataaataaataaataaaatagaattctgaattttatttttaataattatttttgtaaagagaatgtcttgttttttggagttgttgaatttattgaattggcaaaaattatgtacaaaagggtatacaacatgatgtgattgaagtatgtgtacatt

SEQ ID NO: 465713 - DNA, 1476 bp, Homo sapiens
ctgacaggcaagtttcaagacagtggctaagcccaggtcctgaagagaggaggaccgtgcaggcggccccaacagaggacggggacagctctctccttctgtaagtgaggcagcctcatccttccctggatcctcagcatctcttaaccagcagtggcagaggttgaattagaatggcaccagcttcggataaaaatccagatctcgcttttcaaaatgtgtctagagctggtggctgtaaggaaccagtcaagcctcagctgtgactctaatcctgccaagtccacctgagagccgactcattcatccaaagagagaacggtttggatggagctcaaggtgcctggctcgctggcatagcccagacaacctcttaaaggccgggccacagagctagaaggtctgtcactactcagttggggaaatcgtctgagaagttcaagtccactgcctcgcaactcaaatgagtcagcctcaccaaccaagaatcgcgttcataaacagactcagagcctgcgtgccgtggggtttccccgtctgcaactctctcacctggccctcctgcagggcccggcggggactggggagggtcagtgctccctggggcggggactgggtctgtttccaggctcagtgcctctgagtcatacagatgccaggtggtcctgctgcttaccctcgctgaacctcaggcttctcgtgtaaacagggcgcttttgaggaattattattaacatctccctgtgagtcaaagcacctactgagataatgtatgtgatgcttgtaataaatgcagctacatgccaggcactctgagatgctgcctttgtggttattatttttagctcagccgtatgcgtgccggaatgtgttcctgttggctgtgcgtctaccatggaaagaaagttattgagagtctattatacgccagacactgtactctagggacttgggatgtgaatattagatacacaagtgcctttgaggagcttatagtccatcatggggtgacaaaaaaagtaacagataattataccatatgtttgaagcagtgtcatggaacagagaaaaacagtaagggatttggagcccagcaggaaacaggtggctgtacacagttggccgtcaggaccattctccactggaaagaatactaccgattgggtaatttatacaggattgaagtttatttaactcatggttctggagtctgggaagtccaagagcatggtgttacctgtgcccccatacggtaggtgacattatccttgtgtgatagcttaggacacagaggagacttggctataggccaggcaaggagtcaagccaaggtctggggacccccaggtccctgcattcttggatattttgcatctttggagaaagtcattggttggccctggcactcttgaactcaggctccaaggctcagctctggggttaccttactggtgtatgtactggcttttctctaga

SEQ ID NO: 465714 - DNA, 2230 bp, Homo sapiens
gagaattttcgcctcatgacagtggagattttgggtttgggctttggttgcaatcaccgaagcagtgcactgattcacctttgccaatctgctgggggtgagaggagagcacagcgaagacagacagagacaggacatcagaatgaagtaaggaagcagagaggaccaaaggtggaggatgaagacaatctcctggctggctgtgtccattcactcagcgagcattcacggaggggctgctgggtgccaggaccatgcctgatcccaggagatgagagtggacaagacagcaaaggccctgcctctggcactcatcacctaaatggacaaccagcaagtagtccaacaaataattaccaactgcaacacgccacgaaggacaaaggcaaggagccatggtggagcatgagggagtgtggaagagcactatgaaccaaagctacaaatgctttatgaccattaactcatttaactgtcacaatacctgtttgactttatgagctatcatataaataaaaagtataacatggtaaaacattacccacgttgtcctgttagaaagggaagaggggacttgaaaataggagaaggaaagaagaaacaggaatacttgttatcctagctcaggttagagagatgtgaccgaccaaacctacgagagttcgaacttcgcttcccgttgactctccacgttgaaggaaggagagggggatgtcaatgtggtaggtgggggagccagcagggtacctgccttgctgaagcccctgggctcaagcaggaagttattcccagctggatatggaagcacaaaggcacccatgtcgccctagacctctgaagctcagctgcaagggagccacactctgagctcccattctctgctcctgaaaagaaaggcaatcgctcctggcctcccggcagctgtgggcaggccaccgtgggatctatgaagccccagcctggcgacttggcactaacagagtcacggggaaacatgtaacttccatgttacaaatggggatcactattcaagactgttcaggcaagaagtgattccagcctgggcctgcctctggagcacaaggttttccctactctacctcctcgcttctccatgtagcccagcacacagaggtttgctgcttcatgtaagaaaagcgtcctgcaggaagcataacaggcattttgcagcaagtgttttgcaaagcacacatcttcacagttctagcatctgtggtgatttatgcagtggcaaatcgaacagaaatagctacagcaataaaaatacagttaaagaagtctctgtactttaaaggctgaacttcaagcaactgcagacttagggcctgatgattctctgtaattagtacatcagttttgatataaggagggatggatcagcataagacagaggtggaaagaaaccgaaggcagcacaaagccacataaaggacagagcacagcaccagggctagatgaaagttacagacactgtgccagacatttgcagctgagaccctctacctggtgaggttttaggtggccaagcctcattaaaaagttaaatctgtatatcaatctaagctaattgctcagtaagctgcgtagttcattttatagtatgggcccacttattcccagtggatcttgtggtttataaaaacctgagaaaaagagctacatatgaacaccaacagggtgaacctattaaacagtatttgtgggccctgaaattagccctgccttctcctgcccaccacccagactccagcccagtgataagcaacagaaatctaccatgttcatccagtagccacacttccacacctgcctcttcaccttttctccaagggcaagtaggaggaggaacaaaagggaaaaggatgcagtggaaagaccagtctcactgaagtctcgcaagttaaccttgtaagatcaatccagctaggtgctcagggaccattttctatttacttcctggttctgtttttagaagcaaaaggccatggagctactttatcctagagtggctttgctttttagaggacagtggaggaaaacaaaacaaaactccatacttagatctcctagaatattttaatttgcagccatgagatctcttatcataaattgaagaagggacagaaaaaaagggtacttactccactcaaacctaatttccatactcaactctccacttgtctattacaagagtgcttgaagcctggat

SEQ ID NO: 465715 - DNA, 2336 bp, Homo sapiens
aaaaaaacctatctagggaggagccaagatggccgcataggaacagctccagtccacagctcccagcgtgagcgacgcagaagacgggtgatttctgcatttccatctgaggtaccgggttcttctcactagggagttccagacagtgggcgcagcaggcttttcttcttggagctgaaacaggcgcactggcgagggttgtgaggaaaggtttgcagccccctgccttggtctgctatagccagtgacacgatcaataccagggtgagcagcagaggaagctcagggaagattatgaagatgagaattcattacctatcaaagaaaatgcgtaaactctagaagtattgcttgctcctttgccacaaagtgtacattcaagagtaaattgtttaaagccaaagggccttgcgccacgtccttagcctcagctttctacttgctaaaatggaaataacaacagtacctaccttacagacctggcgtgaggattaaattataccagcaaagtgcctggcacctagaatttgcctgagttctgatcaatgctaaaaacaccatttaacagtgccctttcctgcctgggaagcccacaaagatttcgcttttcacttattactcatcaaactgactctggttcacagtggaaaagagaagaaaagctgatggagaaatggcagtgaagaaggagaacaaaatgtcagagcaatacttttgagcgacttatcctctgttctgcaatatttgcaaaagtcagtctatagacgtgaagccaacagggaccctcaggcctgtgcatcaggatggtgggctgcctaagtcctctggggacagcagtgccagaaggagtattggacacagtgacccgactgtatgagatgagaaaaaacaaaaacaggaggtccgcagtactgatgaactaatctgtcactcacaagctcaggtctgcaaaaaaaagaaacgaagcactaaacatggccataagagatggaaatgcaagtcttcatttctaaatgataatcaaaccaacgatcagaaactgattaactgtgtaattgaattgaattgaaaatcatcccatgaataacaatccatcctaccttcaaggggttaggaagctaactacaggtaattgctatcagaaatctgatttgatttccaaaaattgtgtgaatgaaccaagtttcttcatcttgatatactaggcagggagtttgttcttccaagtactagactgcttaattgcttgcttgggggaggagaaatcctaggggaaaggcatatatgagcaatttctactctgtgaagccagcgctgtgtcctgagctggatcatggccagaaacagaaaagtctactcttccctacagtggaagcaactgtggatatttcatcctaggagtgaatgaaaaaacctaaagctcatacttcatgggaatctttcaatattctgactgaaaactggttatttgctcctccaacccaaagccatctaggaacagcactcagaacaggaaaaaaaaaagacaaaaataataattattccaaaacgtatttgagcagaaacaaacacaaacatttgcattattaaatgggcttgttcacacctgctgagtagatataagacgatatttaagacaagagctaaaaaataaaccatccctttctggttttgagtgacagcagagcaataaaaattattttcacattcttttccctattgttagaagtaatcatttgagtaaatacacttatctgtgctgtaactattgaaatgaatccacttcaaatatgtataccacctttcttttttatatttctagatatggtttcaatatagactttctgacttttatggtatacatataggacaatattctattcttctttccttttaaatacttactgtttcaatttcaaataaaaaatcagcattctagtttgtacattttagcacagaaatgtttacaaccttcagcacaattgcttttgtaatttactgacttggcattttgaggcgtttttaacaaattatgagaaataacaccttcagaaagcatgtgactactttgatgcaactatttacaatgtattcataagaagtcattaacctgtagagttcttagacatgtggaacctttaacaattatactaaagagtacatacaaaatacagagctatgtaataataactaattttaaatcctgacaaattagaagttaagcctactatctgtaaaaatatgtcctgattcatttttttaagtatatacctgagcctttaaaaagtatatgcctttacaattgatttccaataaacaatactgaataacatact

SEQ ID NO: 465716 - DNA, 806 bp, Homo sapiens
  misc_feature (768)..(768): n is a, c, g, or t
  misc_feature (774)..(774): n is a, c, g, or t
aaaaaaacctatctagggaggagccaagatggccgcataggaacagctccagtccacagctcccagcgtgagcgacgcagaagacgggtgatttctgcatttccatctgaggtaccgggttcttctcactagggagttccagacagtgggcgcagcaggcttttcttcttggagctgaaacaggcgcactggcgagggttgtgaggaaaggtttgcagccccctgccttggtctgctatagccagtgacacgatcaataccagggtgagcagcagaggaagctcagggaagattatgaagatgagaattcattacctatcaaagaaaatgcgtaaactctagaagtattgcttgctcctttgccacaaagtgtacattcaagagtaaattgtttaaagccaaagggccttgcgccacgtccttagcctcagctttctacttgctaaaatggaaataacaacagtacctaccttacagacctggcgtgaggattaaattataccagcaaagtgcctggcacctagaatttgcctgagttctgatcaatgctaaaaacaccatttaacagtgccctttcctgcctgggaagcccacaaagatttcgcttttcacttattactcatcaaactgactctggttcacagtggaaaagagaagaaaagctgatggagaaatggcagtgaagaaggagaacaaaatgtcagagcaatacttttgagcgacttaccctccggtcctgcaaatatttgcaaaaagtcaagtcctatnagaccntggaaggcccaaccaggggaacccctcaaggg

SEQ ID NO: 465717 - DNA, 539 bp, Homo sapiens
cctagaggcaaagattgcagtgaactgagattgtgccactgcactccagcttgggcaacagagtgagaccctgtctcgaaaacaacaacaacaacaacaacaacaaaacttgtaaatcactaacctcaaggcaaaatcaaccttatattaacaaactggtttcaaaatctctggattttgcctaaggaagagcagagtaatagtaatcactttgtttctcctagaattcattacctatcaaagaaaatgcgtaaactctagaagtattgcttgctcctttgccacaaagtgtacattcaagagtaaattgtttaaagccaaaggtaagactaaacaacttatttaatatcatcctgtctgttatttctaggtcttctttgataacatgtcaaggagttacatttgacatagccctgttatttttaccacaggttagttttaaaccccattgtggcttataatcaacattaccatcaacatcaccaacaaatcacatcaccatgactatcaccaccacatcatcactatcaccaacatca

SEQ ID NO: 465718 - DNA, 1432 bp, Homo sapiens
aaaaaaacctatctagggaggagccaagatggccgcataggaacagctccagtccacagctcccagcgtgagcgacgcagaagacgggtgatttctgcatttccatctgaggtaccgggttcttctcactagggagttccagacagtgggcgcagcaggcttttcttcttggagctgaaacaggcgcactggcgagggttgtgaggaaaggtttgcagccccctgccttggtctgctatagccagtgacacgatcaataccagggtgagcagcagaggaagctcagggaagattatgaagatgagaattcattacctatcaaagaaaatgcgtaaactctagaagtattgcttgctcctttgccacaaagtgtacattcaagagtaaattgtttaaagccaaagggccttgcgccacgtccttagcctcagctttctacttgctaaaatggaaataacaacagtacctaccttacagacctggcgtgaggattaaattataccagcaaagtgcctggcacctagaatttgcctgagttctgatcaatgctaaaaacaccatttaacagtgccctttcctgcctgggaagcccacaaagatttcgcttttcacttattactcatcaaactgactctggttcacagtggaaaagagaagaaaagctgatggagaaatggcagtgaagaaggagaacaaaatgtcagagcaatacttttgagcgactatatccttttcattaaaggtgtcaacacgtttatttgcatctttgaccctaggactagggaagtgctggaaattatgtgggtactttttcccatgggaaaaatgtacctcctggtgaagaaacatccttcactgacctctgaaacaaatattatagattttacacgcaggaaacttattacatgcaaactttcttttgtaagcatttgtattctaaaagttgcagccacctctctgcatatgttagagtctatagacgtgaagccaacagggaccctcaggcctgtgcatcaggatggtgggctgcctaagtcctctggggacagcagtgccagaaggagtattggacacagtgacccgactatacaaggaggaggcactaaatggagctgtttattaaagctgctgtgctggattgcattaggaagcgcgagcagaccacctggacctttcaagattgtgacagtgtttaatttgcagcctgcccttctgcagcagccaagactactactacatttaccgggctcaatcacacattatctgggttagaagtcaaggcacatgtatttatatatttatatttcccatatggagaaagggagagagggagagaaagagagaaggagagagcacagtcaaaataaaaatattgaacagcattagaaaaatattaactactacctaggaaaccacacttgattctcttctc

SEQ ID NO: 465719 - DNA, 1142 bp, Homo sapiens
tgatgaatcatggatactttcactgatcctttcaagtgcccctgcccctacctacgccttttagagatacccataatgcttacattggtttgctttatggtatcgtgtttgaggtgtgggcatgcacatggtggtgccagagtctggggcatgagtctggggcatgagcacacatacggtgtggtactgggatccaagaaggccatgtgcagagcttcactggtaccaatgtttaaggtgtggacatgctcatggcagcaatcacaccagtttctgtggtatagcacatatagggagcaaggaagggatatagtggtagctccttctggactggagagcggcacaggaacatggactctgggcagctctgtcaaccagagtcagcattggcaaagactacagaggctcaatggcaaaaaccactgggatcattgtgctctgtttaccccactggtagaagtcagaaccaagaggatccctcttggtgctgactgtgccaggctgggaaatggggtggcacagtctggtgacagtggactctggacagagataaatgagaggtcaagctacccttcatttttccagaggattatttcacccacagataaggcacgaagaaggaagtaatagtcaagaccagcctgtgagaaaacaacaaaaaaaggataactaacaaaagccccattctccagctcttgccccggccagcgcttcagcacgccttgtctcacccctgaaggaagagcttcatccctttccagtgaagcctgcttgccctgtatgatgcagggtcaaagtatgaggtgctcctcaactacccaatccaccggtgcatcatgagtcctcaacatccatgtaaaccacttttcctataaagagcagatgcatgagaacaaacccatttgaaaggaacactttggcttcatggttctcatagaattctaatgaggaatgggtcattttctggcactaggtaagtgattctgacataacctggacctgtataatcatatgattagagcatttagggagaaaatgtatcacagaaaatgatagtaataataatttatcagtaataaagtaaatatgcatagagaactttagaagtgttttttgtcgatgaattctttttcagtcttacc

SEQ ID NO: 465720 - DNA, 1730 bp, Homo sapiens
ttctgctctcctcacccttcaattatgatatagcccttcagttcatggtttaaaaaagcaaagggagggcggttgcgggagggagcggggcaggcgctgtgggccaggcccctcctctggctcctgcaccaccgcctcttttcgggctccgccggctcccgccgtccctgcaatgccgctctgtgcccgccgtcctgagagcccgcgcggcactggcgccagccttggcggcgcgcgcggggccgtggtcgttgctccctgactggccgcggcggcctccaggaagcggaaaagcaaggggcggtcgagctgggccgccgcgccccactgctcgccgcgctgctctttgacctcgcagggtgtgaagaagatgcgcagctccacgctgcaggacccgcgccgccgggacccccaggacgacgtgtacgtggacatcaccgatcgccttcgttttgccattctctacagcagaccaaagagtgcatcaaatgtacattatttcagcatagataatgaactcgaatatgagaacttctccgaagactttggaccactcaatctggcaatggtttacagatattgttgcaagataaataagaaattaaagtccattacaatgttaaggaagaaaattgttcattttactggctctgatcagagaaaacaagcaaatgctgccttccttgttggatgctacatggttatatacttggggagaaccccagaagcagcatatagaatattaatctttggagatacaccctatattcctttcagagatgctgcctatggaagctgcaatttctacattacacttcttgactgttttcatgcagtaaagaaggcaatgcagtatggcttccttaatttcaactcatttaaccttgatgaatatgaacactatgaaaaagcagaaaacggagatttaaattggataataccagaccgatttattgccttctgtggacctcattcaagagccagacttgaaagtggttaccaccaacattctcccgagacttatattcaatattttaagaatcacaatgttactaccattattcgtctgaataaaaggatgtatgatgccaaacgctttacggatgctggcttcgatcaccatgatcttttctttgcggatggcagcacccctactgatgccattgtcaaaagatttctggatatctgtgaaaatgctgagggtgccattgcagtacattgtaaagctggccttggtcgcacaggcactctgatagcctgctacatcatgaagcattacaggatgacagcagccgagaccattgcgtgggtaaggatctgcagacctggcttggtgatcgggcctcagcagcagtttttggtgatgaagcaaacaagcctctggctggaaggggactattttcgtcagaggttaaaggggcaggagaatggacaacacagagcagccttctccaaacttctctctggtgttgatgacatttccataaatggggtcgagaatcaagaccagcaagaacccaaaccttacagtgatgacgacgaaatcaatggagtgacacaaggtgatagaagtcgggccctgaaaaggcgaagacaatcaaaaacaaacgatattcttctcccatctcccctggctgtgctgacctttacactgtgtagtgttgtcatctggtggattgtttgtgactacattcttcccatcctgctattctgactcaaagatttcagaa

SEQ ID NO: 465721 - DNA, 1514 bp, Homo sapiens
ccgtctgcagaagacgagatcagaagaatctcagacacatgctccaggcaacccaggctcaataacccagcagtgattccaggtcctacacgtgacattacctgcaaggtggctgcctgcagtgccagctcagggcacagccatgtgggtgagctggcagccagtgggctgggctgacaacctgtgccacacacacgctggacagaagctgcctcccctccacatggaggtgggatgagggcatatccttggatgccaccaggattttcttcagaaattggagcctgctgcagtgcccaaaagaaggggcaacaaaggccaccaaaactccacagtaaatggcatggattattttaatatttgaaaaaccttaaagtgactgtggcaaaatacttacttctgatacataaaataaatttcataaagtgtcacatgatttttattgttagtgtcccctcttggtgtaccttcttctaaaataaactggcataaagaactgtttctagggaaattgaatgaattagtgtgttatgtagaattaatatctttatgctagttaaaagttggggaacctctgatgaaaatgatgacttggatttaaaaatagatctctagttcttcttcccagcagatatcctataggagggtcatttatctattgaaagcatacctagtttgtgataagagagcctcttcatctatattttggctacttatgattttatttttataggattccttatcaattattaacacattttcttgataataaatcatctaggcacagatggaatctcctcccactggtgaaggcaaatgcttgtctcagcagaagagcagaaaagtaagagcaagaagcttttccttggatactttatgccacagcaaagccagagagaagccaattacatttgcttcccatgatgctgcaaagcttctggtggtttgctctcaatctttggtattcctggcttgtatctgcagcaattccatctctacctccattgtcatatagccttctccctgcatgtctgtctttcttcttcccacaagacaccagcatactggatttgtggcatgccctcttccagtatgaccttatcttaactaatcaatctccagtggccctattttcaaagatactggaggattgcccaccgaagctaaccagctggggaacaaagggctggaaatccagacaaggaattggcacttctacagatgacagtgatggtggtcatgatgatgatgatggcgatggtgacagttatggtaaggacaaagcaactagtatttatttagcactaactgtggaccaggttctcagtctaggcggtgggaaacgaaagggagctgattctgtattgatagatatgcacatagggactttgtttcaagagaatttgtagggttacaaaattacctaaaattagctaatgaaaacaataatgaattatacttgatgattagcctgatagtctaaatagaataatagtattccagcataatagtct

SEQ ID NO: 465722 - DNA, 2154 bp, Homo sapiens
tctctcctccaggtttcagaaggtttctcccagaatctccctttagggtgggcctctatttgctgacattaagagaatatgaattgggtggcttacagcctttgcctttttatgggaatttccaagtttcccgggttcaccgcattcaacctcgtaaagttgcatgaaataaaatgttcttccagcaggcggcactggaggcttctggaggctctggaagccaccggctccgggaatacacagaagtcctctgagggctacagtcggaaaggagacccgctttctcagttcaagcagcagcagaggccaggggcgggaaaggttcttggccaaggtcagtgtggggacttcacaatccaagtgcaaaatggcttcagtagtgacataaacaatgcccttgtgcagtcccctgtgcagttgtcaaggccacactccccaaagccagagctttgctcagcactcagctggctgcatgtcaaagtcctcaagggctctttttttcaaaacaagtggactgtattttgaacacaaacctgcatatttatcaagtgtttgaaggtgattctgaagcataggcaggtttgggaagtacctgtgtaggttatcagggttgttcgtgtagataagcatagagggcttttagtgctaaataaaataagaccttagatatagtctgaatcctcatattttcttcttttttaattccaggaaagttaggaccatatacttgcaattatacagtatgtagccttttcagattggcttgtttcacttagtaattcacatgtatttaagatccctctttatcttttcatggcttgggactcattttttaaaatagattttattttttagagtgatttgtagatccacagcaaaattgagcagaagctacggagatttcctatggaaaccctgccctcagggatgcatagcctgcctgactatcaaaatccagcacaagagtggtcgttatgttacaatcaatgagcctacatggacacatcactctcacccaaagccataaatttcgctgtaagcactgctttcactgtaccccacaaattttggtgattgattatgctgttgagtttgactatgtccttactgatgttctgtctgctggatctgtccatttatgattgaagaacgtcaaaatcttcaacttatttttgcagtgagatgccctccgccttagactttgcattatctaccactgcataataaagtactccaaaatataatagttggaaatacaagcatttcttatcttacagtttctgtgggaggatgtcctgttagcaacttctttggacacaaggaggaaattaagaagcatcattactgttaatatcattttctttttcagaatgttaacagccttgatattatacaaaggttgataaaaatgtatttcataagtcaattattgcatcataattcaaaaaaatagtagcaaacattgttgtttagaaatcagaaataagtaacgatcactcttggatataacttccccataaactaaagcatatcccactgtgtgatatctgagagttaacaattctccaaaactttcaaatagaagctcaattacagcatggtttttttttaatcactgattattttaactgtattaatcaaagaaagcagcaaatgattttttttaatccattgattcttttagcaggcattcaaataattcagaaaagacgtgtttctaacttttatgttagaattaaagtaagcattttcttaagaatcttcgggtttgggctcgtcagattactagacatatttagatggttcttgtcattatgtcctcataaatacaaattgcaactgtggtaatgagaagcgattccctccttgttagaaaatagcaatatccattagtaaaagtctgaggcttgttgtgactgataaaaaaaaacaaaagaaagcaaaatcataagtgagtaagaagctttttaaactttgggaagcctgaattctcatggggttctctagtgcatatgaagttacgaaccgtaaatttggtagttagtgggttctccagtaagcaaaaagcgtctatttaagtatattcttgctttataaagtttattgttcaaaaatttgctctaagagagagagcatatctctgttctccctaac

SEQ ID NO: 465723 - DNA, 879 bp, Homo sapiens
tccattcacatagcaagcttcatgcaatgtcatccaaaaagatttctaatttctataaagttttggcccttcttcctgtctttgtgaaaaatgcagaccagatgaaaaccactttctacaaggcaaacaataacaacagcttctgtgaattaaacatctactgtgccaggcacttggcaaacatcatctcatttaattctcacaccttctcaagtaggtatggctcactctacgatacagaccatgaaactgaggctcagaaagttgcagccatttcccccacgtgttcacgggatgaagcccaaacctctgtgctttcaagcagccctgtggacgattctgatgtgctgccaggcatgagtactcctgacgatatgatctttgaggacaggcatttgttcttattcatcattgtatcctaataagtaacatatgggcatgcaattaaaaaacgaagtcacatggaagataaataacatgctcaacatcacccagccagaagtggtggagacatggccaacatcacaggggacaactcctgagcctgtgctaggaacagccagtcttcctgaattcatgataaagtaagaggtagaaccgtggccaattgtctttgggagaaagtgggatcaaggacaactccaggattctgcctgagatgggacacactagagcattacttgggaatgtaaataataatatcaaattattgaatgatttccatgggctactctcttcatataccagttctaattctgataagcttgtatcattatcttctttttaaaaggcatgaaaacagaggctcacagagatcatattattttccccaagttgcaatgatggtaaacacagatgacagctggacatcaactaggt

SEQ ID NO: 465724 - DNA, 2766 bp, Homo sapiens
gggtagtgtgcctctgtcctcacgaggggccgccgcgcctctgtcctcacgaggggccgccgcgtctctgtcctcgccgaggggccgccgcgtctctgtcctcgccgaggggccgccgcgtctctgtcctcgccgagggggcgccgcgtctctgtcctcacgaggggccgccgcgtctctgtcctcacgaggggccgccgcgtctctgtcctcgccgaggggccgccgcgtctctgtcctcgccgagggggcgccgcgtctctgtcctcacgaggggccgccgcgtctctgtcctcacgaggggccgccgcgcctctgtcctcgccgaggggccgccgcgtctctgtcctcgccgaggggccgccgcgtctctgtcctcgccgagggggcgccgcgtctctgtcctcgccgagggggcgccgcgtctctgtcctcacgaggggccgccgcgtctctgtcctcacgaggggccgccgcgtctctgtcctcacgaggggccgccgcgtctctgtcctcacgaggggccgccgcgtctctgtcctcgccgggggggcgccgcgtctctgtcctcacgaggggccgccgcgcctctgtcctcacgaggggccgccgcgcctctgtcctcacgaggggccgccgcgtctctgtcctcgccgagggggcgccgcgtctctgtcctcacgaggggccgccgcgcctctgtcctcacgaggggccgccgcgtctctgtcctcgccgagggggcgccgcgtctctgtcctcgccgaggggccgccgcgtctctgtcctcacgaggggccgccgcgtctctgtcctcacgaggggccgccgcgcctctgtcctcacgaggggccgccgcgtctctgtcctcacgaggggccgccgcgtctctgtcctcgccgagggggcgccgcgtctctgtcctcacgaggggccgccgcgtctctgtcctcgccgaggggccgccgcgtctctgtcctcacgaggggccgccgcgtctctgtcctcgccgaggggccgccgcgtctctgtcctcacgaggggccgccgcgtctctgtcctcgccgaggggccgccgcgtctctgtcctcacgaggggccgccgcgtctctgtcctcgccgaggggccgccgcgtctctgtcctcgccgagggggcgccgcgtctctgtcctcacgaggggccgccgcgtctctgtcctcgccgagggggcgccgcgtctctgtcctcacgaggggccgccgcgtctctgtcctcgccgaggggccgccgcgtctctgtcctcacgaggggccgccgcgtctctgtcctcgccgaggggccgccgcgtctctgtcctcacgagggggcgccgcgtctctgtcctcacgaggggccgccgcgtctctgtcctcacgaggggccgccgcgtctctgtcctcgccgaggggccgccacgtctctgtcctcactgaggtgttgagactgccatggtttatccatggtgcttcctgcccaccctctccccagccgcccgtttcaagccatgctgcccctctcagcctgtgagaattggctgtgctacctcttctgagaaatctcagcgacagcacacagatggcaccacaataagcaaaaataaaaaaaggaaactgaaaaagaaacagcaaattaaaaggaagaaagcagccggcttggcagcaaaggctgctggtgtcagtttcatgtaccagcccgaggacagcagcaatgaaggggaaggcgtgggagaggcttgtgaggaggatggtgtggacaccagcgaggaagacccgacactggccggggaggaagacgttaaagataccagggaggaagatggtgcggacgctagcgaggaagacctgacacgggccaggcaggaagagggtgcggacgccagtgaggaagatccgacaccggccggggaggaagacgttaaagacgccagggaggaggacggtgtggacaccattgaggaagacctgacacgggccggggaggaagacggtaaagacaccagggaggaggacggtgcggacgccagcgaggaagacccgacatgggctggggaggaagagggtgcagactccggggaggaggacggtgcagacgccagcgaggaagatgatacaattaccaatgaaaaggcacacagtattctaaattttttgaagtcaacacaggaaatgtatttttatgacggtatgttttttactgtttttctcttgcatagtgacatccacttaaaagtttattaaaagaaacaaatataatgcttaaatgttaaaacatactttaaaaatattcaatgtaaaataattagttgtaaggcaactaatataagtaaaaaatattcaatgtaaataattagttataaggcaaagatcagagtatttatgtgctttccaccgatgatgtggatgggcatgcgcccctggcgtatccagagaagcagtgtggtggccctggccagctgtgccaaggacaggctggccccgtgtcctccatgcctctaaggtcaggttttggagtgtgttggcatccaggctatttttctaaacaagagataaatccagattggaggttttgatgagctgagctcaccttcataagcagactgagaggtgaaggaaacacagcttgcgcctttaggacaggtttcattttctcttccacatagaacggatgcacgatttctcagcatgcattattgtgcagttgtttgtactgacataagataaggaaaataaacataggtttaatgtca

SEQ ID NO: 465725 - DNA, 1717 bp, Homo sapiens
ccctaatccaataagactggtgtccatataagaagaggaaatttggggatccggcatggtggctcacaccttagaaattctgcccatcctttgtgctgcttttggcgctcgggcgcgctggcccctggggacgccgagggcggctgcgacgcgccgagaggccgcggctctcccacctgtcaccctggcccttctctgcttggatggtgtcttcctctcctcagccgagaatgacttcgtccaccggatccaggaggaactggaccgctttctgctgcagaagcagctgtcaaaggttcttcttttccccccactctccagtcgcctccggtacctgatccatagaacagcagagaattttgatctcttgagcagcttctccgttggggagggctggaagaggaggacggtcatctgtcaccaggacatcagggtacccagttcggatggcctctctggcccctgccgcgctcctgcctcctgccccagcaggtaccacggtcctcggcccatctccaaccaaggagcagctgcggttccccgaggtgcccgggctggccggtggtatcgtggacgcaagcctgaccagcctttgtatgtgccccgggtgctgcgcaagcaggaagaatgggggctgacctctacctcggtgctcaagagagaggccccagctggcagggacccagaagagcctggagatgttggtgctggagaccccaactctgatcagggactccctgtgctgatgactcagggaacagaggacctaaagggcccaggacaaaggtgtgagaatgagccactgctggaccctgttggccctgagcctctggggcctgagagtcagtcagggaagggagacatggtggagatggccacacggtttgggtccaccctgcagctagacctggaaaaggggaaggagagtctgttggagaagaggctggtggcagaggaggaagaggacgaagaggaggtggaagaggatggccccagcagctgctcggaggacgattacagtgagctgctgcaggagatcacagacaacctgacgaagaaggagattcagatagagaagatccatttggacacatcctccttcgtggaggagctgcctggagagaaggaccttgcccacgtggtagagatctatgactttgaaccagcgctcaagacggaggacctgctggcaacgttttctgagttccaagagaaggggttcaggattcagtgggtggatgatactcacgcactcggcatctttccctgcctggcctcagctgcggaagccctgacccgggagttctcggtgctcaagatccggcccctcacgcagggaaccaagcagtcaaagctcaaagccttgcagaggccaaaactcctgcgtctggtgaaggagaggccacagacaaatgcgactgtggcccggcggctggtggcccgggccctgggactccaacacaaaaagaaagagcggcctgctgtccggggtccgctgccgccctgaggcctggagacccaactggcctggatctgcgtcccgacgtagctggcgcccccaacaccataagccttcacagacgccagagcagccccgcaccaccctcgagcttcaccatggggtgtggtgggctttagtttagtcccagaaatggagaaaaaataaaaactcacgttgttctaatgtgaaaactttgaaatgtggtctgtaggggac

SEQ ID NO: 465726 - DNA, 440 bp, Homo sapiens
cagtctgaaggattgaatgagagcctggcatacctgcctggagccctgagggcacatagaaggtaccagataaccgttatagcgcctccttttccccttctacttccagaaaccatggtgagaggccacagacaaatgcgactgtggcccggcggctggtggcccgggccctgggactccaacacaaaaagaaagagcggcctgctgtccggggtccgctgccgccctgaggcctggagacccaactggcctggatctgcgtcccgacgtagctggcgcccccaacaccataagccttcacagacgccagagcagccccgcaccaccctcgagcttcaccatggggtgtggtgggctttagtttagtcccagaaatggagaaaaaataaaaactcacgttgttctaatgtgaaaactttgaaatgtggtctgtaggggac

SEQ ID NO: 465727 - DNA, 2220 bp, Homo sapiens
ccctaatccaataagactggtgtccatataagaagaggaaatttggggatccggcatggtggctcacaccttagaaattctgcccatcctttgtgctgcttttggcgctcgggcgcgctggcccctggggacgccgagggcggctgcgacgcgccgagaggccgcggctctcccacctgtcaccctggcccttctctgcttggatggtgtcttcctctcctcagccgagaatgacttcgtccaccggatccaggaggaactggaccgctttctgctgcagaagcagctgtcaaaggttcttcttttccccccactctccagtcgcctccggtacctgatccatagaacagcagagaattttgatctcttgagcagcttctccgttggggagggctggaagaggaggacggtcatctgtcaccaggacatcagggtacccagttcggatggcctctctggcccctgccgcgctcctgcctcctgccccagcaggtaccacggtcctcggcccatctccaaccaaggagcagctgcggttccccgaggtgcccgggctggccggtggtatcgtggacgcaagcctgaccagcctttgtatgtgccccgggtgctgcgcaagcaggaagaatgggggctgacctctacctcggtgctcaagagagaggccccagctggcagggacccagaagagcctggagatgttggtgctggagaccccaactctgatcagggactccctgtgctgatgactcagggaacagaggacctaaagggcccaggacaaaggtgtgagaatgagccactgctggaccctgttggccctgagcctctggggcctgagagtcagtcagggaagggagacatggtggagatggccacacggtttgggtccaccctgcagctagacctggaaaaggggaaggagagtctgttggagaagaggctggtggcagaggaggaagaggacgaagaggaggtggaagaggatggccccagcagctgctcggaggacgattacagtgagctgctgcaggagatcacagacaacctgacgaagaaggagattcagatagagaagatccatttggacacatcctccttcgtggaggagctgcctggagagaaggaccttgcccacgtggtagagatctatgactttgaaccagcgctcaagacggaggacctgctggcaacgttttctgagttccaagagaaggggttcaggattcagtgggtggatgatactcacgcactcggcatctttccctgcctggcctcagctgcggaagccctgacccgggagttctcggtgctcaagatccggcccctcacgcagggaaccaagcagtcaaagctcaaagccttgcagaggccaaatggtgagagattttagacacgagttttccatgacttcaaagtagcaactagtaaaatggacctgcaagaggcctgccgaggccagctgtgctctcgtgggtggttacgtagccaacatggtccagggtttcttggaacaataaatatcctgtccgtaggtctgtgagctctgggtgttccatcctgacttgatacccctcccaaaggaccctaaaaagcagggaggtgtgcaggatgaacccctcagccccctcactgtagagacagagaaacaagggcatgtagaggcgacaagtttgggtcagcatcccctggggggccaggatccctaagttggccccctctcatgagcatccggccacaccacgggcacagctgggccgaggccccacatgtgtcacatgagaggctggctctgatggcttgtacggctgctgtgttgctgggggagaggcagccacgaccttgtgtttaggtccccactgtggggctttccttctagaactcctgcgtctggtgaaggagaggccacagacaaatgcgactgtggcccggcggctggtggcccgggccctgggactccaacacaaaaagaaagagcggcctgctgtccggggtccgctgccgccctgaggcctggagacccaactggcctggatctgcgtcccgacgtagctggcgcccccaacaccataagccttcacagacgccagagcagccccgcaccaccctcgagcttcaccatggggtgtggtgggctttagtttagtcccagaaatggagaaaaaataaaaactcacgttgttctaatgtgaaaactttgaaatgtggtctgtaggggac

SEQ ID NO: 465728 - DNA, 1435 bp, Homo sapiens
  misc_feature (1303)..(1303): n is a, c, g, or t
  misc_feature (1307)..(1307): n is a, c, g, or t
ccctaatccaataagactggtgtccatataagaagaggaaatttggggatccggcatggtggctcacaccttagaaattctgcccatcctttgtgctgcttttggcgctcgggcgcgctggcccctggggacgccgagggcggctgcgacgcgccgagaggccgcggctctcccacctgtcaccctggcccttctctgcttggatggtgtcttcctctcctcagccgagaatgacttcgtccaccggatccaggaggaactggaccgctttctgctgcagaagcagctgtcaaaggttcttcttttccccccactctccagtcgcctccggtacctgatccatagaacagcagagaattttgatctcttgagcagcttctccgttggggagggctggaagaggaggacggtcatctgtcaccaggacatcagggtacccagttcggatggcctctctggcccctgccgcgctcctgcctcctgccccagcaggtaccacggtcctcggcccatctccaaccaaggagcagctgcggttccccgaggtgcccgggctggccggtggtatcgtggacgcaagcctgaccagcctttgtatgtgccccgggtgctgcgcaagcaggaagaatgggggctgacctctacctcggtgctcaagagagaggccccagctggcagggacccagaagagcctggagatgttggtgctggagaccccaactctgatcagggactccctgtgctgatgactcagggaacagaggacctaaagggcccaggacaaaggtgtgagaatgagccactgctggaccctgttggccctgagcctctggggcctgagagtcagtcagggaagggagacatggtggagatggccacacggtttgggtccaccctgcagctagacctggaaaaggggaaggagagtctgttggagaagaggctggtggcagaggaggaagaggacgaagaggaggtggaagaggatggccccagcagctgctcggaggacgattacagtgagctgctgcaggagatcacagacaacctgacgaagaaggagattcagatagagaagatccatttggacacatcctccttcgtggaggagctgcctggagagaaggaccttgcccacgtggtagagatctatgactttgaaccagcgctcaagacggaggacctgctggcaacgttttctgagttccaagagaaggggttcaggattcagtgggtggatgatactcacgcactcggcatctttccctgcctggcctcagctgcggaagccctgacccggganttcncggtacatgcaagcttgcatgtaccgggcttgcatgtaccgcttgcatgtaccgggcttgatgtggggaggggtgtttaaggggttggctagggtataattgtctgggtcgcctaggaggtctggtga

SEQ ID NO: 465729 - DNA, 1005 bp, Homo sapiens
  misc_feature (3)..(3): n is a, c, g, or t
  misc_feature (8)..(8): n is a, c, g, or t
  misc_feature (10)..(10): n is a, c, g, or t
  misc_feature (32)..(32): n is a, c, g, or t
  misc_feature (34)..(35): n is a, c, g, or t
  misc_feature (58)..(59): n is a, c, g, or t
  misc_feature (61)..(61): n is a, c, g, or t
ttnttccncnctttaagttatggtgaattctnanntttcggcatctcgtcgctgtcgnnantcagctgcggaagccctgacccgggagttctcggtgctcaagatccggcccctcacgcagggaaccaagcagtcaaagctcaaagccttgcagaggccaaatggtgagagattttagacacgagttttccatgacttcaaagtagcaactagtaaaatggacctgcaagaggcctgccgaggccagctgtgctctcgtgggtggttacgtagccaacatggtccagggtttcttggaacaataaatatcctgtccgtaggtctgtgagctctgggtgttccatcctgacttgatacccctcccaaaggaccctaaaaagcagggaggtgtgcaggatgaacccctcagccccctcactgtagagacagagaaacaagggcatgtagaggcgacaagtttgggtcagcatcccctggggggccaggatccctaagttggccccctctcatgagcatccggccacaccacgggcacagctgggccgaggccccacatgtgtcacatgagaggctggctctgatggcttgtacggctgctgtgttgctgggggagaggcagccacgaccttgtgtttaggtccccactgtggggctttccttctagaactcctgcgtctggtgaaggagaggccacagacaaatgcgactgtggcccggcggctggtggcccgggccctgggactccaacacaaaaagaaagagcggcctgctgtccggggtccgctgccgccctgaggcctggagacccaactggcctggatctgcgtcccgacgtagctggcgcccccaacaccataagccttcacagacgccagagcagccccgcaccaccctcgagcttcaccatggggtgtggtgggctttagtttagtcccagaaatggagaaaaaataaaaactcacgttgttctaatgtgaaaactttgaaatgtggtctgtaggggac

SEQ ID NO: 465730 - DNA, 963 bp, Homo sapiens
cagtctgaaggattgaatgagagcctggcatacctgcctggagccctgagggcacatagaaggtaccagataaccgttatagcgcctccttttccccttctacttccagaaaccatggtatggtgagagattttagacacgagttttccatgacttcaaagtagcaactagtaaaatggacctgcaagaggcctgccgaggccagctgtgctctcgtgggtggttacgtagccaacatggtccagggtttcttggaacaataaatatcctgtccgtaggtctgtgagctctgggtgttccatcctgacttgatacccctcccaaaggaccctaaaaagcagggaggtgtgcaggatgaacccctcagccccctcactgtagagacagagaaacaagggcatgtagaggcgacaagtttgggtcagcatcccctggggggccaggatccctaagttggccccctctcatgagcatccggccacaccacgggcacagctgggccgaggccccacatgtgtcacatgagaggctggctctgatggcttgtacggctgctgtgttgctgggggagaggcagccacgaccttgtgtttaggtccccactgtggggctttccttctagaactcctgcgtctggtgaaggagaggccacagacaaatgcgactgtggcccggcggctggtggcccgggccctgggactccaacacaaaaagaaagagcggcctgctgtccggggtccgctgccgccctgaggcctggagacccaactggcctggatctgcgtcccgacgtagctggcgcccccaacaccataagccttcacagacgccagagcagccccgcaccaccctcgagcttcaccatggggtgtggtgggctttagtttagtcccagaaatggagaaaaaataaaaactcacgttgttctaatgtgaaaactttgaaatgtggtctgtaggggac

SEQ ID NO: 465731 - DNA, 527 bp, Homo sapiens
agcgctcaagacggaggacctgctggcaacgttttctgagttccagtgagtggtggctggggaggtgctgccttcagagaggagctaagatacttctctgtagctgggggtgcttgcctgccccacacccagtgcctaatgcttcagcaagagagacagaaagtgggtgtgttgcctgggctctgtattcctgggcagttctccctgccggccgtccctcgggaaagagagcactgatttgttggttgtagacacaccctgcaggccctagacctgggctgcccccctgcatggccacacgcctgccaggatgccatgcgccctccctcagtctcaagggacatggcagcctcctcttctcctcttgcctgcctcccagcggctgctcagtgtgtctccagcaggctacgggccagctccatgtgggaactgtttctagggtgcactgagcagcctgctggggcagagtggaggtcggaatggtggccagaggctgtattgagagacacgacttccctcctcctcag

SEQ ID NO: 465732 - DNA, 531 bp, Homo sapiens
gtccctgtgcgggcctgtggggctctgggggatgaggcaagcaggcggcagtcgtctcttgcccatccagggcggtgtcggagcagccctgccctgagctttgaataggtgcacaacacggctgcaggggttcggggtggtgggtgtgccgcggggtcctgaggaggagggagtggctccacgcctgctttctttccacagctgcggaagccctgacccgggagttctcggtgctcaagatccggcccctcacgcagggaaccaagcagtcaaagctcaaagccttgcagaggccaagtaaggaaagcgcatgtccctgaatagggaggctgtgtgtgtgtgtgtgcgtgcgagcatgtgtgtgtgtgcgtgtgtgtgtgtctggtttgggcagggtcttcccctctgttaattcttcccgcttgacttctctgctcttagggagccctgggctgcagtagccagtggggctgtgttccccctccctagcaggcctagggggggtctggggcaggggtctcccttggggag

SEQ ID NO: 465733 - DNA, 537 bp, Homo sapiens
  misc_feature (405)..(405): n is a, c, g, or t
  misc_feature (409)..(409): n is a, c, g, or t
ctgtgttatagaggatccctcgaagatggcggttgtaagaagaggctggtggcagaggaggaagaggacgaagaggaggtggaagaggatggccccagcagctgctcggaggacgattacagtgagctgctgcaggagatcacagacaacctgacgaagaaggagattcagatagagaagatccatttggacacatcctccttcgtggaggagctgcctggagagaaggaccttgcccacgtggtagagatctatgactttgaaccagcgctcaagacggaggacctgctggcaacgttttctgagttccaagagaaggggttcaggattcagtgggtggatgatactcacgcactcggcatctttccctgcctggcctcagctgcggaagccctgacccggganttcncggtacatgcaagcttgcatgtaccgggcttgcatgtaccgcttgcatgtaccgggcttgatgtggggaggggtgtttaaggggttggctagggtataattgtctgggtcgcctaggaggtctggtga

SEQ ID NO: 465734 - DNA, 1643 bp, Homo sapiens
gtcgtcccgacccccgggctcccgggtgggaaggagcagctgggctgcgcggagcaggcccccgtgagccccgggaaggagcgcagcgcagggctctcccacctgtcaccctggcccttctctgcttggatggtgtcttcctctcctcagccgagaatgacttcgtccaccggatccaggaggaactggaccgctttctgctgcagaagcagctgtcaaaggttcttcttttccccccactctccagtcgcctccggtacctgatccatagaacagcagagaattttgatctcttgagcagcttctccgttggggagggctggaagaggaggacggtcatctgtcaccaggacatcagggtacccagttcggatggcctctctggcccctgccgcgctcctgcctcctgccccagcaggtaccacggtcctcggcccatctccaaccaaggagcagctgcggttccccgaggtgcccgggctggccggtggtatcgtggacgcaagcctgaccagcctttgtatgtgccccgggtgctgcgcaagcaggaagaatgggggctgacctctacctcggtgctcaagagagaggccccagctggcagggacccagaagagcctggagatgttggtgctggagaccccaactctgatcagggactccctgtgctgatgactcagggaacagaggacctaaagggcccaggacaaaggtgtgagaatgagccactgctggaccctgttggccctgagcctctggggcctgagagtcagtcagggaagggagacatggtggagatggccacacggtttgggtccaccctgcagctagacctggaaaaggggaaggagagtctgttggagaagaggctggtggcagaggaggaagaggacgaagaggaggtggaagaggatggccccagcagctgctcggaggacgattacagtgagctgctgcaggagatcacagacaacctgacgaagaaggagattcagatagagaagatccatttggacacatcctccttcgtggaggagctgcctggagagaaggaccttgcccacgtggtagagatctatgactttgaaccagcgctcaagacggaggacctgctggcaacgttttctgagttccaagagaaggggttcaggattcagtgggtggatgatactcacgcactcggcatctttccctgcctggcctcagctgcggaagccctgacccgggagttctcggtgctcaagatccggcccctcacgcagggaaccaagcagtcaaagctcaaagccttgcagaggccaaaactcctgcgtctggtgaaggagaggccacagacaaatgcgactgtggcccggcggctggtggcccgggccctgggactccaacacaaaaagaaagagcggcctgctgtccggggtccgctgccgccctgaggcctggagacccaactggcctggatctgcgtcccgacgtagctggcgcccccaacaccataagccttcacagacgccagagcagccccgcaccaccctcgagcttcaccatggggtgtggtgggctttagtttagtcccagaaatggagaaaaaataaaaactcacgttgttctaatgtgaaaactttgaaatgtggtctgtaggggac

SEQ ID NO: 465735 - DNA, 1034 bp, Homo sapiens
ctggaccctgttggccctgagcctctggggcctgagagtctgatcagggactccctgtgctgatgactcagggaacagaggacctaaagggcccaggacaaaggtgtgagaatgagccactgctggaccctgttggccctgagcctctggggcctgagagtcagtcagggaagggagacatggtggagatggccacacggtttgggtccaccctgcagctagacctggaaaaggggaaggagagtctgttggagaagaggctggtggcagaggaggaagaggacgaagaggaggtggaagaggatggccccagcagctgctcggaggacgattacagtgagctgctgcaggagatcacagacaacctgacgaagaaggagattcagatagagaagatccatttggacacatcctccttcgtggaggagctgcctggagagaaggaccttgcccacgtggtagagatctatgactttgaaccagcgctcaagacggaggacctgctggcaacgttttctgagttccaagagaaggggttcaggattcagtgggtggatgatactcacgcactcggcatctttccctgcctggcctcagctgcggaagccctgacccgggagttctcggtgctcaagatccggcccctcacgcagggaaccaagcagtcaaagctcaaagccttgcagaggccaaaactcctgcgtctggtgaaggagaggccacagacaaatgcgactgtggcccggcggctggtggcccgggccctgggactccaacacaaaaagaaagagcggcctgctgtccggggtccgctgccgccctgaggcctggagacccaactggcctggatctgcgtcccgacgtagctggcgcccccaacaccataagccttcacagacgccagagcagccccgcaccaccctcgagcttcaccatggggtgtggtgggctttagtttagtcccagaaatggagaaaaaataaaaactcacgttgttctaatgtgaaaactttgaaatgtggtctgtaggggac

SEQ ID NO: 465736 - DNA, 3059 bp, Homo sapiens
agtggagctgtgagaagagggccaccatcctccagaccccagaaagtcggcaggtgatgaatcctgccaggactgggtccatcctttcaaggcagcaggagtggggcactgctgtaaagatacttgaaagtatggaagcgactttggagcaggacaacaagacgaggttggaacagtttggagggttcagaagaaaagaagacagaaagatgtgggaaagtttggaacttcctagagacttgtggaatgattttgaccaaaatgctgatagtgatatggacaatgaagtccaggctgaggtggtctcagatggagataaggaacttgttagaaactggatgtggaagggaaatgtggggctggagccccgatacagagtccccactggggcactgactagcagagttgtgagaagaggtccaccatccttcagacctcagaaatgtagatccactgacagcttgcaccatgaacctggaaaagctgcaggcactcaatgccagcctgtgaaggatctgcccaaggctgtgggagcccactccttgcatcagccagccctggatgttgctaagcttggaaaaactgaacctgggaccagtgaccatcttcccagccatagtaaaaagcctgtttgcagaatgaagctgaacagagacaaaccatgatgagagacagatgcacattttaggtaacactgactctttggcaaccatttttcaaatatgaaataatgacagaaattatatatttattttttcagcaattaatcagtgtcagatactgttagatgctctcattaaaaatctttttcagtgtatagtagtatactaccatgagactatttatgaaacttctgacttagcagttttaaaaccaacgtttatctttcaaatatgaaatactcaaatattgctttgtgtacttgacaggtcagagaactattttcaaattatgacacaatttcagtgcaaagaccaagacagggcatggctggttgttttctagttatgtgtacatttccttacatgaaaaaaaatttaatgatttttactgaatttgaagtacatcagaaatttagcaacttgaacaaattctgaatatgaaagtaccagagtaatatgtgagcaattttaaggataatttcaaatagcgtttaaaggaaatattggaagaagtggaaacttttattatctattagtttttagatgcccattataagaatcagaaaacaagagcatagaattcaaagaagtgagggaaaaagtaaataaatgaaatttttaaaagaaaaaagaaaatgagcaattatgcaaagttcattgtaaagtgcctatgaaaacatttttagcatccctcacaatataaagttaatcttttcaacttattaaggaaagtatacccaattaataataataacatcaataataataaagacccaatcttggggacaaagaacaaataaagactgtgatcaccacaccatttgttaagacctctgatttctttaaagtggtccccattaaatcatttcacttgtacaacatggctcagggtaaagagaatgtagatttggcccaatggaaaccaatagagtctaaattacttgtaattcaacctagaggaaagtcttctaatcatggatctggctattggcaggaggagctaacaagaaacaaagatattaaagaaaccaacaatgtttttcaaagatttgcagtacccgaagtgctaccagtttgaacgaaacaacttatgactgagccgtaaactaccctcgagccctcgactttgtgtgagcagactgaatagctactcatcttctaagaagtgcattttctcctgaaaaggatattggaaagaaaggcccacccagaaggtgataccaagagccacggaaaatcatggactcaaaagctacctccagaaaacaaaactgagtattgatgaagcagctttcctactcccagattggagaaaatccaaaagtctgataacatactctgttgacaaagctgtgatgaaacaggcaccctaatacactgtttatggaaacacaaaatgttaccactcctatagagggtaatttgcaaatacatagcaaaattatgcataattaacaatcccatttcaaggaatctaccacaaagatacactggcaaaaattcacaaagttaggttcccaaggaattcactgaagtactatttgtaatagcaaagactggaaacaacccaaatgtttatccatagggatgggttaaataaaaccatcctgcatcaacacaatggagtactttgcagctataaaaaggaatgagtaatatctctagatattatgatctataggatataatcaaattttaaaaggaatgtttatgatatgctgacatttatgaaagtgaggaagaaacaacaaatttcggtgagaacgtagagcaacaggaattctcattcattgctgctgagaatatgaaatggtggagccactttggaaaacagtttagcagtttcttacaaaactgaacaaaatcttaccatactcttcagcaatcattccttagagtttatccaaatgaattgaaaagtcctgtccatacaaaaaccttcacacagatgtttgtaacagctttgttaataattgccaaaacttggaagcaaccaagatgttcttcagtggtgaatggttaaacaaacattggtacattcagacaacagaataatattcagcattaaaaagcaatgcactatcaagccatggaaagacatggaggaaacttaagtgcaatttactaagtgaaagaagccaacctgaaaaggctacatactgtatgatttcaactatataaaactctggaaaaagcaacactgtaaagataataaacgagtcagtggttaccaggagttggcagatggagagggataaataggtagagcacagataacttttagggcagtgaaactattctgtatggcattcctgtcctgagtaaaatgatgagtgcatgtcattcttcgtcaaaaacccatagaatgtaccaagagtgcaccataatgtaaacttt

SEQ ID NO: 465737 - DNA, 3592 bp, Homo sapiens
gggcacttccggccggcggcggctgctccgggtgagcaggcccctgaagtgctgtgcctggagataccattgtggaccctggagaggcacctgctgcttatgcggtaaaacctctaccaccccaaacctggtcagtttgaggggagccgctgccatagtatccacagagaaggccggagttccagccgtgtggagcagcagaggggagtctgacagggtcacctcctacacagagagaattggcagctgactgcactgccaggagccaaggcctaggtgtgtggagcctggaagaccagggatacctgaggcaggaggtgcagcgtgtggagtgagaaacccgagagggactggggcctgtgctcaggatcagcagagcaggcaggcagagtggagagggagagacggagccccagaaggggagcaggaggagagggaagtagtggcagcagcccaggccaggcgtgtgtcctgcaagtgctaggaccagccacccctccccatggcctccaagccggctgccgggaagagcagaggggagaagcggaagagggtggtgctgacactgaaggagaagattgacatctgcacgcgcctggagaagggcgagagccggaaggcactgatgcaggagtacaatgtgggcatgtccaccctctacgacatcagggcccacaaggcgcagctgctccggttcttcgccagctcggactccaacaaggcgctggagcagcggcgcacgctgcacacgcccaagctggagcacctggaccgcgtcctgtacgagtggttcctggggaagcgctccgagggcgtccccgtgtcaggccccatgctcatcgagaaggccaaggacttctacgagcagatgcagctcactgagccctgcgtgttctccggagggtggctttggcgctttaaggccagacacggcattaaaaagctagatgcatccagtgaaaagcagtcagccgaccaccaggccgcggagcagttctgtgcgtttttcaggagcttggctgctgagcacgggctgtccgccgagcaggtttacaacgctgatgagaccggccttttctggcggtgcctgccaaatcccactccggaaggcggggctgtgcctggccccaagcagggcaaggaccggctgaccgtgctgatgtgtgccaacgccacgggctcccacaggctcaagcccttggccatcgggaagtgcagcggtcccagggctttcaaaggcatccagcacctgcccgtcgcctataaggcccaggggaacgcctgggtggacaaggagattttttccgattggttccatcatatctttgtgccctcggtgagagagcacttcagaaccataggtttgccggaagacagcaaagccgttctcttgctggacagctcccgggctcacccgcaggaggccgagctggtgtccagtaacgttttcaccatcttcctgcctgccagcgtggcctcattggtgcagcccatggagcagggcattcggagagatttcatgaggaacttcattaaccctccggtccccctgcagggcccccacgcccgctacaacatgaacgatgccatattcagcgtggcctgtgcctggaacgcagtccctagccacgtcttcaggcgggcctggaggaagctgtggccgtcggttgcgtttgccgaaggctcctcctctgaggaggagttggaggcagagtgcttcccagtgaagccccacaacaagtcctttgcacacatcctggagcttgtgaaggaaggctcctcctgcccgggccagcttcgccagcgccaggccgccagctggggggtagcgggaagggaggcagaagggggacggccccctgctgccacgtcgccagcagaggttgtgtggagttcagaaaagactccgaaagctgaccaggacggcggaggagatcctggtgagggcgaggaggtggcctgggagcaggcggccgtggcctttgacgcagtcctgcgctttgcggagcggcagccatgcttcagtgcgcaggaagtggggcagctgcgggcgctgtgtgccgtgttccggagccagcagcaggagactgtgggccttgaggatgtggtagtgacctcaccagaggagttggcaattcctaagtgctgcctggaggcctctacagagacataatgttggagaacttctgccacatggcagtgctgggtaagacccctctgtccccaccagtgcccttgaggttatgggtgttggtaggtctgtggcctccatctccatgacgatggtgttaaggactgcatgtttgtgtccccccccaaagtttatatgttgaaaccctgacccccaggagggtggtattaggaggtggggcctttgggaggtgactaggcttaggtgagatcgtgagggtggggctcgccgatgagatcgagtccttataagaaaaggaaggaactagagcgaggtcactttgtgctgtgtgagcatacaagaaaactgccatcttcaagctgggtgcagtggctcacgcctgtaatcccagcactggaaggccaaggcattaggattgcatgagtccaggagttcgagaccagcctaggcatgataagaccttattgctaaaaaaaaaaaaaaaggaaataaaatagaaaattgccatctgcaaatgagaaagccttcagccgacaccagactgccagtgcctttgatattggactttcagtccccagatctgtgaaaaattaatttatgttgtttaagacacctagcctgtggtattttgttatcgcaatcaaaactgactgagacaggcagtaaggagagaacagaggttccagcctgcttcaggtccaggcagttctgccattgcccctaactcctcagtgccagtcatgggccaggcccctgggggacttggaatgagtaaaacatgcacctattgttaaggttcacctggtccagaaggggaggcagacccacctgcccaccatgacccggacagaggcaataaatacggagcacctcatggccagggcctggaggattcccaccataccctacccagcgccaataacagagggaccctggagttgtgtacgcaagatagcagttcagtgcttgcacacatactagttgagaagggaaatcagggctaatgaaacagctcaactgtctggcagagccaggttccttctgccatgatacagtttggatgtttgtccctttctaatcttatatggaaatttgatccccagtgttgaaggtggggcctggtgggaaatgttcctgttatcgggatggatccttcatgaatagcctggtgccatctttgtggtaacaagtgagttctcacttgattagtttctgtgagaactgtttgttaaaaagagcctggtggcacctccctcccttcttcctcctgctcttgctatgtgatgctgctgccctttgccttccgtcatgagtggaagctccctgaagcccccaccagaagcaaatgctggcaccatgctgcttgtacagcctgcagaactgtgagccaaataaacctcttttctttataaattactcagcctcaggtgttactttata

SEQ ID NO: 465738 - DNA, 2906 bp, Homo sapiens
agaaagtcagagtactgggagaacagaagacttcacaatttaatgcctcagtttttaaaaaaggatccttacacttcatgtctcctagccatcagaagaggaatgagacagcaaaagttcaaatggcctgtttcaagtttctgatataaaacgatgacattttcaggaaaatcctgcatttccagagagagactggctggttaaatttctgaaagaggacaccagctaaaagaagggtcattccggctgcttttttgagaagtccctgaagagatcaataacagcaagagggaacctggcaaggaagctattcctataatccaggaaagagatgaggaaggcttggaccaggtggtagtggtgtcagctctgcttcctcatagctgctttccagaacgtgactcttgcaaattatcaagaaaggggaactaatctaagggatccagatcaaacagcctcatgaagacttattttatgtttctaatataaagatagaagttttcagaaaagccctgctacacagaggatcagagcaggggtgggcctgctgggctgcagctgggattctgagcatcctttcccggaggcacggaaagtgagtgagtgagcccagtgaggaagaagttgaagctttgatatgagtaaacaagtatctctacctgaaatgattaaagactggaccaaagagcatgtgaaaaaatgggtaaatgaagaccttaagattaatgagcaatacgggcaaattctgctcagtgaagaagtaacaggattagtcctgcaggaattaactgagaaggaccttgtagaaatggggctaccatggggtccagcacttttgataaaacgttcatacaacaaattgaatagtaagtcccctgaaagtgacaatcatgatccgggacaattagataattcaaaaccgtccaaaacagaacaccagaaaaatccaaaacacaccaaaaaggaagaagaaaattcaatgtcatctaatattgattatgatcccagagagatcagagatatcaaacaagaagaatcaattcttatgaaagaaaatgtgttagatgaagtagcaaatgctaaacacaagaaaaaggagcttgctgtgagacagaagcagagaatacatagacttccgttaaaaccagaatgaggaaaatacttttctctagcatcgtaggaggaagaaaacaaacacatcagatattttcagcactaaaagagatggttttccccacatatatgtaaaagaaatttgcaagactactggattttgatctcatggttgcagtgggtgaataggtggccttttgtgatctcctacatcaccctggaagtgagacttcttcggtttcttctagagtcagtttggtatcagaatggcaaagcaacttaaccttccagaaaatacagatgattggacaaaagaggatgtaaatcagtggttagaaagtcataagattgaccaaaaacacagggaaattttgactgaacaagacgtgaatggagcagtcttgaagtggttaaaaaaagaacatcttgttgatatgggcatcacacatggaccagctattcaaatagaagaactattcaaagaattgcggaaaacagccattgaagattcgattcagacatctaagatgggaaagcccagtaaaaatgctcctaaagaccaaactgtgtctcaaaaggaacgtagagaaacttcaaagcaaaaacaaaagggtaaagagaacccagatatggctaatccgtctgcaatgagtacaactgctaaaggttctaagtcactaaaagttgagctcatagaagataaaatagattatacaaaggaaaggcaaccatccatagacctgacatgtgtatcatatccatttgatgaattcagtaatccatatcgttacaagttggattttagtctacagcctgaaacaggaccaggcaatctcattgatccgatacatgaattcaaagccttcacaaatacagcaacagccacagaagaggatgtcaagatgaaatttagcaatgaggttttccgatttgcttcagcttgtatgaattcacgtaccaatggcactattcattttggagtcaaagacaaaccccatgggaaaattgttggcatcaaagtcaccaatgataccaaggaagccctcattaaccatttcaatctgatgataaacaagtattttgaagaccatcaagtccaacaagcaaagaagtgcattcgagagccaagatttgtggaagttttactgccaaatagtactctatctgacagatttgttattgaagtggacattattccacagttctctgaatgccaatatgattatttccagattaaaatgcaaaattacaacaacaaaatatgggaacaaagtaaaaaattctcactatttgtgcgagatgggaccagctctaaggacattacgaaaaataaagttgatttcagagcatttaaagcagattttaaaacactggcagagtccagaaaagcagcagaagaaaaattcagagcaaaaacaaataaaaaagaaagagagggaccaaagttggttaaattattgacaggaaatcaagatttgttagataattcatactatgaacagtacattcttgtaacaaataaatgccacccagatcaaacaaaacacttagatttcctgaaggaaattaaatggtttgctgtattggagtttgatcctgagtctaacatcaatggagtggtcaaagcttacaaagaaagccgagtagcaaaccttcactttccaagtgtatatgtagaacagaaaaccacaccaaatgagacgatttctactctaaatctttaccatcaacccagctggattttctgcaatggcaggttagaccttgacagtgaaaaatataaaccctttgat

SEQ ID NO: 465739 - DNA, 611 bp, Homo sapiens
agaaagtcagagtactgggagaacagaagacttcacaatttaatgcctcagtttttaaaaaaggatccttacacttcatgtctcctagccatcagaagaggaatgagacagcaaaagttcaaatggcctgtttcaagtttctgatataaaacgatgacattttcaggaaaatcctgggtcattccggctgcttttttgagaagtccctgaagagatcaataacagcaagagggaacctggcaaggaagctattcctataatccaggaaagagatgaggaaggcttggaccaggtggtagtggtgtcaggtagtcaaatgctgggtatattttgaagatacaccccataggatttgctccacattgaatgtggaatgctggaagagagataaagtgtacctgtcacatactttttgagttttatttattttcttagaagtaagtacacaaagagatgctacctaggagaagggtattcttttcactattctttcaaattttctgtatgttcaaacattttcatagtagaaagttggggggaaaatctgtttcataaacatttcctcagcagcagtccagtctattgcattttaattggttgtgatatcattg

SEQ ID NO: 465740 - DNA, 442 bp, Homo sapiens
agaaagtcagagtactgggagaacagaagacttcacaatttaatgcctcagtttttaaaaaaggatccttacacttcatgtctcctagccatcagaagaggaatgagacagcaaaagttcaaatggcctgtttcaagtttctgatataaaacgatgacattttcaggaaaatcctgcatttccagagagagactggctggttaaatttctgaaagaggacaccagctaaaagaaggtattgcatctcacccgagcagactgtgtctgtggaaagtgtaagccccttgccagaagagcagcttcccagcaaaggcagagggtgaaaacagcaaaggtcttaagacactggggacctagagtcaaaagggacctcctccagggaaaacgctgtgtgagaaatggcctcattcggtgactgtgagtgacacagcagaaagttggt

SEQ ID NO: 465741 - DNA, 2611 bp, Homo sapiens
tttatgcaatacgttctcaacaagtatatcctccggcaaactgaacaaggaccaagtctgttctgcctacagctctgcttcctcatagctgctttccagaacgtgactcttgcaaattatcaagaaaggggaactaatctaagggatccagatcaaacagcctcatgaagacttattttatgtttctaatataaagatagaagttttcagaaaagccctgctacacagaggatcagagcaggggtgggcctgctgggctgcagctgggattctgagcatcctttcccggaggcacggaaagtgagtgagtgagcccagtgaggaagaagttgaagctttgatatgagtaaacaagtatctctacctgaaatgattaaagactggaccaaagagcatgtgaaaaaatgggtaaatgaagaccttaagattaatgagcaatacgggcaaattctgctcagtgaagaagtaacaggattagtcctgcaggaattaactgagaaggaccttgtagaaatggggctaccatggggtccagcacttttgataaaacgttcatacaacaaattgaatagtaagtcccctgaaagtgacaatcatgatccgggacaattagataattcaaaaccgtccaaaacagaacaccagaaaaatccaaaacacaccaaaaaggaagaagaaaattcaatgtcatctaatattgattatgatcccagagagatcagagatatcaaacaagaagaatcaattcttatgaaagaaaatgtgttagatgaagtagcaaatgctaaacacaagaaaaaggagcttgctgtgagacagaagcagagaatacatagacttccgttaaaaccagaatgaggaaaatacttttctctagcatcgtaggaggaagaaaacaaacacatcagatattttcagcactaaaagagatggttttccccacatatatgtaaaagaaatttgcaagactactggattttgatctcatggttgcagtgggtgaataggtggccttttgtgatctcctacatcaccctggaagtgagacttcttcggtttcttctagagtcagtttggtatcagaatggcaaagcaacttaaccttccagaaaatacagatgattggacaaaagaggatgtaaatcagtggttagaaagtcataagattgaccaaaaacacagggaaattttgactgaacaagacgtgaatggagcagtcttgaagtggttaaaaaaagaacatcttgttgatatgggcatcacacatggaccagctattcaaatagaagaactattcaaagaattgcggaaaacagccattgaagattcgattcagacatctaagatgggaaagcccagtaaaaatgctcctaaagaccaaactgtgtctcaaaaggaacgtagagaaacttcaaagcaaaaacaaaagggtaaagagaacccagatatggctaatccgtctgcaatgagtacaactgctaaaggttctaagtcactaaaagttgagctcatagaagataaaatagattatacaaaggaaaggcaaccatccatagacctgacatgtgtatcatatccatttgatgaattcagtaatccatatcgttacaagttggattttagtctacagcctgaaacaggaccaggcaatctcattgatccgatacatgaattcaaagccttcacaaatacagcaacagccacagaagaggatgtcaagatgaaatttagcaatgaggttttccgatttgcttcagcttgtatgaattcacgtaccaatggcactattcattttggagtcaaagacaaaccccatgggaaaattgttggcatcaaagtcaccaatgataccaaggaagccctcattaaccatttcaatctgatgataaacaagtattttgaagaccatcaagtccaacaagcaaagaagtgcattcgagagccaagatttgtggaagttttactgccaaatagtactctatctgacagatttgttattgaagtggacattattccacagttctctgaatgccaatatgattatttccagattaaaatgcaaaattacaacaacaaaatatgggaacaaagtaaaaaattctcactatttgtgcgagatgggaccagctctaaggacattacgaaaaataaagttgatttcagagcatttaaagcagattttaaaacactggcagagtccagaaaagcagcagaagaaaaattcagagcaaaaacaaataaaaaagaaagagagggaccaaagttggttaaattattgacaggaaatcaagatttgttagataattcatactatgaacagtacattcttgtaacaaataaatgccacccagatcaaacaaaacacttagatttcctgaaggaaattaaatggtttgctgtattggagtttgatcctgagtctaacatcaatggagtggtcaaagcttacaaagaaagccgagtagcaaaccttcactttccaagtgtatatgtagaacagaaaaccacaccaaatgagacgatttctactctaaatctttaccatcaacccagctggattttctgcaatggcaggttagaccttgacagtgaaaaatataaaccctttgat

SEQ ID NO: 465742 - DNA, 499 bp, Homo sapiens
atagctaaagtaagtatcaagcagttttaagagtcagcctttagcaatattatacatatatatatgtatcttctgtatgataatgtatacataattgtctatgtgattttaaaaataaagtataattctaaaatacttattatattgctttgtctcaggaagaagttgaagctttgatatgagtaaacaagtatctctacctgaaatgattaaagactggaccaaagagcatgtgaaaaaatgggtaaatgaagaccttaagattaatgagcaatacgggcaaattctgctcagtgaagaagtaacaggattagtcctgcaggaattaactgagaaggaccttgtagaaatggggctaccatggggtccagcacttttgataaaacgttcatacaacaaattgaatagtaagtcccctgaaagtgacaatcatgatccgggacaattagataattcaaaaccgtccaaaacagaacaccagaaaaatccaaaacacacc

SEQ ID NO: 465743 - DNA, 1137 bp, Homo sapiens
agaattattttatttcaggaatccatcaacatcctttgcagctacataggcaggaaaatctagaaattgtaatttatatagaattttaaaactcttcaattacaatggatagaggggagaaaatacagctcaagagagtgtttggatattggtggggcacaagttttttgcttattaatatcattggtgcaggaatttttgtgtcccccaaaggtgtgttggcatactcttgcatgaacgtgggagtctccctgtgcgtttgggctggctgtgccatactggccatgacatcaactctttgctctgcagagataagtataagcttcccatgcagtggagctcaatactattttctcaagagatactttggctccacggttgcttttttgaatctctggacatccttgtttctggggtcaggggtagttgctggccaagctctgctccttgctgagtacagcatccagcctttttttcccagctgctctgtcccaaagctgcctaagaaatgtctggcattggccatgttgtggattgtaggaattctgacttctcgtggtgtgaaagaagtgacttggcttcagatagctagctcagtgctgaaagtgtccatacttagcttcatttccctaactggagtagtgttcctgataagagggaaaaaggagaatgtagaacgatttcagaatgcttttgatgctgaacttccagatatctctcaccttatacaagccatcttccaaggatattttgcatattcaggcggggcatgctttacacttatagcagccagcactgacggagctgcacctgatcctcctcaagttataactaaccacatttgtagaatgcacactgggaaattgaaggggaatttcctttgccttactggaaagaaatattttggaaatgtgactgaagatgtgaaatttgtggagaacactgaattccctacccatcttctccttccccagccaccttatacccaaaccttcccacccccaaagccaatgtcagggccatatgacctagatacaactactttccataagaagaccctccacccttggccaggcccattttaatgcaaaagtttcttaatttttaatgttataaacaatgcagtctttccagact

SEQ ID NO: 465744 - DNA, 1826 bp, Homo sapiens
gagggagtgacactgaatattaagggtctggaatatgatggtttaaaagtgtggcacatccccctttgcacttgctctctctctctctccttctctcctttgtctctctcctctctctcttctctctctctcgtcgccatgtaagatatggcttgtttctcctttgccttctgccataattaagacaagagtgcgagcctctgttatgcccggacagggccaccagagggctccttggtctagcagtaacgccagcgtctgggaagacacctgttgccaagcagaccctccactagacagtgccccagtggggagtctgtatgggggctccagccccacatttgccttccacactgccttaggagaggttctccatgagggctctgcctctgcagcagacttctgcctggacatccaggctcatattggcaacttattaacatcaaaattcttcagttataaggattttgatactttattatatacctgtgcagcagagtttgactttatggaaaaagagactccactgagatacacaaagacattattgtttccagttgttcttgtagtgtttgttgctattgttagaaagattattagtgatatgtggggtgtcttagctaaacaacagacacacataagaacacagcacatcacttattcatccttcagatgttatccagtacaatctgacagtagccctgcacataatctacactcgaaggacacagttttatacttcagttcagcagggaaagtaaattattatgtgagtggttttaggaccagtggactgccttttgggaaatgagcagggaaatataaaactggattcatacctcactttttgcagaaaataaatttcagatgaagcagagaattaggtatagaaaaaaaataaagccccaaaattaactaagagggataattaatcctttatttgggactctagcagaggccacattcttctctgggaagaagttttgcatgacagatgcatactactttatactaacaattaccgatgtattcttaatttggtttcagctatttggatggctcttttgcaaagtacatcctggtgctgttgtttttgctatattagcagcaatgtcaataccaggttcagcaaatctgcaaacccagtggaatactgtaggggagttcagcaacttgccacaagaatttatagaatggatcaaatatagtactaaaccaggtaaaaaaaaaaaagtcatattatttaactgtttttcccacaattttatataccactgcaaactccaaactcttaaaccctagttacttccactgatcttactctttctaagcaatgttgcttttagaatatctaaaacaaaggagatatcaatcctgtttaaatggtttgcatgggaaatgttatacatatgttcttagtaatttattctgccactttttatagattttaattttttcaaaatttattcacagtcataaatgccacatttaaaataattttactgtgcttatttttttaatgaatttttaatattagtccttcacattccttcttgaaataaactcatggaatgtggtattttattcatgtgtggaaagggagacttcgttgtcatctgagtatcaaatgattgaatactaaatcatcttccagaactctttgttactataaagctttcctagtccatttcatacttcttttctagattcaggaaagatttctaagatttttctttaaagaaagaaatctttaatgatgagatgatgaagctctattttccaaggaaaatagtttacccaggcctggctgccaactgctactttat

SEQ ID NO: 465745 - DNA, 1201 bp, Homo sapiens
accaaaggcagccccttaaccatggactccttagcctccatagcagtaagaaataatttctgtttctttataaattaccagattcagctgggccacaaatggagtctggtaattcatccccaactgcttcccaggtcgggactcagggcccctttccattacccgttgttgatgaccttgtctttgctttctgggccccagccttgtttcctgacaatggtttcagcaacaatcatttgtgacaagtttccagctgttgtcatgatttgtctggtaatgtggtttgaggctcttgaggaacctttgagcttaaaggccacattatcctggggtgcagacataccccatctggcatttcccctgcttgcacttactccattctgccgccctgtgaagagggtgcctgcttttcctttgccttctgccatgattgtaagtttcctgaggccttcccagcgatgtggaactgaaaccatgcattcaaaataatgctaacctgtcaagttattgatctgcactgtacatatttcctggtcataggcagcttccacacaagaacatctggatgcaaattaaagaattcaattactcaagcctaagtgatagaggagacctcggctactctgcctgagcacatcactgctggatctcaaaatctgcaagaacttcctagggcttcaggaactttcatgtgcataccagtcacctgggaatcttgttacgatgcatattctttttcagtgagcccaaattctgcaattcttataaggtcttaggggacatgatgtttgcttctagtggtccatggtctactcctgaaggtccaccatgcccagcttcatctccccaccctctggaaactctcctgtacccaagccacttgctctcttctaaataggcattgtgttcccatgttcccatgtgtctgcctctttcaacttctcctctaaaaattctccatgacccccaagcataagcctccagcagcaagctcaaaaatgctttctactctgttgtgttgcccggcccacttcaagagtagatgctcaattccttcttcccctagtcgtatttgctgctacttttgcaggctgctggaacactttcactctgaggattctgatgaacacagttcttgccctcttcacttttccaatctggttgcaggcacagcgggggacagcaggagtgcaacacagta

SEQ ID NO: 465746 - DNA, 2096 bp, Homo sapiens
aagcaccaacctatcaaggagaagtcccacccagtctgccctgtgcctatataaaggcgacaagtggcggccgcagcactcattgaagccgccagttgggagaggagcagagccaggccggtgctcccgaaggcagcaagatgttgcgagccacagctccctgctggttcccccctggatacccagaagctaagaaggtggccgaggaggcggccctggaggcaagccgccatttgggaggggagcagagccaggccggtgctcccgaaggcagcaagatgttgcgagccacagctccctgctggttccgccctggatacccagaagctaagaagctggccaaggaggcggccccggaggcaagccgccatttgggagcggagcagagcccggccggtgctcccgaaggcagcaagatgttgcgagccacagctccctgctgcttcccacctggatacccagaagctaagaaggtggccgaggaggcggccctcgaggctccagaattcccactgccctctcatcagcctgcccagagcttcgggctctgggtgccccagatgcacaagcaggcctcagcatttgtggacatccaggcggagccccagaacaggggtccggcggtgcccccagcgtggcccaagatggtgacggagtcgtgctacttccctgcgcagaggggatcggcctgccgcttgccagccgccccaaggctgacagagaggccctcgggagtccgcatctcagcccccaggaagaggaagacgatcgcccactcttccagcccttgcttggtcacaggttacacagatgccaagagaacccgggtggccagcagcagccaacgctcccgtggctccaaggtcggcagacagccagggaagacgcgcaacagctctgggtgccaagtccccaccgtcctccgccgaggctatctccaactgttcaccgaagagtgtctcaagttctgcgcctccaagcaggaggccgaggagaaggcgctgaacgaggagaaggtggcctacgactgcagccccaacaagaacaggtacctgaacgtggtcctgaacaccctcaagagactgaagggcctgacccccagctccatgcccggcctcagcagggccgccctgtacagccgcctccaggagttcctgctcacccaggaccagctcaaggagaacggctaccccttcccgcaccccgagcggcccggaggcgccgtcctcttcactggccaggggaaggggcccggcgactcctcctgcagggtctgctgccgttgtggcaccgagtacctggtgtcctcctcgggccgctgtgtacgcgaccagttgtgttattatcactgggggcgggtccgctcgagccaggtggctggaggccgggttagccagtacacctgctgtgcagctgctcctggctctgtgggctgccaggtggcaaagcagcacgtgcgggacggccgcaaggagagcctcgatggcttcgtggagaccttcaagaaagagttgtccagagacgcttatccaggaatctacgccttggactgtgagatgtgctacaccacgcatggcctagagctgacccgcgtcaccgtggtggacgccgacatgcgagtggtgtacgacaccttcgtcaagcccgacaacgagatcgtggactacaacaccaggttttccggagtcaccgaggccgacgtcgccaagacgagcatcacgttgccccaagtccaagccatcctgctgagctttttcagcgcccaaaccatcctcatcgggcacagcctggagagcgacctgctggccctgaagctcatccacagcaccgtggtggacacggccgtgctcttcccgcactacctgggtttcccctacaagcgctccctcaggaatctcgcggccgactacctggcacagatcatccaggacagccaggacggccacaactccagcgaggacgcaaacgcctgcctgcagctggtgatgtggaaggtccgacagcgcgcccagatccagccacgccaccggtccgcctctcccgccgccctggcctgtccttagccccaggcctcttccaaaaccgccatcagtccc

SEQ ID NO: 465747 - DNA, 1218 bp, Homo sapiens
ggcaccttgtcagctgcaaccaaacctcaccttctgaaagtgaagacagagaaatggtcaaatgggtatcagaaaaaggttatgggaaaagccaaacattggttgaatttgagctgactggaggatgcaaactacagccgcaggtccaggcaggtctaggaatttgtgggaaggagaagagaagagaaaaacaagagtgtgagacggatatcctctctgaggaggagaagagagaacatttcaaaaggaaggccgcagaactccgcagaaggccgcagaactccgcagaaggccgcagaactccgcagaagtccgcacacagtaaggaagttgcctccgcgtccagcccgctgattgagcaggccgagagccaatgcgcaaagaaggtccgtttccgtttgttttcctcatacttttccttctttctgaccagtaagccacagagttatggaaaaggctggggaagaatctgtggccgagtccttcttcccacaggtccactaattatggagaaccaaagttttttcttaaaactgacgggacaatcgatgaacctgaccactgcagacatggacttccctaaacttcaatctgtggagagaggcctcagagtcttcactcgctatttcattttcaggctccttccagcaaaataaaagtaaaaacaacagctatttgatggctcattgcctttgtttccctggtagatcctcagggacgttccaaggacattctactttgagtgtcatagaaaaagcaccagaatcacagtctgatatcttaagagtgacaagagaccagcattcaagacttagcttctgataatggtatgtatggataaagccacttgcttcctgcatgacaatggccaggttcttttacctctctgtgtctaaatttccatccttatttaaaggagaccttggagtagtgtttgaaattctgtatacaggattttattattattattgttattaactagataaaataccttgacactttggcctgagttacacttctgtttttgcaagaatcgttttaggcgattttctaaattcgtttcttgaatttactagcctgaattagttaataaataaaaactttccttcacaagctatttggatacttttaagataaaattcatacaggaaaggtaggataactatttttattctttcccattatcacacattgtattatcaaagcccagagagcttt

SEQ ID NO: 465748 - DNA, 1846 bp, Homo sapiens
gacaaggcccaatggctgctgttcggaaccagaggccggggaccggagaaaggaggagcggagaaggagaaggaggagagcacggcctggctgggacagaagcggtgggaccctgggaggcctccgctgtgcccgtgccgcgctcctcgggaccagcgcgtcgcacacaaaggggctgccgagccagagccaccagcgcctcagggcaccgtggggagcgcgcagctagggggcctgtgcgcaccccgccccgcagccccgcccccggccctccccggccccaccccactcccaccgccctctccgcggccgtccccacccctatctccgcgacccccactcctcctcggctgttccccaaccctgtcactgtgctcccctccctactcccggcccgtagtggaggtgactttcctgcgcagcgccgcttctgagggcggagaacccacagggagtgcgacccctttgcacgctgtgagtgggcaactgtccgagggactcgagccgatcgaaggctggacgccctatagggctcttggcagtccacgaaagacctggagtccgcctccccatttctccggtcggtgagtggcaggaggaaatcgccaaacatgttttcccgctttgcctccccaactcggaaacttgcaacttgccgtgtcctggaggttgagacaatttggggtctcttggctgccgtccaacagatttatctctgagggcagtgtccttggtgagaggtccaagtaggtgtgggcgacattttcctccatctcatgagggagcagccctgcacactagggcccaaaactctgcgaaggagcttggaagttcttcatccgttccacttgttttgctactccacacacccttctaggacatgttgattgccaactgctctgtgcagctttcccatagctgtctgttcccgtgcatttcggagcaccaagcaaatacgagcagagagacctggaaaaaaaaatgatgaagacagtattaatgataaaattaacatggctgagtgaattgtcaatgcaagttcctttactaactctttgttaagttttgctttgtactccttacatcctctttctcttaagccattgttttaatttcttctcgttatcatttttaaaagtaacagaaatacagctttcttcctaccttcacgattgacttggtggaggttgggttgcaaagaggaagcagtaagaaaaaataattattctatacattcacaagtccttcaaggcacaaaataaaagtaagaaatagaaaatatgtcctttctcctaataaaggtctttataataaaatttaaatgaagttttgtgtttcataacagcttcccaaatactgttgtagatactaaaatgtgcctgtatgtatttccttccacaataataatagtaataataaacttttttaggtccaaattaaacatttctcagcttaaatttctatcctcaatccaacatttattatatcaaaacttgatttttaaaaataaaactttcttaataatgtgtttgaaattcatccatactgtcatatccattggtagtttgctcctttttgttactaagtgttattagactatcagtataacacaatgttgtttattcattcactggttgaagagcatgtaagctctttcctgtttcaattattatgaataaagcagctataaaaatccaagtacaaacacttgtatggacatatgtttccatttcttttgagtaaatatctaggaatgtgactgctagattgtatggtaaatgcatgttaaattgaccagaaactgccaagttgatttcagaagtgactgtgccatctttcattccca

SEQ ID NO: 465749 - DNA, 406 bp, Homo sapiens
gctcccctccctactcccggcccgtagtggaggtgactttcctgcgcagcgccgcttctgagggcggagaacccacagggagtgcgacccctttgcacgctgtgagtgggcaactgtccgagggactcgagccgatcgaagggtgaggaccagctcgcctgggggtggacggcctggaaaagccgcccctctttggcttccctctgccgcctgcagcccgcacccctccgagattcgtgccccactggacggtttgcgaaggctgaggctgccttggggactcacaaaagaccacaggggtgattcgaagtgtaaatagggaaacaatcatcagcacacaatccggctaaagggataacatatgagtttgcttgttgtccttcatgggattcttctctttttatag

SEQ ID NO: 465750 - DNA, 326 bp, Homo sapiens
tattaatgataaaattaacatggctgagtgaattgtcaatgcaagttcctttactaactctttgttaagttttgctttgtactccttacatcctctttctcttaagccattgttttaatttcttctcgttatcatttttaaaagtaacagaaatacagctttcttcctaccttcacgattgacttggtggaggttgggttgcaaagaggaagcagtaagaaaaaataattattctatacattcacaagtccttcaaggcacaaaataaaagtaagaaatagaaaatatgtcctttctcctaataaaggtctttataataaaattta

SEQ ID NO: 465751 - DNA, 1439 bp, Homo sapiens
gacaaggcccaatggctgctgttcggaaccagaggccggggaccggagaaaggaggagcggagaaggagaaggaggagagcacggcctggctgggacagaagcggtgggaccctgggaggcctccgctgtgcccgtgccgcgctcctcgggaccagcgcgtcgcacacaaaggggctgccgagccagagccaccagcgcctcagggcaccgtggggagcgcgcagctagggggcctgtgcgcaccccgccccgcagccccgcccccggccctccccggccccaccccactcccaccgccctctccgcggccgtccccacccctatctccgcgacccccactcctcctcggctgttccccaaccctgtcactgtgctcccctccctactcccggcccgtagtggaggtgactttcctgcgcagcgccgcttctgagggcggagaacccacagggagtgcgacccctttgcacgctgtgagtgggcaactgtccgagggactcgagccgatcgaaggctggacgccctatagggctcttggcagtccacgaaagacctggagtccgcctccccatttctccggtcggtgagtggcaggaggaaatcgccaaacatgttttcccgctttgcctccccaactcggaaacttgcaacttgccgtgtcctggaggttgagacaatttggggtctcttggctgccgtccaacagatttatctctgagggcagtgtccttggtgagaggtccaagtaggtgtgggcgacattttcctccatctcatgagggagcagccctgcacactagggcccaaaactctgcgaaggagcttggaagttcttcatccgttccacttgttttgctactccacacacccttctaggacatgttgattgccaactgctctgtgcagctttcccatagctgtctgttcccgtgcatttcggagcaccaagcaaatacgagcagagagacctggaaaaaaaaatgatgaagacagtattaatgataaaattaacatggctgagtgaattgtcaatgcaagttcctttactaactctttgttaagttttgctttgtactccttacatcctctttctcttaagccattgttttaatttcttctcgttatcatttttaaaagtaacagaaatacagctttcttcctaccttcacgattgacttggtggaggttgggttgcaaagaggaagcagtaagaaaaaataattattctatacattcacaagtccttcaaggcacaaaataaaagtaagaaatagaaaatatgtcctttctcctaataaaggtctttataataaaatttaaatgaagttttgtgtttcataacagcttcccaaatactgttgtagatactaaaatgtgcctgtatgtatttccttccacaataataatagtaataataaacttttttaggtccaaatta

SEQ ID NO: 465752 - DNA, 1895 bp, Homo sapiens
aagcatcgcgtacctaattggtacgcgttccaaattatttttgaaacctaggaaaaagaagtctcatgtggaagttcttagggaaaaatgatgggcagctcatacttataattagtcttttcacattacttaatgttttaacttactttttctttggtgggcacattgctgggagtcttgctgttgtcacagatgctgcccacctcttaattgacctgaccagtttcctgctcagtctcttctccctgtggttgtcatcgaagcctccctctaagcggctgacatttggatggcaccgagcagagatccttggtgccctgctctccatcctgtgcatctgggtggtgactggcgtgctagtgtacctggcatgtgagcgcctgctgtatcctgattaccagatccaggcgactgtgatgatcatcgtttccagctgcgcagtggcggccaacattgtactaactgtggttttgcaccagagatgccttggccacaatcacaaggaagtacaagccaatgccagcgtcagagctgcttttgtgcatgcccttggagatctatttcagagtatcagtgtgctaattagtgcacttattatctactttaagccagagtataaaatagccgacccaatctgcacattcatcttttccatcctggtcttggccagcaccatcactatcttaaaggacttctccatcttactcatggaaggtgtgccaaagagcctgaattacagtggtgtgaaagagcttattttagcagtcgacggggtgctgtctgtgcacagcctgcacatctggtctctaacaatgaatcaagtaattctctcagctcatgttgctacagcagccagccgggacagccaagtggttcggagagaaattgctaaagcccttagcaaaagctttacgatgcactcactcaccattcagatggaatctccagttgaccaggaccccgactgccttttctgtgaagacccctgtgactagctcagtcacaccgtcagtttcccaaatttgacaggccaccttcaaacatgctgctatgcagtttctgcatcatagaaaataaggaaccaaaggaagaaattcatgtcatggtgcaatgcacattttatctatttatttagttgcattcaccatgaaggaagaggcactgagatccatcaatcaattggattatatactgatcagtagctgtgttcaattgcaggaatgtgtatatagattattcctgagtggagccgaagtaacagctgtttgtaactatcggcaataccaaattcatctcccttccaataatgcatcttgagaacacataggtaaatttgaactcaggaaagtcttactagaaatcagtggaagggacaaatagtcacaaaattttaccaaaacattagaaacaaaaaataaggagagccaagtcaggaataaaagtgactctgtatgctaacgccacattagaacttggttctctcaccaagctgtaatgtgatttttttttctactctgaattggaaatatgtatgaatatacagagaagtgcttacaactaatttttatttacttgtcacattttggcaataaatccctcttatttctaaattctaacttgtttatttcaaaactttatataatcactgttcaaaaggaaatattttcacctaccagagtgcttaaacactggcaccagccaaagaatgtggttgtagagacccagaagtcttcaagaacagccgacaaaaacattcgagttgaccccaccaagttgttgccacagataatttagatatttacctgcaagaaggaataaagcagatgcaaccaattcattcagtccacgagcatgatgtgagcactgctttgtgctagacattgggcttagcattg

SEQ ID NO: 465753 - DNA, 2064 bp, Homo sapiens
cgcagcactcattgaagccgccagttgggagaggagcagagccaggccggtgctcccgaaggcagcaagatgttgcgagccacagctccctgctggttcccccctggatacccagaagctaagaaggtggccgaggaggcggccctggaggcaagccgccatttgggaggggagcagagccaggccggtgctcccgaaggcagcaagatgttgcgagccacagctccctgctggttccgccctggatacccagaagctaagaaggtggccaaggaggcggccccggaggcaagccgccatttgggagcggagcagagcccggccggtgctcccgaaggcagcaagatgttgcgagccacagctccctgctggttcccacctggatacccagaagctaagaagcctgcccagagcttcgggctctgggtgccccagatgcacaagcaggcctcagcatttgtggacatccaggcggagccccagaacaggggtccggcggtgcccccagcgtggcccaagatggtgacggagtcgtgctacttccctgcacagaggggatcggcctgccgcttgccagccgccccaaggctgacagagaggccctcgggagtccgcatctcagcccccaggaagaggaagacgatcgcccactcttccagcccttgcttggtcacaggttacacagatgccaagagaacccgggtggccagcagcagccaacgctcccgtggctccaaggtcggcagacagccagggaagacgcgcaacaggtcagggatggcatgcaagaccaccgccaccaccagctctaagcgaatcgtccgtcgtccatccttaccgagtttgagtttgaagaaacccattatcctccgaagctctgggtgccaagtccccaccgtcctccgccgaggctatctccaactgttcaccgaagagtgtctcaagttctgcgcctccaagcaggaggccgaggagaaggcgctgaacgaggagaaggtggcctacgactgcagccccaacaagaacaggtacctgaacgtggtcctgaacaccctcaagagactgaagggcctgacccccagctccatgcccggcctcagcagggccgccctgtacagccgcctccaggagttcctgctcacccaggaccagctcaaggagaacggctaccccttcccgcaccccgagcggcccggaggcgccgtcctcttcactggccaggggaaggggcccggcgactcctcctgcagggtctgctgccgttgtggcaccgagtacctggtgtcctcctcgggccgctgtgtacgcgaccagttgtgttattatcactgggggcgggtccgctcgagccaggtggctggaggccgggttagccagtacacctgctgtgcagctgctcctggctctgtgggctgccaggtggcaaagcagcacgtgcgggacggccgcaaggagagcctcgatggcttcgtggagaccttcaagaaagagttgtccagagacgcctatccaggaatctacgccttggactgtgagatgtgctacaccacgcatggcctagagctgacccgcgtcaccgtggtggacgccgacatgcgagtggtgtacgacaccttcgtcaagcccgacaacgagatcgtggactacaacaccaggttttccggagtcaccgaggccgacgtcgccaagacgagcatcacgttgccccaagtccaagccatcctgctgagctttttcagcgcccaaaccatcctcatcgggcacagcctggagagcgacctgctggccctgaagctcatccacagcaccgtggtggacacggccgtgctcttcccgcactacctgggtttcccctacaagcgctccctcaggaatctcgcggccgactacctggcacagatcatccaggacagccaggacggccacaactccagcgaggacgcaaacgcctgcctgcagctggtgatgtggaaggtccgacagcgcgcccagatccagccacgccaccggtccgcctctcccgccgccctggcctgtccttagccccaggcctcttccaaaacc

SEQ ID NO: 465754 - DNA, 1325 bp, Homo sapiens
aaggggcgctacggggtccggcagagcctgtgcacccccgctcgctacgagggtacctggagtaacgggctgcaagacgggtacggcgtggagacctacggggacggaggtacctaccagggccagtgggccggaggcatgcggcatggctacggcgtgcgccagagcgtgccctacggcatggccacggtgatccgctcaccgctgcgtacctcgctggcctcgctgcgcagcgagcagagcaatggcagcgtgctccacgacgccgcagccgccgccgacagcccggccggcacccgcggcggtttcgtgctcaacttccacgcagacgctgagctagcgggcaagaagaagggcggcctcttccggaggggctcccttcttggaagcatgaaacttcgcaagtccgaatccaagtcttccatctcgagcaagcgcagctctgtccgcagcgacgcggccatgagcagaattagttccagcgatgccaactccacgatcagctttggcgatgtagattgtgatttttgcccggtggaagaccacgtggacgccaccaccacggaaacctacatgggcgagtggaagaacgacaagcgcaacggcttcggcgttagcgagcgctccaatggcatgaagtatgaaggggagtgggcaaataacaagaggcatggatatggctgtaccgtgtttcctgacggctccaaagaagagggaaaatacaaaaataatattctggtccgtgggataaggaagcagcttataccaataagacatacaaaaactagggagaaggtggacagagcaattgaaggcgcccaaagggcagctgccatggccagaaccaaagtggaaatagcaaattcaaggtaagtaaatgcagggtggttggttttgctgggttggtcagaacaatggagtatcaaatattatgtttgtctatctgccagtgacatcgctaaatgctttctacaactactaaaaaatcaaaggtgaaaaatgattacactcagtagaatcaaagtcagaaatgtacctgcactgttctgaaacttcccatcatcaaaaaatgtcgaaggcactttgagctccccttcctgttctaaattacttccctcatatttaacagcgtgagggagttcactgagaccctgtgctcatcttcctgagcccggaaagttgctgttttcttttcttttttttgtaagaaggacctctgaaatgctgccatagcaagcattgtgttttgtgtaccaaaagaaaatagcaatccacgtagaaacatacttagtatagatgtgtacctttattctgatatttacatc

SEQ ID NO: 465755 - DNA, 674 bp, Homo sapiens
ccactcaataaaacgtgttaaatgaatgaatcaaagaatcacataacaggcctcaaatcatcttttaatcctcaggagacctcattcccaaggccattggtgaattccaaactcacggattcacactgccttcccggtgacgaactcccagagctggccgcaggccaacctttcccctatgcacactcgggtccttgtgcacgggagccagacaatctggcctggggaaactgcatgggccacctacttccaggccacgtggacatagtctttgtcccagaatccagaggaaaatgtgccacttgtgcactgggctccatgcatagacaagccccatgcttgctttattgctctgctcttaccatcttgaaattcataatcattgtcaaacaaagagtcccatgttttcttttggactgggccctgcaaataatgtagctgtacatggagctgatgtttgtaagcaaagcattctgttattttcagaaggaccactcaaatgtgtctggaaaagaccaaacaaccccagacggcaatggtctccaaggaaggtgaccatgagagaacagggaggtgaacagtacgcaaccaagtgaagaggaaagtgtggctgcttgcaccatctagcagcctttcttgttcagtgcacctcattaaaaccacagaaaatgatt

SEQ ID NO: 465756 - DNA, 1206 bp, Homo sapiens
tcatagagccagaagattcaagtaaaagtcttgccaaacaagaaaaggagaaagttcatttttgtcacagtctggttgcaacagtaaaaactagcttttgtcatcatcacattttctaatatcgaaaggacatattttaggaaaaagcatcccaaatttatagaaagacatgatgacccaatataatggcccccaggaaactagcatgacattggagctgaggacccttcttctcactggaggggaaaaggctaagaaaacagaaaaccctctctgttcttgtgaacttgctttagcagataatatcatgggtgggatacctggagagggatcaaaacctcacagcccagacttaaatatgaagactcagcatatgatatcggtgacgttaataccttcccagggagaagcgctgttccttctggctgggaagtgcgagccggtggggggagagagaggagtagagcattatgtggaggtacttcccggttcccttgcgtctgagggtcttatgccagaggggatagaaagcccaacagaaactcaagatagaagaaggagaatctgcgagtgtctgtctcctgtcaagcttccctaatacagccctggtagaacttcatcaacagtggaaggcatttgcaaagagatgtcatcctggggatgagaaggaggaagacagagaaacgcagaaaagcctaagcaggcaccacaaagagaccgagcccgtctgaaagaggctgctctaacctggtggaaactattttaagttgccaccagacattacattccagagccttgagaaaaactgatgaaaaaaaagtcatgaaaaaaaagtcattcgcacaagtgacaccatggtgtgaagtcaaggagcgcagactctggagtcagagggcttgagtcaacctgagcatcttcagctttgactgtgaagacacagctttgactctctgtgttgcagagatggtagtgcccactccagtgacgcttgtgaggattagttgagataataaatacaaaatgctgagcatcaaacctagagtagagaaaggtctcaagtaagtactcattaccagtatttgttatttaatttcacttttgtctacattcccttgtgtgaaatggtttggataattaattaaggaaaactttccctcagggacattgctgatattgcaatcttcactagatacacttatctctacc

SEQ ID NO: 465757 - DNA, 1485 bp, Homo sapiens
ggatttctgggaaagaaaccactctatctgctggacttggagttgaagactgaggagcagcggcagccatcttgccatgctgtggcactgagcatgaagccatcaggccggaagtggagccgaaagttgagactagagaccaggcgcagtggctcacgtctgtaatcccagcactctgggagactgaggcgggcagatcacgagacggaagtttcactctttttgctcaaggtggagtgcaatggcgcgatctcggctcactgcaacctccgcctcccggattcaagcgattctcctgcttcagcctcctgagtagctgagattacagacatgagacaccgcgcccggcctaaaatgtcattttcttcggtgccacggggaagtgaaatagtcctgaacaaaattatatatcctatctgaggttgggatgaggcacagaggtgggaagaaaaagtccacagtcaagtacatgggctggacataaatgagagcaagactgaaatgctgagggggctgcagggagaggcacaagttacttgcatatagcggtgataagcctaagtgaggcaaactgaagtcctcagggttttctatgtttttgttttccatgtggctaaaaattctgtgatttttgtatactactgcagaaatacagaatcaggtcttttatttcataacttactgacactggcttaatttctttgcacagttctaccctatttccaaaaagctaaagagaggaatgtgctagaccaccctccctgcctcactatgccatagtctcttttgggcacacattatattcctatccatgacaagcagccagggcagaagagctctctacatatgtgccaccttgtctccaaaacctgctgtcccctttggacagactggcccatccctgaccactgttctcccctgtcttcaattcctgatggcaacaagagagattctctgactgtttccaaggatgtcattctcagcctcacctccaagtttgattttatagaacaaccaataaatgtggtttcaccttccttgagttcacaaccattctccaaagtgtattcagaagaacacgagtcctgggagatgcttggagagccttttctcacattttatgggcaagaaatgatttttaacgttgtgttaacattcttcagagcagctgctatcatggagctgggactgagtcattctagaaagggcacacatttaccttccatacttatatatttagagcgtctattatctaactttgcctgctagtattgttaactaggtacatatctgacacccccactatttcatacttccacatttcaacttaaaccagtaatgataaaaatttctcctttactcacttccaggtctgtatgaatataagcaaggtttctagatatttcttaaggtagcattcagtcattcatttattcaacccatatttaccccctctaccaactaggcactatacatgttctgagc

SEQ ID NO: 465758 - DNA, 1109 bp, Homo sapiens
gaccactaccatcaagacgtggagactggtagtggctctgaatggctgggcgtgctgatatttattgcatacaagacaagcggggcagggatctgggaacagagatgaataaaacatggtccctcagtcttcagcagctcataaagaactgggaaaaacagagttgcaaggaactcacagttgaaacaaagcatatgatcatccgtgtaagccactctcgggctcagtatcaatatgagcaaaatgagaacaaaatggtgagtgctgcctaccccacgggcatgttaggaaacttgcatgagatatttgacagacaggagtgtgaatttttaagtcaaatagatgaggtggagatacccagggaagatactggcaaatcagcagctctcaatggaagagtaaacgtccatgatgtgattgcctctccctcttctgcttcctctaatctctgtccctgccagtctgggtcaagtttctggcacctgacttgtttgccaggaaaaagacaactgcgggtgaaggagaaaaccctttcctgcatgctcggctgccttcggatccaacgctcctagctgggagatgggaagctgtgggctgcgcagtgggtctttatggtcttggaaaggggacaccccaccttgtgctcatctttgtagaatctgggcaagtttgggggtcctcataaagattttgaaatttttgaagtctattctctgcctgtttttctaaaaaattcttcagtaggtgaataatttacttaacattgtgtacttgggagaatatgatgatggggacagagcatgctgcattgcatggcttcttaggaagaaaacactatgggctgccctgcagaaatgcaggcagaagctgtcatcagtgaatgttgggaggatccataatgttggattggaatagaactagagtgagactgtttcatgaggccttctcccatctagaatctttctcaggagtattctggatgctttgacctggatcagttactgctttggtttgtggcaacatgaaaactggcacaacaggacaaaaatgagttgattatttcagctgaacttcctgggagtttcattcacaataaaggagaggcagaa

SEQ ID NO: 465759 - DNA, 1108 bp, Homo sapiens
cttaaagaaacatctttgggttcaatatccaaatgaacgtgacatattttaaagtggtcaatttgagagagtgaccacttaatccagtgattttactttgcttggaatacttttaaaacttcaattttagagttgcctttagtggcacttattttaaaaacaacattaatgatgacaaatatttttcttgaaaatacattctgtttgtgctccttgagtgatgattaaaactggaaattagccattagtgtttccattacccactatcaaaaaatatgaaaatgggaacacatttggagacactaatgcatgaatctcaaaatgagcttaggttgtcacagtgaatgacgcacacaatgaaatggtaatctgagggatcagtccaacccaccagtgcctttgatgtggtaaagtcatcagaagaagagttcctttacgttagtggagttgcttatatgattgtcatggcaaacgtagagtatttccagttaacaatgggaaccagaaagggatttactgacattcctggacctagctggtttgtacagcaaagagaagagaagatgttgaaaggcagaaaagccaaaagacagggtttggggaatcagtcacatctgttttggagtcagaatgatgaagatgaagggattgaagatattgaaggacttctccttagttcagttaaagacggggttctttgtcccacaccgacgaaaattcaggctcgcagagaatttgaatgggtacaaaaaggcttcatatggcactgctacaaacactggcatttgtgcttcaccagctttacgctgtggagagaagatcaaggggtcaagaagagccagggcactcctgatgaataagaataaggttaagagaatagctctaccaactaccaggcctgctatcaagctaagctaattaaaatagtgtggtcttagtgcaaagaacagtcaagggcatgtcttctattgctcttttccttccttattatctaacttatcgacaatatgtctcagatgcacaagtgtagagaggggaaatgcatgcttctaaggaggaataggctcatatggcatagaatcgtaggatgaaggactgactctgggag

SEQ ID NO: 465760 - DNA, 2218 bp, Homo sapiens
ggctttagcaaaatcatgccattttgagaggttggcagcttcgaccggcaaacagtgcccagagaggcctgcataagccacagagtggccagacccagcttgtctctggtgttcttgcgttgtctctgacggtagtgtccctctgactagtgcaagatgcatgaccttgggcaagtctcataactttctgtaagcctgcacatttccttgtgcaatgtggttgttgagaggagctctgctgcctctccaacagaccttaccaaaacagagagggggtggagccctgctgtctctccagcagaccttaccaaaacagagagggggtggagccctgctgcctctccagcagaccttaccaaaacagagagggggtggagccctgctgcctctccagcagaccttaccaaaacagagagggggtggagccctgctgcctctccagcagaccttaccaaaacagagagggggtggagccctgctgtctctccagcagaccttatcaaaacagagagggggtggagctgagaggacgactcggggctcatagactccgggctcatggcctcggggctcatagactcggggctcatggactcggggctcatggactcggggcccatggactcggggctgatagactcggggctcatggactcggggctcatggactcggggctcatggactcggggctcatagactcggggctcatggactcggggctcatagactcggggctcatggactcggggctcatggactcggggctcatagacttaaagggccacaaagagcagatgggctgggagaggctgttgaaggacctcaagctgccgccccaggctcttgcccttgcccctgctgggagagtcagagccgcctcctcctcctcagtcagaatgactcagatgcccgcgtcagacattctcccctccccaccagcctgggtgacgtctctccgaaactgtctgctccctaagacacagcttacaggcaagatgaagcagtgtcgcacagccctgtcgcctcactcatcctgccctcaggtcttgtttctgcctcttcacagcaccacccccatgaagcttccacatgcacctctgcagacccatctcgcacgatgcagtgggagcgagcccttgtggtgaggtgacaacggcccacatatccctcagtgctgggggatgggagtgtgggttccggggaccactgtgtgcagacacccgtagctcaggagtccaaatgccaatttgtggctggcattccatgtgaggattcaagaacccaggctcctccatcctccatctccaggggctctggagtccttcacttctagccaatgcatgaagaaagagaatagagaattacctgtgggggaatttcagtacgacgtctggaagggacacccacttccactcacctcccattggctagaactcaggcgcacggccacgctgattgccgaggaggctgggaggtggggctggctctgtgcccagggaaaagagagaacaatttctgtaagtacgtagctgtttatgtcacagtatttaaaaaaagagtttgttccataaaatagatgaaactctaactaaaaaccagatcacattaaagagtaattatgtttactattgtgggattctttgcttttaaaagatctagataaattgttttaactagaagctctcccttgctagtgcatttaatcagccaatcagcccctgttttgcctgggtctttgctggatcgggcagatgggatattatttgctgtctgctgtcaggtctggtttctctgagcatcctggttttcccatcctgtctgtcccatggaatgcagtgctttcagatgattttcccctggatgtatgagccagtcactgtcctggtttcaccctgttagaattcttgccttctctttggagggaggagcagggccagccgagggacacaggcagggaagctaagagcagcagcagctgatgctggccgcgtccttgcctgacccaagcacacagactcattttaacagcctccagtgatgtcctcgccccatcaccgatggctgccctcctgcctcttcttcagcccagcccccttccttcttctcattctttgggccaagtgggtttaatgggctggcctcgtcctgggcttctgctcctggaagaggggaatggatgtttaattctctttcctctgtactttcacagcccccagg

SEQ ID NO: 465761 - DNA, 1441 bp, Homo sapiens
tatttaccatttttagtgacatttatactttagtatttttcatattgttagttagcatttcatcatatcaatgtgaagatttcttccagaccatggctggagaaggaaagaaggtgtgttttgcctgattcagggactatagagagaaccaagttctgcaggcctgtcacctaagtctcagatgagtatgaattcttttgtgtttttcacagatttttgcagtggcaggaccaagttcaaatgagtcatagccaagtctacagtaagatgtggtagtattctgttttgaaccgaggaccatgattggcaagcttgccacttggtcaagtgcttaccctctaaagatgtcttccttggtctttgcctccagctgggtgtcacaaactctgaactggattctaaggctttcatgaatgcacttatgtttcctgtggcagctgcattatgttgtgggggatgtgcatgccgaacctcccattctgtcgtcttgcttatgttactctcctttatgtttcactttctcaaatgaatgtcaagctggtgatttttagattcaaaaattctaaaataaattgctcaaatttccacattatgtaagctattaataaaatgtcttgtaggtgctacatattcattaaaatttttggttgtaattttaagctcactgcaggcagaaaggaatcattaacatttatattcttttttttagtctgtatctaaatgatggtatattttaattccagatatttactttatactgcagtaatgctcgtcatattttgcaaaatttatgttgttcttttatttggaaatataaggcttttttagctcctgaaatctatattatagtcatataattttattatgttttgtggtaagaagtgcagcaacatattgagaacataataaaattatcctgtatttttaatgattatttattaaattcctctcattagagcctgttattaatgattgtaatgtattttctgtataattttactgcaatttattaaattctaatgacttaaattgtctgcttttcatgagtgcacacagttgaatgctgtagatatctaaagaattatttttcggccggttgtggtggctcatgcctgtattcccagcaccttgggaggccaaggcgggtggatcacgaggtcaggagatcgagacaaccctgactaacatggtgaaaccccgtctctactaaatatacaaaaaattaaccgggcatagtggcaggcgcctgtatccccagctactcaggaggctgaggcaggagaatggcgtgaactcagtggacagagtttgcagtgagccgagatcgcgccactgcactccagcctgggcaacagggcaagactctgtctcaaaaaaaaaataaaaaaaaaaacggttattttccattgtaaatctatgttgtattcaggattttatgcac

SEQ ID NO: 465762 - DNA, 1009 bp, Homo sapiens
aagtctgacctctgtgaataattacttcagcccctgattgctcccgggacaagctcctgcgccaagctttcactttggcttctgataagtcctgggccaatctaaatagcatctatgaatcatcccttcagctcctgattggtcccgggccaaagtcctgggccaagctgagccacacttttttcaagacagcctgtgaactaagcacatttccttctcttcctttcccagtccataaaaaccttgggccccagcctcacagaggtcaccccattcagaaactatctctgctggcaaagagctttcttctcttgcttatcaaactttcactctaacctcacctttgtgttcacgctccttaatctccctagaagtagaacaaagaactttcgatgctatctcagactatgagagactgttacatcttggtgcactgctgagactacaacacttggtttctttgagtttgactaaatattttacataggtgtaattatacagttttcctttttgactgtcttgttttacttaacagaatgttttcgagatttgtccttattgtagtacttttcaagatttccttatttttaaggctgctgaatgctatcccagtgaatatacgtgccctgtttgttgaatctactcatccttaaaggtacatttgcttccaggtagtatgtttgtgagtaatgctacagtgtacataaatgtgcatatatctattccatgttctgctttgcctgtttgggatatttttcacacactgatttagtaccatgtgtattcccttgcttttgttgtctgattcgttgatgttacatcccccaaattattgccgagaccaattgtcatgaagcttcacccttctgtattgtgctaggaattttacagctatagattttacattatagtcttcatattttaaaattgacacatgtaattgtacaaattttggggaaacaattatgtatatatgttgtatagcaataaaaatcagagtacttagtgt

SEQ ID NO: 465763 - DNA, 642 bp, Homo sapiens
aagtctgacctctgtgaataattacttcagcccctgattgctcccgggacaagctcctgcgccaagctttcactttggcttctgataagtcctgggccaatctaaatagcatctatgaatcatcccttcagctcctgattggtcccgggccaaagtcctgggccaagctgagccacacttttttcaagacagcctgtgaactaagcacatttccttctcttcctttcccagtccataaaaaccttgggccccagcctcacagaggtcaccccattcagaaactatctctgctggcaaagagctttcttctcttgcttatcaaactttcactctaacctcacctttgtgttcacgctccttaatctccctagaagtagaacaaagaactttcgatgctatctcagactatgagagactgttacatcttggtgcactgctgagactacaacacttggtttctttgagtttgactaaatattttacataggtgtaattatacagttttcctttttgactgtcttgttttacttaacagaatgttttcgagatttgtccttattgtagtacttttcaagatttccttatttttaaggctaatgattgcatttagacaatggttatatcgggatcgcgatttttctt

SEQ ID NO: 465764 - DNA, 3225 bp, Homo sapiens
atatccacccccattacagtgaggggcacagggcactagacctgttctagaggtccttcagagaagagagaggcctagagatgtgggcagatgaggacttggaataaagcagaatgtgacaatgcactgggctctggagtgtggggcccagaaaaaatactagatttttgggctgtccttgaggtcctcattcagaagtggaagaaaataatgtctctgaatgctgtcacggttggtggaataaaaagttgtgagttgcggaccaagtacgtctactcagatgtgaatcccaaggccttaagctgtcctcgggtttcctcattggctgggggtctatgcagatactcctatgttcctgatctaggaaacagaatttctaatgcagatgtcacctggtgggcagaagtggtgccctcacatctctttgtaatgttctataatgggggtcacttcccagagtggtttagcctttcaatggctattatttctgatcaaaatggaataaaactagaaatgaataacagaagaaaacaaaaatagcaacatatatatggaaattaaacaactcacttttgagcatgctcatgtttaagggtttcattgacactgatgtgggaacagcccaatcaggcgcgcagttggagaggacaggagaggagggcgtggcttctggcgtttggcgggtctttgtctctcgctggcgctggcacaggaacttgggatccgtctcctctttcgcctcctccaccttgggagccccgggctactctttcacagcccctgttgccctgtgatctgtaggtccttggggacgcacagttaaggtgccaggacatcctggaagctgggaaatgatatgtattcatttcctaccaccgtagtggaagagatactatccctatctttacaactgatagcatttccaacagtaagctgtgagattctgcttgaaatcacctctcaaacaaataaaaaacagacctgggagacatgctacactcattctgctgaagaaataggcatcatagctgggaaacggattcacaagacccaggctgttccctacatatgtttcctcctccgacatcagttcatcagtcaatcaagccatgtgagagtggaggccttgtattccctattattcttgggcactctactccaagtaggaaaaggccaggaggtcctgttaaaggatgcactcagagcccgggctccctaacatatgagagtgctaaccagcaggtgtagacttttcaggagtgaagaatgaggcaggcattccaaacctggaccttcatcaccttttgtttcatctcaagacaattctgagggactgttttggagcgtgtctggaaggtgaaccttgaagaagagtgtgggctttgatgtgactcagttgagatctttcatggggaggcaggaattcaatgcccagaatctgggctggtgtctttgaggtcagtaggttgcgtctttgtatccaagtccattgttactaggttggaggctggagattctaaatggcttccagaccatctctctgattctctttgggagatggggtctgaaagacaatgtcagtagttttgggaaattctagaaagtgtgcttggaaacgtgggaagagctcttgcctagtgcctaaatgctccatttgcagctctagccaagtagatacttggtaggtatagagccgggtttgcgtttatatcagcaaaacctatgtcagagttgaagaagtagtcaggaaaaagcgtcttggtcgcaggccggggaacatcttaaaagcaaacttctagcctgctgactcttggcaatgagtgttggatcctggctaaagtgccttgaatgcagcatgaggccaatccatgaatccaacttctcatggagaaatgttaatattttttcagtttgaatcaatcagggtgaaactaccatgctattggtttgcttactttttattatttcatgtaaaatctaagacaaaatacattaaatgcttattgacatatgtatttattcttcaccaggctgataatatctgcctaattttaaactttcttccattttgtaggtttcaacttattctattgtaagatactgttaaatctaatagaggcattgtcacttttacgtataattttattttatttcatatatttcctattggctttttacatttaaattatggagcacttcatcatataaaaaacttcaattatatttaaacagtaagtctttggatttttttgccttgtaatttccatattacataataatgagataaacattaatgttttcagggtactttaaattttagataattactcattgtattcatgtgaaatttgtttttactgcatgtgtgggttggaggactgttttcacttctgattcatctttactcttatctcatcagagctcatacctcttgtagttgggggattgcagtttataattccaataaatggggcaaattcaataataacataatacaaatgagtttgaatgcaggacaggtcttcaaagcatacacaacatgggcctacatatgtacaacaataataatttataagttactgtttggatggaaagtaaaagtacagaaaatttgttaaaggaaattaaaatggagatcatgtctcaataatctctgagcagacaaaattagttaggtctcataagtgatctcaacctcgcttgatttgcaaatacaaacaaaacttacattatttcttgtagctgcatattgaaaaaagagaaatgaagctcaaccagtcagaagtagccaacaaccttatataaatagaaactgtccaacaaggtaaacagacaaacaaaaaacaataaaaaaagttgtgctaccaccaaatgatttctttgtttctacatttttcaaataaatacttgcttcttacactgtcaatgaagcactcaatatctttccgtctgatattttataatttatcaattgctcttactcaaataaacactttgcaatttcaaaaaaaaaagaagacacaacagaaaaaacgacgaaacacaacacaagacagaacagagaagagaaagacagaaaacactgggggcggtccaccagaaagaatagtaaaaccagcagggaggcgccaccgaaatggccggaacgccagaagaggcgaaaggggaatcacaaaaaagcggcgacgcgcgaaaacacaagggggccacgataagagggcaaaa

SEQ ID NO: 465765 - DNA, 3285 bp, Homo sapiens
atatccacccccattacagtgaggggcacagggcactagacctgttctagaggtccttcagagaagagagaggcctagagatgtgggcagatgaggacttggaataaagcagaatgtgacaatgcactgggctctggagtgtggggcccagaaaaaatactagatttttgggctgtccttgaggtcctcattcagaagtggaagaaaataatgtctctgaatgctgtcacggttggtggaataaaaagttgtgagttgcggaccaagtacgtctactcagatgtgaatcccaaggccttaagctgtcctcgggtttcctcattggctgggggtctatgcagatactcctatgttcctgatctaggaaacagaatttctaatgcagatgtcacctggtgggcagaagtggtgccctcacatctctttgtaatgttctataatgggggtcacttcccagagtggtttagcctttcaatggctattatttctgatcaaaatggaataaaactagaaatgaataacagaagaaaacaaaaatagcaacatatatatggaaattaaacaactcacttttgagcatgctcatgtttaagggtttcattgacactgatgtgggaacagcccaatcaggcgcgcagttggagaggacaggagaggagggcgtggcttctggcgtttggcgggtctttgtctctcgctggcgctggcacaggaacttgggatccgtctcctctttcgcctcctccaccttgggagccccgggctactctttcacagcccctgttgccctgtgatctgtaggtccttggggacgcacagttaaggtgccaggacatcctggaagctgggaaatggctgaatgctatcccagtgaatatacgtgccctgtttgttgaatctactcatccttaaagatatgtattcatttcctaccaccgtagtggaagagatactatccctatctttacaactgatagcatttccaacagtaagctgtgagattctgcttgaaatcacctctcaaacaaataaaaaacagacctgggagacatgctacactcattctgctgaagaaataggcatcatagctgggaaacggattcacaagacccaggctgttccctacatatgtttcctcctccgacatcagttcatcagtcaatcaagccatgtgagagtggaggccttgtattccctattattcttgggcactctactccaagtaggaaaaggccaggaggtcctgttaaaggatgcactcagagcccgggctccctaacatatgagagtgctaaccagcaggtgtagacttttcaggagtgaagaatgaggcaggcattccaaacctggaccttcatcaccttttgtttcatctcaagacaattctgagggactgttttggagcgtgtctggaaggtgaaccttgaagaagagtgtgggctttgatgtgactcagttgagatctttcatggggaggcaggaattcaatgcccagaatctgggctggtgtctttgaggtcagtaggttgcgtctttgtatccaagtccattgttactaggttggaggctggagattctaaatggcttccagaccatctctctgattctctttgggagatggggtctgaaagacaatgtcagtagttttgggaaattctagaaagtgtgcttggaaacgtgggaagagctcttgcctagtgcctaaatgctccatttgcagctctagccaagtagatacttggtaggtatagagccgggtttgcgtttatatcagcaaaacctatgtcagagttgaagaagtagtcaggaaaaagcgtcttggtcgcaggccggggaacatcttaaaagcaaacttctagcctgctgactcttggcaatgagtgttggatcctggctaaagtgccttgaatgcagcatgaggccaatccatgaatccaacttctcatggagaaatgttaatattttttcagtttgaatcaatcagggtgaaactaccatgctattggtttgcttactttttattatttcatgtaaaatctaagacaaaatacattaaatgcttattgacatatgtatttattcttcaccaggctgataatatctgcctaattttaaactttcttccattttgtaggtttcaacttattctattgtaagatactgttaaatctaatagaggcattgtcacttttacgtataattttattttatttcatatatttcctattggctttttacatttaaattatggagcacttcatcatataaaaaacttcaattatatttaaacagtaagtctttggatttttttgccttgtaatttccatattacataataatgagataaacattaatgttttcagggtactttaaattttagataattactcattgtattcatgtgaaatttgtttttactgcatgtgtgggttggaggactgttttcacttctgattcatctttactcttatctcatcagagctcatacctcttgtagttgggggattgcagtttataattccaataaatggggcaaattcaataataacataatacaaatgagtttgaatgcaggacaggtcttcaaagcatacacaacatgggcctacatatgtacaacaataataatttataagttactgtttggatggaaagtaaaagtacagaaaatttgttaaaggaaattaaaatggagatcatgtctcaataatctctgagcagacaaaattagttaggtctcataagtgatctcaacctcgcttgatttgcaaatacaaacaaaacttacattatttcttgtagctgcatattgaaaaaagagaaatgaagctcaaccagtcagaagtagccaacaaccttatataaatagaaactgtccaacaaggtaaacagacaaacaaaaaacaataaaaaaagttgtgctaccaccaaatgatttctttgtttctacatttttcaaataaatacttgcttcttacactgtcaatgaagcactcaatatctttccgtctgatattttataatttatcaattgctcttactcaaataaacactttgcaatttcaaaaaaaaaagaagacacaacagaaaaaacgacgaaacacaacacaagacagaacagagaagagaaagacagaaaacactgggggcggtccaccagaaagaatagtaaaaccagcagggaggcgccaccgaaatggccggaacgccagaagaggcgaaaggggaatcacaaaaaagcggcgacgcgcgaaaacacaagggggccacgataagagggcaaaa

SEQ ID NO: 465766 - DNA, 3026 bp, Homo sapiens
aagtctgacctctgtgaataattacttcagcccctgattgctcccgggacaagctcctgcgccaagctttcactttggcttctgataagtcctgggccaatctaaatagcatctatgaatcatcccttcagctcctgattggtcccgggccaaagtcctgggccaagctgagccacacttttttcaagacagcctgtgaactaagcacatttccttctcttcctttcccagtccataaaaaccttgggccccagcctcacagaggtcaccccattcagaaactatctctgctggcaaagagctttcttctcttgcttatcaaactttcactctaacctcacctttgtgttcacgctccttaatctccctagaagtagaacaaagaactttcgatgctatctcagactatgagagactgttacatcttggtgcactgctgagactacaacacttggtttctttgagtttgactaaatattttacataggtgtaattatacagttttcctttttgactgtcttgttttacttaacagaatgttttcgagatttgtccttattgtagtacttttcaagatttccttatttttaaggctgctgaatgctatcccagtgaatatacgtgccctgtttgttgaatctactcatccttaaagatatgtattcatttcctaccaccgtagtggaagagatactatccctatctttacaactgatagcatttccaacagtaagctgtgagattctgcttgaaatcacctctcaaacaaataaaaaacagacctgggagacatgctacactcattctgctgaagaaataggcatcatagctgggaaacggattcacaagacccaggctgttccctacatatgtttcctcctccgacatcagttcatcagtcaatcaagccatgtgagagtggaggccttgtattccctattattcttgggcactctactccaagtaggaaaaggccaggaggtcctgttaaaggatgcactcagagcccgggctccctaacatatgagagtgctaaccagcaggtgtagacttttcaggagtgaagaatgaggcaggcattccaaacctggaccttcatcaccttttgtttcatctcaagacaattctgagggactgttttggagcgtgtctggaaggtgaaccttgaagaagagtgtgggctttgatgtgactcagttgagatctttcatggggaggcaggaattcaatgcccagaatctgggctggtgtctttgaggtcagtaggttgcgtctttgtatccaagtccattgttactaggttggaggctggagattctaaatggcttccagaccatctctctgattctctttgggagatggggtctgaaagacaatgtcagtagttttgggaaattctagaaagtgtgcttggaaacgtgggaagagctcttgcctagtgcctaaatgctccatttgcagctctagccaagtagatacttggtaggtatagagccgggtttgcgtttatatcagcaaaacctatgtcagagttgaagaagtagtcaggaaaaagcgtcttggtcgcaggccggggaacatcttaaaagcaaacttctagcctgctgactcttggcaatgagtgttggatcctggctaaagtgccttgaatgcagcatgaggccaatccatgaatccaacttctcatggagaaatgttaatattttttcagtttgaatcaatcagggtgaaactaccatgctattggtttgcttactttttattatttcatgtaaaatctaagacaaaatacattaaatgcttattgacatatgtatttattcttcaccaggctgataatatctgcctaattttaaactttcttccattttgtaggtttcaacttattctattgtaagatactgttaaatctaatagaggcattgtcacttttacgtataattttattttatttcatatatttcctattggctttttacatttaaattatggagcacttcatcatataaaaaacttcaattatatttaaacagtaagtctttggatttttttgccttgtaatttccatattacataataatgagataaacattaatgttttcagggtactttaaattttagataattactcattgtattcatgtgaaatttgtttttactgcatgtgtgggttggaggactgttttcacttctgattcatctttactcttatctcatcagagctcatacctcttgtagttgggggattgcagtttataattccaataaatggggcaaattcaataataacataatacaaatgagtttgaatgcaggacaggtcttcaaagcatacacaacatgggcctacatatgtacaacaataataatttataagttactgtttggatggaaagtaaaagtacagaaaatttgttaaaggaaattaaaatggagatcatgtctcaataatctctgagcagacaaaattagttaggtctcataagtgatctcaacctcgcttgatttgcaaatacaaacaaaacttacattatttcttgtagctgcatattgaaaaaagagaaatgaagctcaaccagtcagaagtagccaacaaccttatataaatagaaactgtccaacaaggtaaacagacaaacaaaaaacaataaaaaaagttgtgctaccaccaaatgatttctttgtttctacatttttcaaataaatacttgcttcttacactgtcaatgaagcactcaatatctttccgtctgatattttataatttatcaattgctcttactcaaataaacactttgcaatttcaaaaaaaaaagaagacacaacagaaaaaacgacgaaacacaacacaagacagaacagagaagagaaagacagaaaacactgggggcggtccaccagaaagaatagtaaaaccagcagggaggcgccaccgaaatggccggaacgccagaagaggcgaaaggggaatcacaaaaaagcggcgacgcgcgaaaacacaagggggccacgataagagggcaaaa

SEQ ID NO: 465767 - DNA, 2630 bp, Homo sapiens
aataacaaacaaaccagttttattgttttaatagccgaaattggcaaaatttctagtttttctttcataggaatgctctttgcaagaaaaaattttcatatagtgagagcaaaaatggcaaccatttgcaagtaaatgtcttatgaaattaagtagcagatatcaagctcatgaccttcagatagttacccctaactcaatcacttacatagcaagtgcagataattttcatagctccctattaaaattatatttcaatgcccttacaaattgtgactgtttttaaataaagttgaccaactaaaattttgtatatgacatatgataaattccccttcaagtcaccttacatttacttaattttattaggcagtgtctgtctaccacccaataatacttgaggattctccctccatttgcacaggcatcatagctgggaaacggattcacaagacccaggctgttccctacatatgtttcctcctccgacatcagttcatcagtcaatcaagccatgtgagagtggaggccttgtattccctattattcttgggcactctactccaagtaggaaaaggccaggaggtcctgttaaaggatgcactcagagcccgggctccctaacatatgagagtgctaaccagcaggtgtagacttttcaggagtgaagaatgaggcaggcattccaaacctggaccttcatcaccttttgtttcatctcaagacaattctgagggactgttttggagcgtgtctggaaggtgaaccttgaagaagagtgtgggctttgatgtgactcagttgagatctttcatggggaggcaggaattcaatgcccagaatctgggctggtgtctttgaggtcagtaggttgcgtctttgtatccaagtccattgttactaggttggaggctggagattctaaatggcttccagaccatctctctgattctctttgggagatggggtctgaaagacaatgtcagtagttttgggaaattctagaaagtgtgcttggaaacgtgggaagagctcttgcctagtgcctaaatgctccatttgcagctctagccaagtagatacttggtaggtatagagccgggtttgcgtttatatcagcaaaacctatgtcagagttgaagaagtagtcaggaaaaagcgtcttggtcgcaggccggggaacatcttaaaagcaaacttctagcctgctgactcttggcaatgagtgttggatcctggctaaagtgccttgaatgcagcatgaggccaatccatgaatccaacttctcatggagaaatgttaatattttttcagtttgaatcaatcagggtgaaactaccatgctattggtttgcttactttttattatttcatgtaaaatctaagacaaaatacattaaatgcttattgacatatgtatttattcttcaccaggctgataatatctgcctaattttaaactttcttccattttgtaggtttcaacttattctattgtaagatactgttaaatctaatagaggcattgtcacttttacgtataattttattttatttcatatatttcctattggctttttacatttaaattatggagcacttcatcatataaaaaacttcaattatatttaaacagtaagtctttggatttttttgccttgtaatttccatattacataataatgagataaacattaatgttttcagggtactttaaattttagataattactcattgtattcatgtgaaatttgtttttactgcatgtgtgggttggaggactgttttcacttctgattcatctttactcttatctcatcagagctcatacctcttgtagttgggggattgcagtttataattccaataaatggggcaaattcaataataacataatacaaatgagtttgaatgcaggacaggtcttcaaagcatacacaacatgggcctacatatgtacaacaataataatttataagttactgtttggatggaaagtaaaagtacagaaaatttgttaaaggaaattaaaatggagatcatgtctcaataatctctgagcagacaaaattagttaggtctcataagtgatctcaacctcgcttgatttgcaaatacaaacaaaacttacattatttcttgtagctgcatattgaaaaaagagaaatgaagctcaaccagtcagaagtagccaacaaccttatataaatagaaactgtccaacaaggtaaacagacaaacaaaaaacaataaaaaaagttgtgctaccaccaaatgatttctttgtttctacatttttcaaataaatacttgcttcttacactgtcaatgaagcactcaatatctttccgtctgatattttataatttatcaattgctcttactcaaataaacactttgcaatttcaaaaaaaaaagaagacacaacagaaaaaacgacgaaacacaacacaagacagaacagagaagagaaagacagaaaacactgggggcggtccaccagaaagaatagtaaaaccagcagggaggcgccaccgaaatggccggaacgccagaagaggcgaaaggggaatcacaaaaaagcggcgacgcgcgaaaacacaagggggccacgataagagggcaaaa

SEQ ID NO: 465768 - DNA, 3241 bp, Homo sapiens
atatccacccccattacagtgaggggcacagggcactagacctgttctagaggtccttcagagaagagagaggcctagagatgtgggcagatgaggacttggaataaagcagaatgtgacaatgcactgggctctggagtgtggggcccagaaaaaatactagatttttgggctgtccttgaggtcctcattcagaagtggaagaaaataatgtctctgaatgctgtcacggttggtggaataaaaagttgtgagttgcggaccaagtacgtctactcagatgtgaatcccaaggccttaagctgtcctcgggtttcctcattggctgggggtctatgcagatactcctatgttcctgatctaggaaacagaatttctaatgcagatgtcacctggtgggcagaagtggtgccctcacatctctttgtaatgttctataatgggggtcacttcccagagtggtttagcctttcaatggctattatttctgatcaaaatggaataaaactagaaatgaataacagaagaaaacaaaaatagcaacatatatatggaaattaaacaactcacttttgagcatgctcatgtttaagggtttcattgacactgatgtgggaacagcccaatcaggcgcgcagttggagaggacaggagaggagggcgtggcttctggcgtttggcgggtctttgtctctcgctggcgctggcacaggaacttgggatccgtctcctctttcgcctcctccaccttgggagccccgggctactctttcacagcccctgttgccctgtgatctgtaggtccttggggacgcacagttaaggtgccaggacatcctggaagctgggaaatgatatgtattcatttcctaccaccgtagtggaagagatactatccctatctttacaactgatagcatttccaacagtaagctgtgagattctgcttgaaatcacctctcaaacaaataaaaaacagacctgggagacatgctacactcattctgctgaagaaataggcatcatagctgggaaacggattcacaagacccaggctgttccctacatatgtttcctcctccgacatcagttcatcagtcaatcaagccatgtgagagtggaggccttgtattccctattattcttgggcactctactccaagtaggaaaaggccaggaggtcctgttaaaggatgcactcagagcccgggctccctaacatatgagagtgctaaccagcaggtgtagacttttcaggagtgaagaatgaggcaggcattccaaacctggaccttcatcaccttttgtttcatctcaagacaattctgagggactgttttggagcgtgtctggaaggtgaaccttgaagaagagtgtgggctttgatgtgactcagttgagatctttcatggggaggcaggaattcaatgcccagaatctgggctggtgtctttgaggtcagtaggttgcgtctttgtatccaagtccattgttactaggttggaggctggagattctaaatggcttccagaccatctctctgattctctttgggagatggggtctgaaagacaatgtcagtagttttgggaaattctagaaagtgtgcttggaaacgtgggaagagctcttgcctagtgcctaaatgctccatttgcagctctagccaagtagatacttggtaggtatagagccgggtttgcgtttatatcagcaaaacctatgtcagagttgaagaagtagtcaggaaaaagcgtcttggtcgcaggccggggaacatcttaaaagcaaacttctagcctgctgactcttggcaatgagtgttggatcctggctaaagtgccttgaatgcagcatgaggccaatccatgaatccaacttctcatggagaaatgttaatattttttcagtttgaatcaatcagggtgaaactaccatgctattggtttgcttactttttattatttcatgtaaaatctaagacaaaatacattaaatgcttattgacatatgtatttattcttcaccaggctgataatatctgcctaattttaaactttcttccattttgtaggtttcaacttattctattgtaagatactgttaaatctaatagaggcattgtcacttttacgtataattttattttatttcatatatttcctattggctttttacatttaaattatggagcacttcatcatataaaaaacttcaattatatttaaacagtaagtctttggatttttttgccttgtaatttccatattacataataatgagataaacattaatgttttcagggtactttaaattttagataattactcattgtattcatgtgaaatttgtttttactgcatgtgtgggttggaggactgttttcacttctgattcatctttactcttatctcatcagagctcatacctcttgtagttgggggattgcagtttataattccaataaatggggcaaattcaataataacataatacaaatgagtttgaatgcaggacaggtcttcaaagcatacacaacatgggcctacatatgtacaacaataataatttataagttactgtttggatggaaagtaaaagtacagaaaatttgttaaaggaaattaaaatggagatcatgtctcaataatctctgagcagacaaaattagttaggtctcataagtgatctcaacctcgcttgatttgcaaatacaaacaaaacttacattatttcttgtagctgcatattgaaaaaagagaaatgaagctcaaccagtcagaagtagccaacaaccttatataaatagaaactgtccaacaaggtaaacagacaaacaaatcaaataaatacttgcttcttacactgtcaatgaagcactcaatatctttccgtctgatattttataatttatcaattgctcttactcaaataaacactttgcaatttcattgtgtctcaaattactttttagcagaataaactaggaataaatattacaaaaatatctacggaatatggaaaaaacatagaaagtttatgaaatatatgaatgtagacataagcaaatagacaatttgtatcatattcttaggcagaaaaactcaatattatcaacatcaattgtccttatagttatttataaattcaattttgttcctatactgataccattaaatattgcaagtacacgttactataaaatgttatatagatgaaaacacaaacaagaatagacaag

SEQ ID NO: 465769 - DNA, 2043 bp, Homo sapiens
ctggagtatgcactggcaatgggtacacagaggacttcaattttatttgtcaatattgtattgcttatttagcacccggtaattccggggcaggcattccaaacctggaccttcatcaccttttgtttcatctcaagacaattctgagggactgttttggagcgtgtctggaaggtgaaccttgaagaagagtgtgggctttgatgtgactcagttgagatctttcatggggaggcaggaattcaatgcccagaatctgggctggtgtctttgaggtcagtaggttgcgtctttgtatccaagtccattgttactaggttggaggctggagattctaaatggcttccagaccatctctctgattctctttgggagatggggtctgaaagacaatgtcagtagttttgggaaattctagaaagtgtgcttggaaacgtgggaagagctcttgcctagtgcctaaatgctccatttgcagctctagccaagtagatacttggtaggtatagagccgggtttgcgtttatatcagcaaaacctatgtcagagttgaagaagtagtcaggaaaaagcgtcttggtcgcaggccggggaacatcttaaaagcaaacttctagcctgctgactcttggcaatgagtgttggatcctggctaaagtgccttgaatgcagcatgaggccaatccatgaatccaacttctcatggagaaatgttaatattttttcagtttgaatcaatcagggtgaaactaccatgctattggtttgcttactttttattatttcatgtaaaatctaagacaaaatacattaaatgcttattgacatatgtatttattcttcaccaggctgataatatctgcctaattttaaactttcttccattttgtaggtttcaacttattctattgtaagatactgttaaatctaatagaggcattgtcacttttacgtataattttattttatttcatatatttcctattggctttttacatttaaattatggagcacttcatcatataaaaaacttcaattatatttaaacagtaagtctttggatttttttgccttgtaatttccatattacataataatgagataaacattaatgttttcagggtactttaaattttagataattactcattgtattcatgtgaaatttgtttttactgcatgtgtgggttggaggactgttttcacttctgattcatctttactcttatctcatcagagctcatacctcttgtagttgggggattgcagtttataattccaataaatggggcaaattcaataataacataatacaaatgagtttgaatgcaggacaggtcttcaaagcatacacaacatgggcctacatatgtacaacaataataatttataagttactgtttggatggaaagtaaaagtacagaaaatttgttaaaggaaattaaaatggagatcatgtctcaataatctctgagcagacaaaattagttaggtctcataagtgatctcaacctcgcttgatttgcaaatacaaacaaaacttacattatttcttgtagctgcatattgaaaaaagagaaatgaagctcaaccagtcagaagtagccaacaaccttatataaatagaaactgtccaacaaggtaaacagacaaacaaaaaacaataaaaaaagttgtgctaccaccaaatgatttctttgtttctacatttttcaaataaatacttgcttcttacactgtcaatgaagcactcaatatctttccgtctgatattttataatttatcaattgctcttactcaaataaacactttgcaatttcaaaaaaaaaagaagacacaacagaaaaaacgacgaaacacaacacaagacagaacagagaagagaaagacagaaaacactgggggcggtccaccagaaagaatagtaaaaccagcagggaggcgccaccgaaatggccggaacgccagaagaggcgaaaggggaatcacaaaaaagcggcgacgcgcgaaaacacaagggggccacgataagagggcaaaa

SEQ ID NO: 465770 - DNA, 2063 bp, Homo sapiens
agttttcccagcaccatttattaaataaggaatcctttccccattgcttgtttttgtcagtttttttcaaagatcggatggtgtagacttttcaggagtgaagaatgaggcaggcattccaaacctggaccttcatcaccttttgtttcatctcaagacaattctgagggactgttttggagcgtgtctggaaggtgaaccttgaagaagagtgtgggctttgatgtgactcagttgagatctttcatggggaggcaggaattcaatgcccagaatctgggctggtgtctttgaggtcagtaggttgcgtctttgtatccaagtccattgttactaggttggaggctggagattctaaatggcttccagaccatctctctgattctctttgggagatggggtctgaaagacaatgtcagtagttttgggaaattctagaaagtgtgcttggaaacgtgggaagagctcttgcctagtgcctaaatgctccatttgcagctctagccaagtagatacttggtaggtatagagccgggtttgcgtttatatcagcaaaacctatgtcagagttgaagaagtagtcaggaaaaagcgtcttggtcgcaggccggggaacatcttaaaagcaaacttctagcctgctgactcttggcaatgagtgttggatcctggctaaagtgccttgaatgcagcatgaggccaatccatgaatccaacttctcatggagaaatgttaatattttttcagtttgaatcaatcagggtgaaactaccatgctattggtttgcttactttttattatttcatgtaaaatctaagacaaaatacattaaatgcttattgacatatgtatttattcttcaccaggctgataatatctgcctaattttaaactttcttccattttgtaggtttcaacttattctattgtaagatactgttaaatctaatagaggcattgtcacttttacgtataattttattttatttcatatatttcctattggctttttacatttaaattatggagcacttcatcatataaaaaacttcaattatatttaaacagtaagtctttggatttttttgccttgtaatttccatattacataataatgagataaacattaatgttttcagggtactttaaattttagataattactcattgtattcatgtgaaatttgtttttactgcatgtgtgggttggaggactgttttcacttctgattcatctttactcttatctcatcagagctcatacctcttgtagttgggggattgcagtttataattccaataaatggggcaaattcaataataacataatacaaatgagtttgaatgcaggacaggtcttcaaagcatacacaacatgggcctacatatgtacaacaataataatttataagttactgtttggatggaaagtaaaagtacagaaaatttgttaaaggaaattaaaatggagatcatgtctcaataatctctgagcagacaaaattagttaggtctcataagtgatctcaacctcgcttgatttgcaaatacaaacaaaacttacattatttcttgtagctgcatattgaaaaaagagaaatgaagctcaaccagtcagaagtagccaacaaccttatataaatagaaactgtccaacaaggtaaacagacaaacaaaaaacaataaaaaaagttgtgctaccaccaaatgatttctttgtttctacatttttcaaataaatacttgcttcttacactgtcaatgaagcactcaatatctttccgtctgatattttataatttatcaattgctcttactcaaataaacactttgcaatttcaaaaaaaaaagaagacacaacagaaaaaacgacgaaacacaacacaagacagaacagagaagagaaagacagaaaacactgggggcggtccaccagaaagaatagtaaaaccagcagggaggcgccaccgaaatggccggaacgccagaagaggcgaaaggggaatcacaaaaaagcggcgacgcgcgaaaacacaagggggccacgataagagggcaaaa

SEQ ID NO: 465771 - DNA, 1817 bp, Homo sapiens
aaatggtccaggctggtaccggcccggagtgttacggattgtctttgaggtcagtaggttgcgtctttgtatccaagtccattgttactaggttggaggctggagattctaaatggcttccagaccatctctctgattctctttgggagatggggtctgaaagacaatgtcagtagttttgggaaattctagaaagtgtgcttggaaacgtgggaagagctcttgcctagtgcctaaatgctccatttgcagctctagccaagtagatacttggtaggtatagagccgggtttgcgtttatatcagcaaaacctatgtcagagttgaagaagtagtcaggaaaaagcgtcttggtcgcaggccggggaacatcttaaaagcaaacttctagcctgctgactcttggcaatgagtgttggatcctggctaaagtgccttgaatgcagcatgaggccaatccatgaatccaacttctcatggagaaatgttaatattttttcagtttgaatcaatcagggtgaaactaccatgctattggtttgcttactttttattatttcatgtaaaatctaagacaaaatacattaaatgcttattgacatatgtatttattcttcaccaggctgataatatctgcctaattttaaactttcttccattttgtaggtttcaacttattctattgtaagatactgttaaatctaatagaggcattgtcacttttacgtataattttattttatttcatatatttcctattggctttttacatttaaattatggagcacttcatcatataaaaaacttcaattatatttaaacagtaagtctttggatttttttgccttgtaatttccatattacataataatgagataaacattaatgttttcagggtactttaaattttagataattactcattgtattcatgtgaaatttgtttttactgcatgtgtgggttggaggactgttttcacttctgattcatctttactcttatctcatcagagctcatacctcttgtagttgggggattgcagtttataattccaataaatggggcaaattcaataataacataatacaaatgagtttgaatgcaggacaggtcttcaaagcatacacaacatgggcctacatatgtacaacaataataatttataagttactgtttggatggaaagtaaaagtacagaaaatttgttaaaggaaattaaaatggagatcatgtctcaataatctctgagcagacaaaattagttaggtctcataagtgatctcaacctcgcttgatttgcaaatacaaacaaaacttacattatttcttgtagctgcatattgaaaaaagagaaatgaagctcaaccagtcagaagtagccaacaaccttatataaatagaaactgtccaacaaggtaaacagacaaacaaaaaacaataaaaaaagttgtgctaccaccaaatgatttctttgtttctacatttttcaaataaatacttgcttcttacactgtcaatgaagcactcaatatctttccgtctgatattttataatttatcaattgctcttactcaaataaacactttgcaatttcaaaaaaaaaagaagacacaacagaaaaaacgacgaaacacaacacaagacagaacagagaagagaaagacagaaaacactgggggcggtccaccagaaagaatagtaaaaccagcagggaggcgccaccgaaatggccggaacgccagaagaggcgaaaggggaatcacaaaaaagcggcgacgcgcgaaaacacaagggggccacgataagagggcaaaa

SEQ ID NO: 465772 - DNA, 2640 bp, Homo sapiens
  misc_feature (2230)..(2230): n is a, c, g, or t
  misc_feature (2232)..(2232): n is a, c, g, or t
atatccacccccattacagtgaggggcacagggcactagacctgttctagaggtccttcagagaagagagaggcctagagatgtgggcagatgaggacttggaataaagcagaatgtgacaatgcactgggctctggagtgtggggcccagaaaaaatactagatttttgggctgtccttgaggtcctcattcagaagtggaagaaaataatgtctctgaatgctgtcacggttggtggaataaaaagttgtgagttgcggaccaagtacgtctactcagatgtgaatcccaaggccttaagctgtcctcgggtttcctcattggctgggggtctatgcagatactcctatgttcctgatctaggaaacagaatttctaatgcagatgtcacctggtgggcagaagtggtgccctcacatctctttgtaatgttctataatgggggtcacttcccagagtggtttagcctttcaatggctattatttctgatcaaaatggaataaaactagaaatgaataacagaagaaaacaaaaatagcaacatatatatggaaattaaacaactcacttttgagcatgctcatgtttaagggtttcattgacactgatgtgggaacagcccaatcaggcgcgcagttggagaggacaggagaggagggcgtggcttctggcgtttggcgggtctttgtctctcgctggcgctggcacaggaacttgggatccgtctcctctttcgcctcctccaccttgggagccccgggctactctttcacagcccctgttgccctgtgatctgtaggtccttggggacgcacagttaaggtgccaggacatcctggaagctgggaaatgatatgtattcatttcctaccaccgtagtggaagagatactatccctatctttacaactgatagcatttccaacagtaagctgtgagattctgcttgaaatcacctctcaaacaaataaaaaacagacctgggagacatgctacactcattctgctgaagaaataggcatcatagctgggaaacggattcacaagacccaggctgttccctacatatgtttcctcctccgacatcagttcatcagtcaatcaagccatgtgagagtggaggccttgtattccctattattcttgggcactctactccaagtaggaaaaggccaggaggtcctgttaaaggatgcactcagagcccgggctccctaacatatgagagtgctaaccagcaggtgtagacttttcaggagtgaagaatgaggcaggcattccaaacctggaccttcatcaccttttgtttcatctcaagacaattctgagggactgttttggagcgtgtctggaaggtgaaccttgaagaagagtgtgggctttgatgtgactcagttgagatctttcatggggaggcaggaattcaatgcccagaatctgggctggtgtctttgaggtcagtaggttgcgtctttgtatccaagtccattgttactaggttggaggctggagattctaaatggcttccagaccatctctctgattctctttgggagatggggtctgaaagacaatgtcagtagttttgggaaattctagaaagtgtgcttggaaacgtgggaagagctcttgcctagtgcctaaatgctccatttgcagctctagccaagtagatacttggtaggtatagagccgggtttgcgtttatatcagcaaaacctatgtcagagttgaagaagtagtcaggaaaaagcgtcttggtcgcaggccggggaacatcttaaaagcaaacttctagcctgctgactcttggcaatgagtgttggatcctggctaaagtgccttgaatgcagcatgaggccaatccatgaatccaacttctcatggagaaatgttaatattttttcagtttgaatcaatcagggtgaaactaccatgctattggtttgcttactttttattatttcatgtaaaatctaagacaaaatacattaaatgcttattgacatatgtatttattcttcaccaggctgataatatctgcctaattttaaactttcttccattttgtaggtttcaacttattctattgtaagatactgttaaatctaatagaggcattgtcacttttacgtataattttattttatttcatatatttcctattggctttttacatttaaattatggagcacttcatcatataaaaaacttcaattatatttaaananaaaaaaagaaaaaaaaaaaaaaaatgttgtgggggcgcccgggccccgggaaaaaagtttttaaaacccactcgcggtggggggcgggggcccccaaggtgttatgggaaacctgggccaacgcgggtcccaagaaaaaaccggggccgaaactaggtggcggggttctccccaataaaaaagcccggggaccggggggtttgaaacgccaaaggcgttcgggccttacgggctttacaccaggggtcaaggaccataaccgccccgggcagggtcaagataacacataatatacagaacaaaaacccctagtaacaacacgaccacagacgcaagaaccacagacagaaccgtactaggacacacggcaacaaaaatcacataaccaacctcagaccacgaccgaat

SEQ ID NO: 465773 - DNA, 798 bp, Homo sapiens
ccttttcatcttttgttgataatgcttggaagacctgtcctgcattcaaattcaataataacataatacaaatgagtttgaatgcaggacaggtcttcaaagcatacacaacatgggcctacatatgtacaacaataataatttataagttactgtttggatggaaagtaaaagtacagaaaatttgttaaaggaaattaaaatggagatcatgtctcaataatctctgagcagacaaaattagttaggtctcataagtgatctcaacctcgcttgatttgcaaatacaaacaaaacttacattatttcttgtagctgcatattgaaaaaagagaaatgaagctcaaccagtcagaagtagccaacaaccttatataaatagaaactgtccaacaaggtaaacagacaaacaaaaaacaataaaaaaagttgtgctaccaccaaatgatttctttgtttctacatttttcaaataaatacttgcttcttacactgtcaatgaagcactcaatatctttccgtctgatattttataatttatcaattgctcttactcaaataaacactttgcaatttcaaaaaaaaaagaagacacaacagaaaaaacgacgaaacacaacacaagacagaacagagaagagaaagacagaaaacactgggggcggtccaccagaaagaatagtaaaaccagcagggaggcgccaccgaaatggccggaacgccagaagaggcgaaaggggaatcacaaaaaagcggcgacgcgcgaaaacacaagggggccacgataagagggcaaaa

SEQ ID NO: 465774 - DNA, 2584 bp, Homo sapiens
atatccacccccattacagtgaggggcacagggcactagacctgttctagaggtccttcagagaagagagaggcctagagatgtgggcagatgaggacttggaataaagcagaatgtgacaatgcactgggctctggagtgtggggcccagaaaaaatactagatttttgggctgtccttgaggtcctcattcagaagtggaagaaaataatgtctctgaatgctgtcacggttggtggaataaaaagttgtgagttgcggaccaagtacgtctactcagatgtgaatcccaaggccttaagctgtcctcgggtttcctcattggctgggggtctatgcagatactcctatgttcctgatctaggaaacagaatttctaatgcagatgtcacctggtgggcagaagtggtgccctcacatctctttgtaatgttctataatgggggtcacttcccagagtggtttagcctttcaatggctattatttctgatcaaaatggaataaaactagaaatgaataacagaagaaaacaaaaatagcaacatatatatggaaattaaacaactcacttttgagcatgctcatgtttaagggtttcattgacactgatgtgggaacagcccaatcaggcgcgcagttggagaggacaggagaggagggcgtggcttctggcgtttggcgggtctttgtctctcgctggcgctggcacaggaacttgggatccgtctcctctttcgcctcctccaccttgggagccccgggctactctttcacagcccctgttgccctgtgatctgtaggtccttggggacgcacagttaaggtgccaggacatcctggaagctgggaaatggtaacttcttagaccaagtctagaaacaatctgaggacaataacaattccattctaaaaagaatctcccaacatttcttctgtctcaacctcaactgcatctgcctgtgaacttccagcttaccaaggctctatatcttctggcagtgacaaaggctccttccatgattggtatatgtattcatttcctaccaccgtagtggaagagatactatccctatctttacaactgatagcatttccaacagtaagctgtgagattctgcttgaaatcacctctcaaacaaataaaaaacagacctgggagacatgctacactcattctgctgaagaaatagggcaagaaagctttctaagaccccgaactccagatatgcgatggggcaaatcctgaagcgtacatggctatctctcacagctaaagcatccctcacccctatccagcgcttcttacccctggcgcaagagaatcacctgcggggaggaaaactttcaaaatcccttaaacccaagttgtaaccgcacaactaaatcagaatccttggagctggatctgaaaaaaatacggttgaaagtcgtgcaggtgattacaatgtgtaggcaaaccagaaaaccatggctttaaccagcagcttttgttagaaatgatttctccaatgaatgtagaaacgtttgctgctgaattgtgacctttccattttacctgcttttcctgcaaagtatattttgcagacccaggcagtgctgctcgctctgttcctggttcacccagtgccgtgtgtgctcagtgcatcctgtgcacgggtcactgtgtgccctggcctgggtgagcatcattcttcggggagaaccttgatgaaaacaaagctgcattccaaaaagttaaaaccgtgctacttactgtactgaggtaaaaattaaaagacctaggggactcttccaaaagttaaaacgtaaataaatatcttgtaacattaatatacacctgacgatgtcctgagtgaacacgccccactttaaaacaaaacaaaacattactattattctaaaatattaatttaggattgttatgcaaatatgtactatttaaatatttattgatgaataacatgcatacagcaatataggaacaaaatatttatggaatgcttgatgaattattactaaataaatacacttgtgtatgtaagaatcagatttgctcatgcccttgacactttctccttcccaaaggtaaccaagaccttaagagctaagtgtagataaactttgtcattttctacacgtgttttattacagaacattaaaaacgtatacataatacaaaaaaaagataacagaccagtcacccagatttaacagctactagtcatgtgtcatttttgtttcacctatacttccagccattcccaccccaatttcattattttttagcctttttggataaaatgtatattcattgcaaggtacaatgtgaactgtaaatagtagagagatggggtttcaccatgttgaccaggctagtcttgaactcctgtcctcaggtgatccacctgcttcggcttcccaaattgctgggattacaggcataagccaatatactcagcctgagaattcatacttctaagaaagtacaaatccatagggcacatgagaactgcaatgtctatctacagtaaatacagtttgatgaataaaatgaaaggcaattgacctaaggtgaaaaaaaaa

SEQ ID NO: 465775 - DNA, 1530 bp, Homo sapiens
acaccactgcactccagcctcactgacagaacaaaactctgactcaaaaaactgatctctggaaaggcattttctttttctgtaacgtagccaaatagctaaatttgtattgaagccatcctttaatttttaacaggggcaagaaagctttctaagaccccgaactccagatatgcgatggggcaaatcctgaagcgtacatggctatctctcacagctaaagcatccctcacccctatccagcgcttcttacccctggcgcaagagaatcacctgcggggaggaaaactttcaaaatcccttaaacccaagttgtaaccgcacaactaaatcagaatccttggagctggatctgaaaaaaatacggttgaaagtcgtgcaggtgattacaatgtgtaggcaaaccagaaaaccatggctttaaccagcagcttttgttagaaatgatttctccaatgaatgtagaaacgtttgctgctgaattgtgacctttccattttacctgcttttcctgcaaagtatattttgcagacccaggcagtgctgctcgctctgttcctggttcacccagtgccgtgtgtgctcagtgcatcctgtgcacgggtcactgtgtgccctggcctgggtgagcatcattcttcggggagaaccttgatgaaaacaaagctgcattccaaaaagttaaaaccgtgctacttactgtactgaggtaaaaattaaaagacctaggggactcttccaaaagttaaaacgtaaataaatatcttgtaacattaatatacacctgacgatgtcctgagtgaacacgccccactttaaaacaaaacaaaacattactattattctaaaatattaatttaggattgttatgcaaatatgtactatttaaatatttattgatgaataacatgcatacagcaatataggaacaaaatatttatggaatgcttgatgaattattactaaataaatacacttgtgtatgtaagaatcagatttgctcatgcccttgacactttctccttcccaaaggtaaccaagaccttaagagctaagtgtagataaactttgtcattttctacacgtgttttattacagaacattaaaaacgtatacataatacaaaaaaaagataacagaccagtcacccagatttaacagctactagtcatgtgtcatttttgtttcacctatacttccagccattcccaccccaatttcattattttttagcctttttggataaaatgtatattcattgcaaggtacaatgtgaactgtaaatagtagagagatggggtttcaccatgttgaccaggctagtcttgaactcctgtcctcaggtgatccacctgcttcggcttcccaaattgctgggattacaggcataagccaatatactcagcctgagaattcatacttctaagaaagtacaaatccatagggcacatgagaactgcaatgtctatctacagtaaatacagtttgatgaataaaatgaaaggcaattgacctaaggtgaaaaaaaaa

SEQ ID NO: 465776 - DNA, 2529 bp, Homo sapiens
atatccacccccattacagtgaggggcacagggcactagacctgttctagaggtccttcagagaagagagaggcctagagatgtgggcagatgaggacttggaataaagcagaatgtgacaatgcactgggctctggagtgtggggcccagaaaaaatactagatttttgggctgtccttgaggtcctcattcagaagtggaagaaaataatgtctctgaatgctgtcacggttggtggaataaaaagttgtgagttgcggaccaagtacgtctactcagatgtgaatcccaaggccttaagctgtcctcgggtttcctcattggctgggggtctatgcagatactcctatgttcctgatctaggaaacagaatttctaatgcagatgtcacctggtgggcagaagtggtgccctcacatctctttgtaatgttctataatgggggtcacttcccagagtggtttagcctttcaatggctattatttctgatcaaaatggaataaaactagaaatgaataacagaagaaaacaaaaatagcaacatatatatggaaattaaacaactcacttttgagcatgctcatgtttaagggtttcattgacactgatgtgggaacagcccaatcaggcgcgcagttggagaggacaggagaggagggcgtggcttctggcgtttggcgggtctttgtctctcgctggcgctggcacaggaacttgggatccgtctcctctttcgcctcctccaccttgggagccccgggctactctttcacagcccctgttgccctgtgatctgtaggtccttggggacgcacagttaaggtgccaggacatcctggaagctgggaaatggtaacttcttagaccaagtctagaaacaatctgaggacaataacaattccattctaaaaagaatctcccaacatttcttctgtctcaacctcaactgcatctgcctgtgaacttccagcttaccaaggctctatatcttctggcagtgacaaaggctccttccatgattggtatatgtattcatttcctaccaccgtagtggaagagatactatccctatctttacaactgatagcatttccaacagtaagctgtgagattctgcttgaaatcacctctcaaacaaataaaaaacagacctgggagacatgctacactcattctgctgaagaaatagggcaagaaagctttctaagaccccgaactccagatatgcgatggggcaaatcctgaagcgtacatggctatctctcacagctaaagcatccctcacccctatccagcgcttcttacccctggcgcaagagaatcacctgcggggaggaaaactttcaaaatcccttaaacccaagttgtaaccgcacaactaaatcagaatccttggagctggatctgaaaaaaatacggttgaaagtcgtgcaggtgattacaatgtgtaggcaaaccagagaaacgtttgctgctgaattgtgacctttccattttacctgcttttcctgcaaagtatattttgcagacccaggcagtgctgctcgctctgttcctggttcacccagtgccgtgtgtgctcagtgcatcctgtgcacgggtcactgtgtgccctggcctgggtgagcatcattcttcggggagaaccttgatgaaaacaaagctgcattccaaaaagttaaaaccgtgctacttactgtactgaggtaaaaattaaaagacctaggggactcttccaaaagttaaaacgtaaataaatatcttgtaacattaatatacacctgacgatgtcctgagtgaacacgccccactttaaaacaaaacaaaacattactattattctaaaatattaatttaggattgttatgcaaatatgtactatttaaatatttattgatgaataacatgcatacagcaatataggaacaaaatatttatggaatgcttgatgaattattactaaataaatacacttgtgtatgtaagaatcagatttgctcatgcccttgacactttctccttcccaaaggtaaccaagaccttaagagctaagtgtagataaactttgtcattttctacacgtgttttattacagaacattaaaaacgtatacataatacaaaaaaaagataacagaccagtcacccagatttaacagctactagtcatgtgtcatttttgtttcacctatacttccagccattcccaccccaatttcattattttttagcctttttggataaaatgtatattcattgcaaggtacaatgtgaactgtaaatagtagagagatggggtttcaccatgttgaccaggctagtcttgaactcctgtcctcaggtgatccacctgcttcggcttcccaaattgctgggattacaggcataagccaatatactcagcctgagaattcatacttctaagaaagtacaaatccatagggcacatgagaactgcaatgtctatctacagtaaatacagtttgatgaataaaatgaaaggcaattgacctaaggtgaaaaaaaaa

SEQ ID NO: 465777 - DNA, 1973 bp, Homo sapiens
atatccacccccattacagtgaggggcacagggcactagacctgttctagaggtccttcagagaagagagaggcctagagatgtgggcagatgaggacttggaataaagcagaatgtgacaatgcactgggctctggagtgtggggcccagaaaaaatactagatttttgggctgtccttgaggtcctcattcagaagtggaagaaaataatgtctctgaatgctgtcacggttggtggaataaaaagttgtgagttgcggaccaagtacgtctactcagatgtgaatcccaaggccttaagctgtcctcgggtttcctcattggctgggggtctatgcagatactcctatgttcctgatctaggaaacagaatttctaatgcagatgtcacctggtgggcagaagtggtgccctcacatctctttgtaatgttctataatgggggtcacttcccagagtggtttagcctttcaatggctattatttctgatcaaaatggaataaaactagaaatgaataacagaagaaaacaaaaatagcaacatatatatggaaattaaacaactcacttttgagcatgctcatgtttaagggtttcattgacactgatgtgggaacagcccaatcaggcgcgcagttggagaggacaggagaggagggcgtggcttctggcgtttggcgggtctttgtctctcgctggcgctggcacaggaacttgggatccgtctcctctttcgcctcctccaccttgggagccccgggctactctttcacagcccctgttgccctgtgatctgtaggtccttggggacgcacagttaaggtgccaggacatcctggaagctgggaaatggtaacttcttagaccaagtctagaaacaatctgaggacaataacaattccattctaaaaagaatctcccaacatttcttctgtctcaacctcaactgcatctgcctgtgaacttccagcttaccaaggctctatatcttctggcagtgacaaaggctccttccatgattggtgtgagtaggcttggacacctgcagggcagacacccaggaataatcaactgagccttcagtggtcctcttttgctgggtcaagatatgtattcatttcctaccaccgtagtggaagagatactatccctatctttacaactgatagcatttccaacagtaagctgtgagattctgcttgaaatcacctctcaaacaaataaaaaacagacctgggagacatgctacactcattctgctgaagaaatagctgcatattgaaaaaagagaaatgaagctcaaccagtcagaagtagccaacaaccttatataaatagaaactgtccaacaaggtaaacagacaaacaaaaaacaataaaaaaagttgtgctaccaccaaatgatttctttgtttctacatttttcaaataaatacttgcttcttacactgtcaatgaagcactcaatatctttccgtctgatattttataatttatcaattgctcttactcaaataaacactttgcaatttcaaaaaaaataatgtaaaataagaagaaatgtataagctgaatctgcaaaaacatgtgttgctgaagagatccactgtacaatgtgacaaatcacttcatacaccgtcttgaatacacataatgcacagttgcacctcttagtgaaatctctggtgatatggctgtctgctgctcgtatcatgatcctgagagaaacgaatgcttcttgcatcaccaatatgacatcctaaatctccaccgagtggttagaccagacgttgatgtgatgaacactgctttacatgacagttaagacacatgatagattaactacttatctgaaatcggcagaagacattcttacttttatgcataggcactcaaattgtttgctaaaggtctaaaggtgacaatactgaacgtttaacaaccgttgataaaaacgtctacagggtagca

SEQ ID NO: 465778 - DNA, 1610 bp, Homo sapiens
  misc_feature (1200)..(1200): n is a, c, g, or t
  misc_feature (1202)..(1202): n is a, c, g, or t
atatccacccccattacagtgaggggcacagggcactagacctgttctagaggtccttcagagaagagagaggcctagagatgtgggcagatgaggacttggaataaagcagaatgtgacaatgcactgggctctggagtgtggggcccagaaaaaatactagatttttgggctgtccttgaggtcctcattcagaagtggaagaaaataatgtctctgaatgctgtcacggttggtggaataaaaagttgtgagttgcggaccaagtacgtctactcagatgtgaatcccaaggccttaagctgtcctcgggtttcctcattggctgggggtctatgcagatactcctatgttcctgatctaggaaacagaatttctaatgcagatgtcacctggtgggcagaagtggtgccctcacatctctttgtaatgttctataatgggggtcacttcccagagtggtttagcctttcaatggctattatttctgatcaaaatggaataaaactagaaatgaataacagaagaaaacaaaaatagcaacatatatatggaaattaaacaactcacttttgagcatgctcatgtttaagggtttcattgacactgatgtgggaacagcccaatcaggcgcgcagttggagaggacaggagaggagggcgtggcttctggcgtttggcgggtctttgtctctcgctggcgctggcacaggaacttgggatccgtctcctctttcgcctcctccaccttgggagccccgggctactctttcacagcccctgttgccctgtgatctgtaggtccttggggacgcacagttaaggtgccaggacatcctggaagctgggaaatgatatgtattcatttcctaccaccgtagtggaagagatactatccctatctttacaactgatagcatttccaacagtaagctgtgagattctgcttgaaatcacctctcaaacaaataaaaaacagacctgggagacatgctacactcattctgctgaagaaatagctgcatattgaaaaaagagaaatgaagctcaaccagtcagaagtagccaacaaccttatataaatagaaactgtccaacaaggtaaacagacaaacaaaaaacaataaaaaaagttgtgctaccaccaaatgatttctttgtttctacatttttcaaataaatacttgcttcttacactgnanaaaaaaagaaaaaaaaaaaaaaaatgttgtgggggcgcccgggccccgggaaaaaagtttttaaaacccactcgcggtggggggcgggggcccccaaggtgttatgggaaacctgggccaacgcgggtcccaagaaaaaaccggggccgaaactaggtggcggggttctccccaataaaaaagcccggggaccggggggtttgaaacgccaaaggcgttcgggccttacgggctttacaccaggggtcaaggaccataaccgccccgggcagggtcaagataacacataatatacagaacaaaaacccctagtaacaacacgaccacagacgcaagaaccacagacagaaccgtactaggacacacggcaacaaaaatcacataaccaacctcagaccacgaccgaat

SEQ ID NO: 465779 - DNA, 1505 bp, Homo sapiens
atatccacccccattacagtgaggggcacagggcactagacctgttctagaggtccttcagagaagagagaggcctagagatgtgggcagatgaggacttggaataaagcagaatgtgacaatgcactgggctctggagtgtggggcccagaaaaaatactagatttttgggctgtccttgaggtcctcattcagaagtggaagaaaataatgtctctgaatgctgtcacggttggtggaataaaaagttgtgagttgcggaccaagtacgtctactcagatgtgaatcccaaggccttaagctgtcctcgggtttcctcattggctgggggtctatgcagatactcctatgttcctgatctaggaaacagaatttctaatgcagatgtcacctggtgggcagaagtggtgccctcacatctctttgtaatgttctataatgggggtcacttcccagagtggtttagcctttcaatggctattatttctgatcaaaatggaataaaactagaaatgaataacagaagaaaacaaaaatagcaacatatatatggaaattaaacaactcacttttgagcatgctcatgtttaagggtttcattgacactgatgtgggaacagcccaatcaggcgcgcagttggagaggacaggagaggagggcgtggcttctggcgtttggcgggtctttgtctctcgctggcgctggcacaggaacttgggatccgtctcctctttcgcctcctccaccttgggagccccgggctactctttcacagcccctgttgccctgtgatctgtaggtccttggggacgcacagttaaggtgccaggacatcctggaagctgggaaatggtgagtatacggggttcggcatcccgagaggggagagcaggctgtgaaaccggcaggaccggcccccacggttagctccgagtctcccgcagcttggccctcagtcccctgtggctgcaagatggccgctgggccagcatcgaggacccccacatccggcctggcccatccggtgctgtccctgggcagcgccctgctctgcgcccacagccatgagtatttcccagattgttcagggaggcctggtgggtcatcagggaaaaactgccactgggtgtttgcgtgggaggagctgcggcccgtggggtccccagtctctcttgttaaaaattaacgggagtctatgttaaaacgttaaccagtttatctgaacaaacagtgattggtgaaatggaaagcacccagccatgatttctggtccaccagaggggcataaaggaaaggctttcataagatgcatgagaaagcagcccaaattcaaaaattggttccagttatgtagtcaccttatttgaactatccagatggaaatgtcctggttacatattcagaggttaattgcatgtttgccattggttaaacgtgcattttgtttcaggctaagataatgctttataggaaatgtatttgagttaggttttagtttttgtt

SEQ ID NO: 465780 - DNA, 370 bp, Homo sapiens
cgttgctgcaaaggaggttttttttgtttgtttttgctaagtagtattgctgtacatgtgacactttttaaattcaatttaccatcaataggctggacatggtggctgatgcctgtaatcccagtgctgtgggaggccaaggcgggtggatcatgaggtcaggagatcgagaccatcctggacaacgtaatgaaaccccgtctgtactggaaatacaaaagttagccaggcttggtggcatgcgcctatagtcccagctactcgggtggctgaggaaggaggattgcttgaacctgggaagtggagattgtagtgagttgagatcgtgccactgcactccagcctgggcaacagagtgagacgtcatctc

SEQ ID NO: 465781 - DNA, 2217 bp, Homo sapiens
atatccacccccattacagtgaggggcacagggcactagacctgttctagaggtccttcagagaagagagaggcctagagatgtgggcagatgaggacttggaataaagcagaatgtgacaatgcactgggctctggagtgtggggcccagaaaaaatactagatttttgggctgtccttgaggtcctcattcagaagtggaagaaaataatgtctctgaatgctgtcacggttggtggaataaaaagttgtgagttgcggaccaagtacgtctactcagatgtgaatcccaaggccttaagctgtcctcgggtttcctcattggctgggggtctatgcagatactcctatgttcctgatctaggaaacagaatttctaatgcagatgtcacctggtgggcagaagtggtgccctcacatctctttgtaatgttctataatgggggtcacttcccagagtggtttagcctttcaatggctattatttctgatcaaaatggaataaaactagaaatgaataacagaagaaaacaaaaatagcaacatatatatggaaattaaacaactcacttttgagcatgctcatgtttaagggtttcattgacactgatgtgggaacagcccaatcaggcgcgcagttggagaggacaggagaggagggcgtggcttctggcgtttggcgggtctttgtctctcgctggcgctggcacaggaacttgggatccgtctcctctttcgcctcctccaccttgggagccccgggctactctttcacagcccctgttgccctgtgatctgtaggtccttggggacgcacagttaaggtgccaggacatcctggaagctgggaaatgatttcttccagaccatggctggagaaggaaagaaggtgtgttttgcctgattcagggactatagagagaaccaagttctgcaggcctgtcacctaagtctcagatgagtatgaattcttttgtgtttttcacagatttttgcagtggcaggaccaagttcaaatgagtcatagccaagtctacagtaagatgtggtagtattctgttttgaaccgaggaccatgattggcaagcttgccacttggtcaagtgcttaccctctaaagatgtcttccttggtctttgcctccagctgggtgtcacaaactctgaactggattctaaggctttcatgaatgcacttatgtttcctgtggcagctgcattatgttgtgggggatgtgcatgccgaacctcccattctgtcgtcttgcttatgttactctcctttatgtttcactttctcaaatgaatgtcaagctggtgatttttagattcaaaaattctaaaataaattgctcaaatttccacattatgtaagctattaataaaatgtcttgtaggtgctacatattcattaaaatttttggttgtaattttaagctcactgcaggcagaaaggaatcattaacatttatattcttttttttagtctgtatctaaatgatggtatattttaattccagatatttactttatactgcagtaatgctcgtcatattttgcaaaatttatgttgttcttttatttggaaatataaggcttttttagctcctgaaatctatattatagtcatataattttattatgttttgtggtaagaagtgcagcaacatattgagaacataataaaattatcctgtatttttaatgattatttattaaattcctctcattagagcctgttattaatgattgtaatgtattttctgtataattttactgcaatttattaaattctaatgacttaaattgtctgcttttcatgagtgcacacagttgaatgctgtagatatctaaagaattatttttcggccggttgtggtggctcatgcctgtattcccagcaccttgggaggccaaggcgggtggatcacgaggtcaggagatcgagacaaccctgactaacatggtgaaaccccgtctctactaaatatacaaaaaattaaccgggcatagtggcaggcgcctgtatccccagctactcaggaggctgaggcaggagaatggcgtgaactcagtggacagagtttgcagtgagccgagatcgcgccactgcactccagcctgggcaacagggcaagactctgtctcaaaaaaaaaataaaaaaaaaaacggttattttccattgtaaatctatgttgtattcaggattttatgcac

SEQ ID NO: 465782 - DNA, 3442 bp, Homo sapiens
atatccacccccattacagtgaggggcacagggcactagacctgttctagaggtccttcagagaagagagaggcctagagatgtgggcagatgaggacttggaataaagcagaatgtgacaatgcactgggctctggagtgtggggcccagaaaaaatactagatttttgggctgtccttgaggtcctcattcagaagtggaagaaaataatgtctctgaatgctgtcacggttggtggaataaaaagttgtgagttgcggaccaagtacgtctactcagatgtgaatcccaaggccttaagctgtcctcgggtttcctcattggctgggggtctatgcagatactcctatgttcctgatctaggaaacagaatttctaatgcagatgtcacctggtgggcagaagtggtgccctcacatctctttgtaatgttctataatgggggtcacttcccagagtggtttagcctttcaatggctattatttctgatcaaaatggaataaaactagaaatgaataacagaagaaaacaaaaatagcaacatatatatggaaattaaacaactcacttttgagcatgctcatgtttaagggtttcattgacactgatgtgggaacagcccaatcaggcgcgcagttggagaggacaggagaggagggcgtggcttctggcgtttggcgggtctttgtctctcgctggcgctggcacaggaacttgggatccgtctcctctttcgcctcctccaccttgggagccccgggctactctttcacagcccctgttgccctgtgatctgtaggtccttggggacgcacagttaaggtgccaggacatcctggaagctgggaaatgatatgtattcatttcctaccaccgtagtggaagagatactatccctatctttacaactgatagcatttccaacagtaagctgtgagattctgcttgaaatcacctctcaaacaaataaaaaacagacctgggagacatgctacactcattctgctgaagaaataggcatcatagctgggaaacggattcacaagacccaggctgttccctacatatgtttcctcctccgacatcagttcatcagtcaatcaagccatgtgagagtggaggccttgtattccctattattcttgggcactctactccaagtaggaaaaggccaggaggtcctgttaaaggatgcactcagagcccgggctccctaacatatgagagtgctaaccagcaggtgtagacttttcaggagtgaagaatgaggcaggcattccaaacctggaccttcatcaccttttgtttcatctcaagacaattctgagggactgttttggagcgtgtctggaaggtgaaccttgaagaagagtgtgggctttgatgtgactcagttgagatctttcatggggaggcaggaattcaatgcccagaatctgggctggtgtctttgaggtcagtaggttgcgtctttgtatccaagtccattgttactaggttggaggctggagattctaaatggcttccagaccatctctctgattctctttgggagatggggtctgaaagacaatgtcagtagttttgggaaattctagaaagtgtgcttggaaacgtgggaagagctcttgcctagtgcctaaatgctccatttgcagctctagccaagtagatacttggtaggtatagagccgggtttgcgtttatatcagcaaaacctatgtcagagttgaagaagtagtcaggaaaaagcgtcttggtcgcaggccggggaacatcttaaaagcaaacttctagcctgctgactcttggcaatgagtgttggatcctggctaaagtgccttgaatgcagcatgaggccaatccatgaatccaacttctcatggagaaatgttaatattttttcagtttgaatcaatcagggtgaaactaccatgctattggtttgcttactttttattatttcatgtaaaatctaagacaaaatacattaaatgcttattgacatatgtatttattcttcaccaggctgataatatctgcctaattttaaactttcttccattttgtaggtttcaacttattctattgtaagatactgttaaatctaatagaggcattgtcacttttacgtataattttattttatttcatatatttcctattggctttttacatttaaattatggagcacttcatcatataaaaaacttcaattatatttaaacagtaagtctttggatttttttgccttgtaatttccatattacataataatgagataaacattaatgttttcagggtactttaaattttagataattactcattgtattcatgtgaaatttgtttttactgcatgtgtgggttggaggactgttttcacttctgattcatctttactcttatctcatcagagctcatacctcttgtagttgggggattgcagtttataattccaataaatggggcaaattcaataataacataatacaaatgagtttgaatgcaggacaggtcttcaaagcatacacaacatgggcctacatatgtacaacaataataatttataagttactgtttggatggaaagtaaaagtacagaaaatttgttaaaggaaattaaaatggagatcatgtctcaataatctctgagcagacaaaattagttaggtctcataagtgatctcaacctcgcttgatttgcaaatacaaacaaaacttacattatttcttgtagctgcatattgaaaaaagagaaatgaagctcaaccagtcagaagtagccaacaaccttatataaatagaaactgtccaacaaggtaaacagacaaacaaaaaacaataaaaaaagttgtgctaccaccaaatgatttctttgtttctacatttttcaaataaatacttgcttcttacactgtcaatgaagcactcaatatctttccgtctgatattttataatttatcaattgctcttactcaaataaacactttgcaatttcaaaaaaaataatgtaaaataagaagaaatgtataagctgaatctgcaaaaacatgtgttgctgaagagatccactgtacaatgtgacaaatcacttcatacaccgtcttgaatacacataatgcacagttgcacctcttagtgaaatctctggtgatatggctgtctgctgctcgtatcatgatcctgagagaaacgaatgcttcttgcatcaccaatatgacatcctaaatctccaccgagtggttagaccagacgttgatgtgatgaacactgctttacatgacagttaagacacatgatagattaactacttatctgaaatcggcagaagacattcttacttttatgcataggcactcaaattgtttgctaaaggtctaaaggtgacaatactgaacgtttaacaaccgttgataaaaacgtctacagggtagca

SEQ ID NO: 465783 - DNA, 3380 bp, Homo sapiens
atatccacccccattacagtgaggggcacagggcactagacctgttctagaggtccttcagagaagagagaggcctagagatgtgggcagatgaggacttggaataaagcagaatgtgacaatgcactgggctctggagtgtggggcccagaaaaaatactagatttttgggctgtccttgaggtcctcattcagaagtggaagaaaataatgtctctgaatgctgtcacggttggtggaataaaaagttgtgagttgcggaccaagtacgtctactcagatgtgaatcccaaggccttaagctgtcctcgggtttcctcattggctgggggtctatgcagatactcctatgttcctgatctaggaaacagaatttctaatgcagatgtcacctggtgggcagaagtggtgccctcacatctctttgtaatgttctataatgggggtcacttcccagagtggtttagcctttcaatggctattatttctgatcaaaatggaataaaactagaaatgaataacagaagaaaacaaaaatagcaacatatatatggaaattaaacaactcacttttgagcatgctcatgtttaagggtttcattgacactgatgtgggaacagcccaatcaggcgcgcagttggagaggacaggagaggagggcgtggcttctggcgtttggcgggtctttgtctctcgctggcgctggcacaggaacttgggatccgtctcctctttcgcctcctccaccttgggagccccgggctactctttcacagcccctgttgccctgtgatctgtaggtccttggggacgcacagttaaggtgccaggacatcctggaagctgggaaatggctgaatgctatcccagtgaatatacgtgccctgtttgttgaatctactcatccttaaaggctggacatggtggctgatgcctgtaatcccagtgctgtgggaggccaaggcgggtggatcatgaggtcaggagatcgagaccatcctggacaacatatgtattcatttcctaccaccgtagtggaagagatactatccctatctttacaactgatagcatttccaacagtaagctgtgagattctgcttgaaatcacctctcaaacaaataaaaaacagacctgggagacatgctacactcattctgctgaagaaataggcatcatagctgggaaacggattcacaagacccaggctgttccctacatatgtttcctcctccgacatcagttcatcagtcaatcaagccatgtgagagtggaggccttgtattccctattattcttgggcactctactccaagtaggaaaaggccaggaggtcctgttaaaggatgcactcagagcccgggctccctaacatatgagagtgctaaccagcaggtgtagacttttcaggagtgaagaatgaggcaggcattccaaacctggaccttcatcaccttttgtttcatctcaagacaattctgagggactgttttggagcgtgtctggaaggtgaaccttgaagaagagtgtgggctttgatgtgactcagttgagatctttcatggggaggcaggaattcaatgcccagaatctgggctggtgtctttgaggtcagtaggttgcgtctttgtatccaagtccattgttactaggttggaggctggagattctaaatggcttccagaccatctctctgattctctttgggagatggggtctgaaagacaatgtcagtagttttgggaaattctagaaagtgtgcttggaaacgtgggaagagctcttgcctagtgcctaaatgctccatttgcagctctagccaagtagatacttggtaggtatagagccgggtttgcgtttatatcagcaaaacctatgtcagagttgaagaagtagtcaggaaaaagcgtcttggtcgcaggccggggaacatcttaaaagcaaacttctagcctgctgactcttggcaatgagtgttggatcctggctaaagtgccttgaatgcagcatgaggccaatccatgaatccaacttctcatggagaaatgttaatattttttcagtttgaatcaatcagggtgaaactaccatgctattggtttgcttactttttattatttcatgtaaaatctaagacaaaatacattaaatgcttattgacatatgtatttattcttcaccaggctgataatatctgcctaattttaaactttcttccattttgtaggtttcaacttattctattgtaagatactgttaaatctaatagaggcattgtcacttttacgtataattttattttatttcatatatttcctattggctttttacatttaaattatggagcacttcatcatataaaaaacttcaattatatttaaacagtaagtctttggatttttttgccttgtaatttccatattacataataatgagataaacattaatgttttcagggtactttaaattttagataattactcattgtattcatgtgaaatttgtttttactgcatgtgtgggttggaggactgttttcacttctgattcatctttactcttatctcatcagagctcatacctcttgtagttgggggattgcagtttataattccaataaatggggcaaattcaataataacataatacaaatgagtttgaatgcaggacaggtcttcaaagcatacacaacatgggcctacatatgtacaacaataataatttataagttactgtttggatggaaagtaaaagtacagaaaatttgttaaaggaaattaaaatggagatcatgtctcaataatctctgagcagacaaaattagttaggtctcataagtgatctcaacctcgcttgatttgcaaatacaaacaaaacttacattatttcttgtagctgcatattgaaaaaagagaaatgaagctcaaccagtcagaagtagccaacaaccttatataaatagaaactgtccaacaaggtaaacagacaaacaaaaaacaataaaaaaagttgtgctaccaccaaatgatttctttgtttctacatttttcaaataaatacttgcttcttacactgtcaatgaagcactcaatatctttccgtctgatattttataatttatcaattgctcttactcaaataaacactttgcaatttcaaaaaaaaaagaagacacaacagaaaaaacgacgaaacacaacacaagacagaacagagaagagaaagacagaaaacactgggggcggtccaccagaaagaatagtaaaaccagcagggaggcgccaccgaaatggccggaacgccagaagaggcgaaaggggaatcacaaaaaagcggcgacgcgcgaaaacacaagggggccacgataagagggcaaaa

SEQ ID NO: 465784 - DNA, 2412 bp, Homo sapiens
atatccacccccattacagtgaggggcacagggcactagacctgttctagaggtccttcagagaagagagaggcctagagatgtgggcagatgaggacttggaataaagcagaatgtgacaatgcactgggctctggagtgtggggcccagaaaaaatactagatttttgggctgtccttgaggtcctcattcagaagtggaagaaaataatgtctctgaatgctgtcacggttggtggaataaaaagttgtgagttgcggaccaagtacgtctactcagatgtgaatcccaaggccttaagctgtcctcgggtttcctcattggctgggggtctatgcagatactcctatgttcctgatctaggaaacagaatttctaatgcagatgtcacctggtgggcagaagtggtgccctcacatctctttgtaatgttctataatgggggtcacttcccagagtggtttagcctttcaatggctattatttctgatcaaaatggaataaaactagaaatgaataacagaagaaaacaaaaatagcaacatatatatggaaattaaacaactcacttttgagcatgctcatgtttaagggtttcattgacactgatgtgggaacagcccaatcaggcgcgcagttggagaggacaggagaggagggcgtggcttctggcgtttggcgggtctttgtctctcgctggcgctggcacaggaacttgggatccgtctcctctttcgcctcctccaccttgggagccccgggctactctttcacagcccctgttgccctgtgatctgtaggtccttggggacgcacagttaaggtgccaggacatcctggaagctgggaaatgatatgtattcatttcctaccaccgtagtggaagagatactatccctatctttacaactgatagcatttccaacagtaagctgtgagattctgcttgaaatcacctctcaaacaaataaaaaacagacctgggagacatgctacactcattctgctgaagaaatagggcaagaaagctttctaagaccccgaactccagatatgcgatggggcaaatcctgaagcgtacatggctatctctcacagctaaagcatccctcacccctatccagcgcttcttacccctggcgcaagagaatcacctgcggggaggaaaactttcaaaatcccttaaacccaagttgtaaccgcacaactaaatcagaatccttggagctggatctgaaaaaaatacggttgaaagtcgtgcaggtgattacaatgtgtaggcaaaccagaaaaccatggctttaaccagcagcttttgttagaaatgatttctccaatgaatgtagaaacgtttgctgctgaattgtgacctttccattttacctgcttttcctgcaaagtatattttgcagacccaggcagtgctgctcgctctgttcctggttcacccagtgccgtgtgtgctcagtgcatcctgtgcacgggtcactgtgtgccctggcctgggtgagcatcattcttcggggagaaccttgatgaaaacaaagctgcattccaaaaagttaaaaccgtgctacttactgtactgaggtaaaaattaaaagacctaggggactcttccaaaagttaaaacgtaaataaatatcttgtaacattaatatacacctgacgatgtcctgagtgaacacgccccactttaaaacaaaacaaaacattactattattctaaaatattaatttaggattgttatgcaaatatgtactatttaaatatttattgatgaataacatgcatacagcaatataggaacaaaatatttatggaatgcttgatgaattattactaaataaatacacttgtgtatgtaagaatcagatttgctcatgcccttgacactttctccttcccaaaggtaaccaagaccttaagagctaagtgtagataaactttgtcattttctacacgtgttttattacagaacattaaaaacgtatacataatacaaaaaaaagataacagaccagtcacccagatttaacagctactagtcatgtgtcatttttgtttcacctatacttccagccattcccaccccaatttcattattttttagcctttttggataaaatgtatattcattgcaaggtacaatgtgaactgtaaatagtagagagatggggtttcaccatgttgaccaggctagtcttgaactcctgtcctcaggtgatccacctgcttcggcttcccaaattgctgggattacaggcataagccaatatactcagcctgagaattcatacttctaagaaagtacaaatccatagggcacatgagaactgcaatgtctatctacagtaaatacagtttgatgaataaaatgaaaggcaattgacctaaggtgaaaaaaaaa

SEQ ID NO: 465785 - DNA, 2537 bp, Homo sapiens
atatccacccccattacagtgaggggcacagggcactagacctgttctagaggtccttcagagaagagagaggcctagagatgtgggcagatgaggacttggaataaagcagaatgtgacaatgcactgggctctggagtgtggggcccagaaaaaatactagatttttgggctgtccttgaggtcctcattcagaagtggaagaaaataatgtctctgaatgctgtcacggttggtggaataaaaagttgtgagttgcggaccaagtacgtctactcagatgtgaatcccaaggccttaagctgtcctcgggtttcctcattggctgggggtctatgcagatactcctatgttcctgatctaggaaacagaatttctaatgcagatgtcacctggtgggcagaagtggtgccctcacatctctttgtaatgttctataatgggggtcacttcccagagtggtttagcctttcaatggctattatttctgatcaaaatggaataaaactagaaatgaataacagaagaaaacaaaaatagcaacatatatatggaaattaaacaactcacttttgagcatgctcatgtttaagggtttcattgacactgatgtgggaacagcccaatcaggcgcgcagttggagaggacaggagaggagggcgtggcttctggcgtttggcgggtctttgtctctcgctggcgctggcacaggaacttgggatccgtctcctctttcgcctcctccaccttgggagccccgggctactctttcacagcccctgttgccctgtgatctgtaggtccttggggacgcacagttaaggtgccaggacatcctggaagctgggaaatggtaacttcttagaccaagtctagaaacaatctgaggacaataacaattccattctaaaaagaatctcccaacatttcttctgtctcaacctcaactgcatctgcctgtgaacttccagcttaccaaggctctatatcttctggcagtgacaaaggctccttccatgattggtatatgtattcatttcctaccaccgtagtggaagagatactatccctatctttacaactgatagcatttccaacagtaagctgtgagattctgcttgaaatcacctctcaaacaaataaggcaagaaagctttctaagaccccgaactccagatatgcgatggggcaaatcctgaagcgtacatggctatctctcacagctaaagcatccctcacccctatccagcgcttcttacccctggcgcaagagaatcacctgcggggaggaaaactttcaaaatcccttaaacccaagttgtaaccgcacaactaaatcagaatccttggagctggatctgaaaaaaatacggttgaaagtcgtgcaggtgattacaatgtgtaggcaaaccagaaaaccatggctttaaccagcagcttttgttagaaatgatttctccaatgaatgtagaaacgtttgctgctgaattgtgacctttccattttacctgcttttcctgcaaagtatattttgcagacccaggcagtgctgctcgctctgttcctggttcacccagtgccgtgtgtgctcagtgcatcctgtgcacgggtcactgtgtgccctggcctgggtgagcatcattcttcggggagaaccttgatgaaaacaaagctgcattccaaaaagttaaaaccgtgctacttactgtactgaggtaaaaattaaaagacctaggggactcttccaaaagttaaaacgtaaataaatatcttgtaacattaatatacacctgacgatgtcctgagtgaacacgccccactttaaaacaaaacaaaacattactattattctaaaatattaatttaggattgttatgcaaatatgtactatttaaatatttattgatgaataacatgcatacagcaatataggaacaaaatatttatggaatgcttgatgaattattactaaataaatacacttgtgtatgtaagaatcagatttgctcatgcccttgacactttctccttcccaaaggtaaccaagaccttaagagctaagtgtagataaactttgtcattttctacacgtgttttattacagaacattaaaaacgtatacataatacaaaaaaaagataacagaccagtcacccagatttaacagctactagtcatgtgtcatttttgtttcacctatacttccagccattcccaccccaatttcattattttttagcctttttggataaaatgtatattcattgcaaggtacaatgtgaactgtaaatagtagagagatggggtttcaccatgttgaccaggctagtcttgaactcctgtcctcaggtgatccacctgcttcggcttcccaaattgctgggattacaggcataagccaatatactcagcctgagaattcatacttctaagaaagtacaaatccatagggcacatgagaactgcaatgtctatctacagtaaatacagtttgatgaataaaatgaaaggcaattgacctaaggtgaaaaaaaaa

SEQ ID NO: 465786 - DNA, 2083 bp, Homo sapiens
atatccacccccattacagtgaggggcacagggcactagacctgttctagaggtccttcagagaagagagaggcctagagatgtgggcagatgaggacttggaataaagcagaatgtgacaatgcactgggctctggagtgtggggcccagaaaaaatactagatttttgggctgtccttgaggtcctcattcagaagtggaagaaaataatgtctctgaatgctgtcacggttggtggaataaaaagttgtgagttgcggaccaagtacgtctactcagatgtgaatcccaaggccttaagctgtcctcgggtttcctcattggctgggggtctatgcagatactcctatgttcctgatctaggaaacagaatttctaatgcagatgtcacctggtgggcagaagtggtgccctcacatctctttgtaatgttctataatgggggtcacttcccagagtggtttagcctttcaatggctattatttctgatcaaaatggaataaaactagaaatgaataacagaagaaaacaaaaatagcaacatatatatggaaattaaacaactcacttttgagcatgctcatgtttaagggtttcattgacactgatgtgggaacagcccaatcaggcgcgcagttggagaggacaggagaggagggcgtggcttctggcgtttggcgggtctttgtctctcgctggcgctggcacaggaacttgggatccgtctcctctttcgcctcctccaccttgggagccccgggctactctttcacagcccctgttgccctgtgatctgtaggtccttggggacgcacagttaaggtgccaggacatcctggaagctgggaaatgatttttgcagtggcaggaccaagttcaaatgagtcatagccaagtctacagtaagatgtggtagtattctgttttgaaccgaggaccatgattggcaagcttgccacttggtcaagtgcttaccctctaaagatgtcttccttggtctttgcctccagctgggtgtcacaaactctgaactggattctaaggctttcatgaatgcacttatgtttcctgtggcagctgcattatgttgtgggggatgtgcatgccgaacctcccattctgtcgtcttgcttatgttactctcctttatgtttcactttctcaaatgaatgtcaagctggtgatttttagattcaaaaattctaaaataaattgctcaaatttccacattatgtaagctattaataaaatgtcttgtaggtgctacatattcattaaaatttttggttgtaattttaagctcactgcaggcagaaaggaatcattaacatttatattcttttttttagtctgtatctaaatgatggtatattttaattccagatatttactttatactgcagtaatgctcgtcatattttgcaaaatttatgttgttcttttatttggaaatataaggcttttttagctcctgaaatctatattatagtcatataattttattatgttttgtggtaagaagtgcagcaacatattgagaacataataaaattatcctgtatttttaatgattatttattaaattcctctcattagagcctgttattaatgattgtaatgtattttctgtataattttactgcaatttattaaattctaatgacttaaattgtctgcttttcatgagtgcacacagttgaatgctgtagatatctaaagaattatttttcggccggttgtggtggctcatgcctgtattcccagcaccttgggaggccaaggcgggtggatcacgaggtcaggagatcgagacaaccctgactaacatggtgaaaccccgtctctactaaatatacaaaaaattaaccgggcatagtggcaggcgcctgtatccccagctactcaggaggctgaggcaggagaatggcgtgaactcagtggacagagtttgcagtgagccgagatcgcgccactgcactccagcctgggcaacagggcaagactctgtctcaaaaaaaaaataaaaaaaaaaacggttattttccattgtaaatctatgttgtattcaggattttatgcac

SEQ ID NO: 465787 - DNA, 1160 bp, Homo sapiens
atatccacccccattacagtgaggggcacagggcactagacctgttctagaggtccttcagagaagagagaggcctagagatgtgggcagatgaggacttggaataaagcagaatgtgacaatgcactgggctctggagtgtggggcccagaaaaaatactagatttttgggctgtccttgaggtcctcattcagaagtggaagaaaataatgtctctgaatgctgtcacggttggtggaataaaaagttgtgagttgcggaccaagtacgtctactcagatgtgaatcccaaggccttaagctgtcctcgggtttcctcattggctgggggtctatgcagatactcctatgttcctgatctaggaaacagaatttctaatgcagatgtcacctggtgggcagaagtggtgccctcacatctctttgtaatgttctataatgggggtcacttcccagagtggtttagcctttcaatggctattatttctgatcaaaatggaataaaactagaaatgaataacagaagaaaacaaaaatagcaacatatatatggaaattaaacaactcacttttgagcatgctcatgtttaagggtttcattgacactgatgtgggaacagcccaatcaggcgcgcagttggagaggacaggagaggagggcgtggcttctggcgtttggcgggtctttgtctctcgctggcgctggcacaggaacttgggatccgtctcctctttcgcctcctccaccttgggagccccgggctactctttcacagcccctgttgccctgtgatctgtaggtccttggggacgcacagttaaggtgccaggacatcctggaagctgggaaatgatatgtattcatttcctaccaccgtagtggaagagatactatccctatctttacaactgatagcatttccaacagtaagctgtgagattctgcttgaaatcacctctcaaacaaataaaaaacagacctgggagacatgctacactcattctgctgaagaaataggtttttgcactgcctcactaggttgggtttctttatcctttgaaatattttctctcccttcaccaatctgaggacattttttcctcaatatcagcatccagttgcctggcctgcaatgtgtctctaaggaatggaaactaa

SEQ ID NO: 465788 - DNA, 1685 bp, Homo sapiens
atatccacccccattacagtgaggggcacagggcactagacctgttctagaggtccttcagagaagagagaggcctagagatgtgggcagatgaggacttggaataaagcagaatgtgacaatgcactgggctctggagtgtggggcccagaaaaaatactagatttttgggctgtccttgaggtcctcattcagaagtggaagaaaataatgtctctgaatgctgtcacggttggtggaataaaaagttgtgagttgcggaccaagtacgtctactcagatgtgaatcccaaggccttaagctgtcctcgggtttcctcattggctgggggtctatgcagatactcctatgttcctgatctaggaaacagaatttctaatgcagatgtcacctggtgggcagaagtggtgccctcacatctctttgtaatgttctataatgggggtcacttcccagagtggtttagcctttcaatggctattatttctgatcaaaatggaataaaactagaaatgaataacagaagaaaacaaaaatagcaacatatatatggaaattaaacaactcacttttgagcatgctcatgtttaagggtttcattgacactgatgtgggaacagcccaatcaggcgcgcagttggagaggacaggagaggagggcgtggcttctggcgtttggcgggtctttgtctctcgctggcgctggcacaggaacttgggatccgtctcctctttcgcctcctccaccttgggagccccgggctactctttcacagcccctgttgccctgtgatctgtaggtccttggggacgcacagttaaggtgccaggacatcctggaagctgggaaatgtagagacgtggtttccccatgttggctaggatggtcttgatctcctgaccttgtgattcacttgcctcagcctcccaaagtgctgggattacaggtgtgagccaccacacccggccttgagtttatgtttttattggtgcaagatatgtattcatttcctaccaccgtagtggaagagatactatccctatctttacaactgatagcatttccaacagtaagctgtgagattctgcttgaaatcacctctcaaacaaataaaaaacagacctgggagacatgctacactcattctgctgaagaaatagggcaagaaagctttctaagaccccgaactccagatatgcgatggggcaaatcctgaagcgtacatggctatctctcacagctaaagcatccctcacccctatccagcgcttcttacccctggcgcaagagaatcacctgcggggaggaaaactttcaaaatcccttaaacccaagttgtaaccgcacaactaaatcagaatccttggagctggatctgaaaaaaatacggttgaaagtcgtgcaggtgattacaatgtgtaggcaaaccagaaaaccatggctttaaccagcagcttttgttagaaatgattctccatgatgtgaacgttgtgtgaatgtgacttcctttactgtttccgcagttttgcgacggggtggcgtctgtcgttaccgcggggccgctcggccggacgggccgggggggaatgggacggaaaggtccaaaaggctggcggggaaaaaggggcgtgaaaactgggggggggtcggggtgtgctcactcatagctcgggtaatttttga

SEQ ID NO: 465789 - DNA, 3609 bp, Homo sapiens
ggcagggtgatgttgtggggccttgagcttggggctccccagagggcaagagcctgagacagcaggtcaataaaaggtgagtggtcgacgggattggcagatcctggactcagcccttcactgggcaaatgtcaggcccagtggctgggcagcttgggggcatttccacctgaatgcagggacaagaccaccggccagtggcatcagactggcaagaaggcaagttccagccgataggagaggaaagagtgcaaggacacccaaggacacctgaaaggctggcaacagtggtggttgccttcggcccccagctccttggctgtcaccgctctgcctgtggaagcccgtccccagcccacacgggcctctacaggagccctcaaggacgctccgagtggctgtgctcctccggtctctcctggtgcttctcctggctgtgcctcctgccagaggcaaccagccacacccaggccacgttgccaccctctgcacagcccaccctcaccctttccagaagtagccagtccattctcgcaaccttcctagaggaagtcaagttgcttaccaacttccaccatggcaagcttacgatgcagcttgccctggcctgcacttcgccttgctgccatcatgtgaagaaggacgtgtttacttcccctcctgccatgattcagcgtgagaatggactaatacgctgagggccacagggttcctaagagccgcaaggaagggaacaagtcccactgtgaaagcgcttattttttaatagactttgttttttagagcagttttaggttcacagcaacactgagtggaaagttcagagattcctcatatgttccctgtccccacccccaactattcacatcccccaccagagtggtacatttgttataatcaattaacctatgttgacacatcattatgacccaaactccattgtctacactagggtccactcttggtgttgttcattctatgggtttggacaaatgtataatgtcacatatccaccattgtggtgtcatataggatagtttcactaacctaaaaataaaaatcctctgtgctccacctgatcattcctccttcccccaaacccctggtaactactaatcttttactgtctccatagttctaccttttccagaatgtcatatagttggaatcatagagtaagcagccttttcagatcaacttctttcaattaagaaagtttgtttcctctgtgtcttttcatggcttgatagctcatcgtttttttaagtcctgaaaaataacccattgtctggatgcactatagttatgcatttatctgggcagtcccagatatcctggttgcttccaggttgtatcaattcataaatacagatgctatagacatttgtgcatgaatttttgtgtggacatgagttttcaacttctttgggtaaataccaagaaggaagagaggggacaagctccagtgtgtaagcacttttcaaacctctgcttgcatcacttttgctaatggccaaaacaagtcatgtggtcaagtccagattaggaacagggagatggtggagagaaatagctctacctcctaatggaagaagaggcaaagtcatattgcaaagacttgtgcccactggaaagggaagaatctgtggtcgtttttgcaatcgatcccattctggtacatgcttgctttttgaagtcttgatgttctgcttaaagcatcaagttgttacatcatggcccatttgcgatataaagaataaaacaaagctattggactagatggcttcagaaactgcttagttcaaaagatcagtgcttctcagactttaatgtatgtatgaatcacctggagagcttgttaaaatgcagatcagattcagcaggtctgggctgggacccgagatgctgcatttctaataagttccctggtgatgctgctgctgctgctccttggaccaccctttacacagcaagaacctggaggtgggatctgcagattcagaatctgcattttgacagactcccaagtaattcgtgagctcagtacagtttgagaagcaccagcccaggccagcagttctcaatcttccatacatttgaatcaccaggggagctttacaaggtgctgatgcctgggtggcatctccaagaatttctgatctaattggtctggggtaaggccaaggattcaggacttttacagctgcctaggtgcctttccactttaagaacctgagatcctgttcctctggtggaaaaaccagcctccccaggacctgtcccacaccccagccaacaggacatttcatgtctgttgcagatgctcttgctgcctcttcccattccctcagcatgctggctgaacttcccacagccagcacctgtgagtcttcactcgaggcttctctcttgggctgcactgtccaaatacaggtgagttggacatgctggggaattaacgcccctcaggagcagccctctgtcatgatgacaggagtcggtgggcaagtgttgcagctcccggggtgggataactccgagccatgtgctctacgctggccccagagcccccagcacaacggcgttccaattgcccacagcggtaagggtttgatgacaccctgtttggctgcctgctctgctttccttcccacgtcctaattgatgtttcctgggatctccctccaaatcaactatcagcactgaaatccttgtcttagagtctgcttctatgggaatccaaacaaagatagtatccagctaagtcactttttgttcatgatctttggtatggggtagtgtaagggacagacccctaggcggggtgctgggggaacccttgcttttcacttgtgaccttgggaccaggtaacaggaatgaagaggtagggctgagacctgacctgcttttagggggagctgtggggcaagactgtagatgctctggtcatgacttcccctctcggtcaggccctcttctgccaggctggcctcagacactggggcccttgcaggcagccacaaagcagatgccgtcgttgatggagcatgtctcagagcagctgatggggcacacctctgcacctggcagccagcctcctgcatggccttctccaccgtctccttctctgggtggagcccaaagaacttcttggagcctaccatatagtgggagtgcagggcagccatggtgaccaggttcccatctgctttcagcaggctggccagcctctgcagggctgcccagtacatgtccacatcaggacaggcactcttcaggggacacctggattgaccccagtggatgcagcttggtcatatcgcacttcagcaaccacgtgactgtccagcaaagctggttctccttctcatgccacctgcttctatggaggagggtcacagagatgacataatgattgtgatagcagcccctcagccctcaccaccaccctctgggcaaagcctgtgacttatcctgttcagcaactctttgagcgagattattattttcctcattatacagatgaagaaactgaggcatagacttgctcacgtctacacagctgtaggtgacagtggattcgataactccccttcccctcctcctgc

SEQ ID NO: 465790 - DNA, 848 bp, Homo sapiens
gcacattcacacataagtcaggctacctgaaaaaggcatctccatgaaaccttccagtggagcagcacagacaggcatggcctttggccctgttcctccccacacagcctcagaggcatgcaaagaggtgagcgaggggaggacgaggcagactcaggtggaggggaaaggaaatctcagccgtactccccaggtgccatctactcggagaccctcagaagccctccaaaccgttccatcagaccgagcctcacatttcaggttgggactaaatggctctcctacccacacttcagttgttcttgaagcggggaagaaagggaaatgcgctgacacggagggacgcggcggcggccttgcccttgaaagcccgcgttaccgggcgcgggactcagctggcgtcagggcgctggaaatggactcccgcgcgctcgcccccgctctgccggaggacccagcccgggctaattggcgctgtgaatgattcggggctgtgaacaggcgactgcaatcagactagggctgatggcgttgggagtcttgcagagtttgcactggcaaggcaggctttttaaacccttcactgctccactggaaacaccaccaaactaaggcctttgggataaaatgccagacaagacacagtcgtcgccttcaaggggatttaagtctagcaggagtgggagaagttgaaaagaacacaaggaacactgttgactcccactgtataagaactacagtgcatctatctccattagcattgtcacacgggttttataaaatcatattacaaaatgtgggtcagtgatcactgagtcatgtaatttatcaagacaatacccagatgc

SEQ ID NO: 465791 - DNA, 410 bp, Homo sapiens
gcatcacagtgtacatcccaggaaagaagtttggggaggatattgatcaacagatgacttttccagttcagtgcagtttttggtcttttgttgatgtggattcatcttcaaggagaaatgcacagaaaatcaacactctaattggtcagatggtaaggtatatgtatattttattgttagaatgttgttcaaggaataaagtcataaattttaatacatcttaatatttttgttattaacctgtttctatactttattgagtaccagaactacatgatgacccagttgtttaaaaattgtaatgttttttaaccatgtagatcagatatctgctcactggaaattactatttgaataggtaactagagagtctttaatgaataatgtataagaaaatactcactaaagag

SEQ ID NO: 465792 - DNA, 409 bp, Homo sapiens
tcagttccttcaggaattagtgacaacttcaggtgtctcctctccttaacttccagctcatgctggaagtttacagcaatacttgccaatatctttgcatcacaaattacccctcctgggacttacaatttgctcaagctctgtttgttgatgagtctagtacagacaactgaccgtaacaaggaactggaagattgcctggatattttaattataacaagtgatactctactcatagacaggtatatatgtgacatgaatttttacaaatattaattggtcacagatttgcatacatcctttccatgagcattattacaagaagaatatttagaatttttctgagccagtataagtatttaaatcaatctttatcaataaaattcaaaacctttgaaagataaattga

SEQ ID NO: 465793 - DNA, 2290 bp, Homo sapiens
agttcccctgctgacccgagggcgcgggcggtcccggcaggccccgcgacgcagccaacggccgggacgtgcgcgcatgcgcgctaggactccgctccgcctacgctgcaggcggagagcaaccgccaagcttggtgggagtcaaggttttcacatcctttctatgagtttcgccatctatagcttttatcaacaattgtggtttaatcaattagaaatattaaccaggagaaaatgtcaaatctaaaaatgaaagaggcggccctcatctatcttgacagaagtggaggcctccaaaagtttatagatgattgcaagtactacaatgattcaaaacaaagctatgctgtctatcgattcaaaattttaataaatccctctgatgttgttgaattagatgctgagcttggaaatcacattttacaccaacctttaaaagctgctgaagtctttcaatcagtctgttttattgctgttaagactctctcattaattggacaattgcagactgaaacgcaaattaatatagtgctgaaattaacacatttacctcccctgccaagttatggtcttgatctttgtgagtttccacttgattatacatctcagagattttatatgatgcaaggaattgtgattgcaatgacaactataaccaagtatacacaaggggcaagatttctttgttcagatgaagcatgccctctttcaaaaggatttcagtatataagagtgcatgtgcctggtgctacagaatctgcaacgataagaaatgactttttgtgtaatctatgtgcatcttcacttcaagaagacagaaaatttagagtacttggtgatgaatcagtgaataaaatgaatataggaaatgaatataaaattattggaattccaacctgtgtaaaaacctcacaaactgctgtctgtatagaagcaaatagcataactttttgtaattcaaaagcaatacttgccaatatctttgcatcacaaattacccctcctgggacttacaatttgctcaagctctgtttgttgatgagtctagtacagacaactgaccgtaacaaggaactggaagattgcctggatattttaattataacaagtgatactctactcatagacaggcttctgaattttagcataaaccttgtcccccgtggtatacgtcatctagtctctactgaaatttttcccactctatccaggaataagtatggaactggagcagttagcattcaggctggcagtgctttgctagctaaaggtaggtatctgctttataggagacttggcttcacacaaaaaagataaacttgaacagcttcaaacagttctggagagcagaagcatcacagtgtacatcccaggaaagaagtttggggaggatattgatcaacagatgacttttccagttcagtgcagtttttggtcttttgttgatgtggattcatcttcaaggagaaatgcacagaaaatcaacactctaattggtcagatggattgcagtttgattccagctaaccttgtggaggcatttggtttattgattaactgcaacgagtcatctccctgccacccatttcttcctactgtgcaacacactttgaacaaagccattaatcctgaagggctgttttatgcggcttctagacagttcacaactgaagattttgaaaagctattggcttttgcaaagaatttgaatgtagaattcagcttggaagcagaaagaatgacccatggctattatctagcaagtcgcagaatcagaacaggctctgtatgtggatcaaagctgtcagcatctgcattaaaatatctcgttttcctatctgaagcccatgcacgactgaacttaaggaacaaagtgcttaaagaagatgtgctgattgcagccttactatttgaaacatccctcacattgaaatatggtaatgaattaaattattaatgatcactacaaataacttttatttaaccttaaatattcttagttggttaaattaaaatgttacatatatttttaaaatattattttaaagaataacaaatctctaccaggtttattgaagattatcaatttgctttatctttacatgcttctcctagtctatgtttaagaccacatttcattaagtctaagacacattattttatgtgctgtaaagaaaaaattctgccaattttaccatgccatgccatcaattgttaagatacaactggagtacggtaataagatgaaaatatatgtctttgaattgaagaattatagtattattatatt

SEQ ID NO: 465794 - DNA, 3008 bp, Homo sapiens
ttggaagccatgtgttaacactgagtgatcctcctcagccaagtccctaatgcatggaaaagaacctcctgacccagtccccaaaggctggacttttcctttgcaagaaataaggagggtaaagttcaccataaataacaaagtcatggagtcaagctgtcacaattggccaccgttcctaaggcatttgaattgtatgcattgacaggaaaaagcaggaaggagtgaagacagaacaagggaagagaagacgcatttgctgagatctattatatgccaattggaggactacagatttcacaattcacatctgttgtcttatttctttctcataatcccaaagataattctaaagttacacattatcatctccatttacaattaagaactgatgctccaagaagaaagatctcacagtgtgtaggcaacagacctaagattcaaacctatattggtgggtgttaatgtccttgttctttctgataaggaacaacactgggatccagtccagggctgagaggcagtgggacaggaccacactgggatccagtccggggctgagagtcagtgggaaaggaccacactgggatccagtccagggctgggagtcagtgagaaagcatacgccaggatccactccagctgggagtcagtgggaaaggaccacgctgggatccagtccagctgggagtcatgggaaaggatacactgggatccagtccagctgggagtcagtgagaaaggcccacactgggatccagtccagggctgggagtcagtgggaaagaaccacgctgggatccagtccaaggctgggagtcagtgggaaacgaccacaccgggatccagtatggggctgggagtcagtgagaaaggacctcaccgggatccagtctggggctgggagtcagaccacaccgggatccagtccggggctgggagtcagtggaaaaggacgacactgggatccagtccgaggctgggagtcagtgggaaaggacacgctggcatccagtccggggctgagagtcagtgggaaaggacgacactgggatgcagtccggggctgggagtcagtgggaaaggatgacactgggatccagtccagggctgggagtcatcagtgggaaaggaccacgctgggatccagtccggggctgagagtcagtgggaaaggacgacactgggatgcagtccggggctgggagtcagtgggaaaggacacactgaaatccagtccggggctgggagtcagtgagaaaggaccatgctgggatccagtccggggctgggagtcagtgggaaaagaccacactgggatccagtccggggctgagagtcagtgggaaaggaccacactgggatccagtacggggcttggagtcagtgagaaaggaccacactgggatccagtccggggctgggagtcagtgggaaaggagcatgctgggatccatctggggctgagagtcagtgggaaaggacacatcaggatccagtccggctgggagtcagtgggaaaggacacgccggcatccagtccggggctgagagtcagtgggaaaggacacactgggatccagtccggggctgggagtcagtgggaaaggacgacactgggatccagtccagggctgagagtcagtgggaaaggacacgccggcatccagtccggggctgggagtcagtgggaaaggaccacgctgggatccagtccggggctgagagtcagtgggaagggacacactgagatccagtccggggctgagagtcagtgggaaaggaccacgctgagatccagtcccgggctgggagtcagtgggaaaggcctacactgggatgcagtccggggctgggagtcagtgggaaaggaccacactgggatgcagtccagggctgggagtcagtggcaaaggacacactgggatccagtgagaagggacacaccaggatccagtctggctgggagtcaatgggaaaggaccacactgggatccagtccggagctgggagtcagtgagaaagaacaacactgggatccagtctggggatgggagtcagtggcaaaggacacactgggatccactccagggctgggagtcagtgagaaaggaccacactgggatgcagtccgggactgggagtcagtgggaaaggacacactgggatgcagtccggggctgggagtcagtgggaaaggaccacactgggatccagtccggggctgggagtcagtgagaaaggaccacactgggatgcagtccggggctgggagtcagtgggaaaggaccactctgggatccagtccggggctgggagtcagtgagaaaggaccacactgggatccagtccggggctgggagtcagtgggaaaggacacactgggatccagtccggggctgggagtcagtgggaaaggaccacactgggatccagtccggggctgggagtcagtgggaaaggacacactgggatgcagtccggggctgggagtcagtgggaaaggaccacactgggatgcagtccggggctgggagtcagtgggaaaggaccacactgggatccagtccggggctgggagtcagtgggaaaggacacactgggatgcagtccggggctgggagtcagtgggaaaggaccacaatgggatgcagtccagggctgggagtcagtgggaaaggaccacactgggatgcagtccggggctgggagtcagtgggaaaggaccactctgggatccagtccggggctgggagtcagtaagaaaggaccacactgggatccagtccggagctgggagtcagtgagaaacaacaacactgggaaccagtccggggatgggagtcagtggcaaaggacacactgggatccactccagggctgggagtcagtgagaaaggaccacactgggatccagtccggggctgggagtcagtgggaaaggacccccctgggatccagtccggggctgagagtcagtgggaaaggacgacactgggatccagtcc

SEQ ID NO: 465795 - DNA, 3085 bp, Homo sapiens
ttggaagccatgtgttaacactgagtgatcctcctcagccaagtccctaatgcatggaaaagaacctcctgacccagtccccaaaggctggacttttcctttgcaagaaataaggagggtaaagttcaccataaataacaaagtcatggagtcaagctgtcacaattggccaccgttcctaaggcatttgaattgtatgcattgacaggaaaaagcaggaaggagtgaagacagaacaaggggagaatgtaacctgagttggaaggtgtaatatttaaatgtatttgcaaacctgttttgggccaaaaggggtaggaggaagagaagacgcatttgctgagatctattatatgccaattggaggactacagatttcacaattcacatctgttgtcttatttctttctcataatcccaaagataattctaaagttacacattatcatctccatttacaattaagaactgatgctccaagaagaaagatctcacagtgtgtaggcaacagacctaagattcaaacctatattggtgggtgttaatgtccttgttctttctgataaggaacaacactgggatccagtccagggctgagaggcagtgggacaggaccacactgggatccagtccggggctgagagtcagtgggaaaggaccacactgggatccagtccagggctgggagtcagtgagaaagcatacgccaggatccactccagctgggagtcagtgggaaaggaccacgctgggatccagtccagctgggagtcatgggaaaggatacactgggatccagtccagctgggagtcagtgagaaaggcccacactgggatccagtccagggctgggagtcagtgggaaagaaccacgctgggatccagtccaaggctgggagtcagtgggaaacgaccacaccgggatccagtatggggctgggagtcagtgagaaaggacctcaccgggatccagtctggggctgggagtcagaccacaccgggatccagtccggggctgggagtcagtggaaaaggacgacactgggatccagtccgaggctgggagtcagtgggaaaggacacgctggcatccagtccggggctgagagtcagtgggaaaggacgacactgggatgcagtccggggctgggagtcagtgggaaaggatgacactgggatccagtccagggctgggagtcatcagtgggaaaggaccacgctgggatccagtccggggctgagagtcagtgggaaaggacgacactgggatgcagtccggggctgggagtcagtgggaaaggacacactgaaatccagtccggggctgggagtcagtgagaaaggaccatgctgggatccagtccggggctgggagtcagtgggaaaagaccacactgggatccagtccggggctgagagtcagtgggaaaggaccacactgggatccagtacggggcttggagtcagtgagaaaggaccacactgggatccagtccggggctgggagtcagtgggaaaggagcatgctgggatccatctggggctgagagtcagtgggaaaggacacatcaggatccagtccggctgggagtcagtgggaaaggacacgccggcatccagtccggggctgagagtcagtgggaaaggacacactgggatccagtccggggctgggagtcagtgggaaaggacgacactgggatccagtccagggctgagagtcagtgggaaaggacacgccggcatccagtccggggctgggagtcagtgggaaaggaccacgctgggatccagtccggggctgagagtcagtgggaagggacacactgagatccagtccggggctgagagtcagtgggaaaggaccacgctgagatccagtcccgggctgggagtcagtgggaaaggcctacactgggatgcagtccggggctgggagtcagtgggaaaggaccacactgggatgcagtccagggctgggagtcagtggcaaaggacacactgggatccagtgagaagggacacaccaggatccagtctggctgggagtcaatgggaaaggaccacactgggatccagtccggagctgggagtcagtgagaaagaacaacactgggatccagtctggggatgggagtcagtggcaaaggacacactgggatccactccagggctgggagtcagtgagaaaggaccacactgggatgcagtccgggactgggagtcagtgggaaaggacacactgggatgcagtccggggctgggagtcagtgggaaaggaccacactgggatccagtccggggctgggagtcagtgagaaaggaccacactgggatgcagtccggggctgggagtcagtgggaaaggaccactctgggatccagtccggggctgggagtcagtgagaaaggaccacactgggatccagtccggggctgggagtcagtgggaaaggacacactgggatccagtccggggctgggagtcagtgggaaaggaccacactgggatccagtccggggctgggagtcagtgggaaaggacacactgggatgcagtccggggctgggagtcagtgggaaaggaccacactgggatgcagtccggggctgggagtcagtgggaaaggaccacactgggatccagtccggggctgggagtcagtgggaaaggacacactgggatgcagtccggggctgggagtcagtgggaaaggaccacaatgggatgcagtccagggctgggagtcagtgggaaaggaccacactgggatgcagtccggggctgggagtcagtgggaaaggaccactctgggatccagtccggggctgggagtcagtaagaaaggaccacactgggatccagtccggagctgggagtcagtgagaaacaacaacactgggaaccagtccggggatgggagtcagtggcaaaggacacactgggatccactccagggctgggagtcagtgagaaaggaccacactgggatccagtccggggctgggagtcagtgggaaaggacccccctgggatccagtccggggctgagagtcagtgggaaaggacgacactgggatccagtcc

SEQ ID NO: 465796 - DNA, 588 bp, Homo sapiens
gtgccctgcaggatgaagacacacaggctcatctctatagccttccatgaccacaaacatgaaagaaagactcctacaaaggaagactatccactctcctggactggaagtgtttgaagaaatcctcaggggatataacacccggggcacatatgccaatatgtcggcccgttttgaacaagcaccatgtaaaacttcctctggaacacacatggatttaaaaatcccttggagagaaatgtatcctgctaaggccaacccagctctcagcctggttctcatgttgaccctggaaggttcacccacctctgttgggtggagatggcgtcctgggagcctagaagactgtccaggcacagagcaagggcagctgtctttccagagcagggctggaatgtagaagtggacttttggccacgtggatgaggaattgaagcagtcagttctgatctagagatggaaggcgcctgctgaggacagcagggctgcttggcaccctgggtccctgaatggctctgtggagcactgcctgatggcccaccctggactgttgcctgagacagaaataaacttttatcttgtttcaaa

SEQ ID NO: 465797 - DNA, 2207 bp, Homo sapiens
  misc_feature (2)..(2): n is a, c, g, or t
  misc_feature (4)..(5): n is a, c, g, or t
  misc_feature (8)..(9): n is a, c, g, or t
  misc_feature (11)..(11): n is a, c, g, or t
  misc_feature (13)..(13): n is a, c, g, or t
  misc_feature (16)..(16): n is a, c, g, or t
  misc_feature (19)..(19): n is a, c, g, or t
tnannacnncntncanctncaggtgccagggtggacagagcaaatagctgccagtctgacagcagcgggttcctggaggagccgctggaaccgctgcccctccaggactgtcagctagagtcggatgggccagattccaaaagtagggcgagcatgtctttttcaagccaagaagcgaatgccttggaacaaagggcctcagtatctgtgatggaggaagagtttctgcttgaggccatggaggggccaccagagctgtatatcccagacatggcctgtgccaagaccaccacgaggggagaatgcccaaggaaagacagccatctgtggcagcttctgccaatgccccatgctgagtatgaggtcaccagacccacagccacttccaaatatgatcatcctctggggtttatggtaacccacgtcacagaaatgcaggacagttttgtgaggcctgagggagctggcaaagtgcaaagccaccacaatgagtctcaaaggtcacctggaaatgatcatactcaagacaagttccttcatgttgactctgaggccccacgagaagaggaaagcagtggattctgtcctcacaccaaccacagcttactcgtaccagaaagctcatcacagtgtatccccaagcacagtgaaatcacaccttatgcaactgaccttgctcaaacatctgaaaagctcattccccacctccataaactgcctggagatcctgcccaggtgaagtcaaggtctggtactttgggtcagatactacctgggacagaagctgagatggaaaaccttcctctaaatactggcagctccaggtctgtaatgacccagatgtcctccagcctggtgtcggctgctcagagggctgtggccttggggactggtcccagaggaacatctttagaatgcactgtgtgtgatcctgttaccgcaacagaaacaagactggggacaaaagcaagacagttaaatgatgcttccattcagacttcagctctaagcaacaagaccttgacacatgggccccagcccctcaccaaatccgtctctctagactcaggcttctctagtatctgcccaatgggcacctgccatgctatacctgcccactgctgcatctgctgtcatcaccaccctcactgccacggggagaggcaaagccctggccctgaaccctcagtctgtaggcactgcctgtgttcactaactggtcaccaggaagcccagttcatgacgactttgaaagcccttcaggacactacagtgagggagctatgttccaaggattgcagcttctccgaggaaggtaggctggaaagagtaagaggtggccctgggggaaaaggcacaggaacccagagccagattcctcatgaggaagaagaagacgatgacgacaacgacgacgacaatgggagttctgagcagatgttgaaactaagagcaattttaggatgcaaaacaaaggggatagctggtaagaactcagcaagtcatcagagtgccggcaaatggactgggcttggaggtgccaaagttctttctcattgttctcagtgcacagtccatgagatggaagccatgaagacgatatgccaaagtttccgggagtatttagaagaaattgaacagcaccttatgggacagcaggccctcttttccagggacatgtcagaggaggaaagggaggaggccgagcaactgcaaacgttacgtgaggccctgaggcagcaggtggcagagttggaatttcagttaggagaccgggctcagcaaatcagagaagggattttactgcagctggaggttctcacagcagagccacctgaacactattcaaatctgcatcaatataactggatagaagaaagcaatgggcagacttcatgttctaaaatccacccaggcatggccccgaggactgtgtttcctcccgatgatggccaggaggctccctgttcaggtgggacccagttggctgccttcactccacccaccttggagaacagcaccaggatgtctccttcatcatcagcttgggcaaagttaggtccaacccctttgtcaaattgtcctgttggagaaaaggatgcagatgtcttcctctagatcagagcaggtttgttaaccttcatacaaaatataaaggcccagaacagatgtagcaaggaaatttcaattttccccaaggagaaggg

SEQ ID NO: 465798 - DNA, 4668 bp, Homo sapiens
  misc_feature (3)..(3): n is a, c, g, or t
  misc_feature (6)..(7): n is a, c, g, or t
ccncannagcatttggtgtggtcagtattttggattttcaccattctaatagagattcacggatccatccgggtggtccgggcaccactggcgcccctctgcggctattccccagttccattttctgaagccacaggtcagaagccgctgtacaacactttgccgaactccagaatcttgaaggagacgtaaggagcagccacctgccgcgcaggcgcaagcctttctttcggcacaaagaccgtgggaggaggggtcggcgcaagcgctcggtgtctctctgaaaagaacatcatactgcctcctggctgacggagcgcagcgcaacgcatgcgccttgaagacttatggaacttatttcacgctcagggcggcggtgacgtccttgccgtggctggggttccgatgtggtccccggagcgggaggccgaggccccagccgggggagacccggcgggccttctgccccccgagtgggaggaggacgaggagcgcatgtccttcctgttctccgctttcaagaggagtcgcgaggtgaacagcaccgactgggacagcaagatgggcttctgggcgccgttggtgctgagccacagccgccgccagggggtggtgcgcctgcgtctgcgggacttgcaggaggcctttcagcgcaaggggagcgtcccgctggggctggccacggtgctgcaggacctgctgcgtcgaggggagctgcagcgggagtcagacttcatggccagtgtagacagcagctggatctcctggggggttggggtcttcctgctgaagcctctcaagtggactctttctaacatgctgggagataataaggttccagctgaggaggtccttgtcgctgtggagctgttgaaggaaaaggctgaggaggtgtatcgtctgtatcagaactcgcccctctcctcccaccccgtggtggccctgtcagagctcagcaccctctgtgctaactcctgcccagatgagaggaccttctacttggtgttgctgcagctgcagaaggagaagagggtcacagtcctcgagcagaacggggagaagattgtgaagtttgcccgagggccacgtgccaaggtctctccagtcaatgacgtagatgttggggtgtaccagctgatgcagagtgaacagcttctctcacgcaaagtggagtccttatcccaggaagcagagaggtgtaaagaagaagcccgccgggcatgccgagcaggaaagaagcagctggcactgaggtctctcaaggccaagcaacggacagagaagcgcatcgaggccttgcatgccaagctggacactgttcaaggcatcctggaccggatctatgcctcccagacagatcagatggtttttaacgcctaccaggctggggtaggagcactcaaactctccatgaaggatgtcacagtggagaaggcagagagcctcgtggatcagatccaagaggtacagaaaggggccagggagggacacacagagaaggaggtgacagagaacagatttgacttcattgcacatcctctttaacgaaacttgacttgtgaccttgtgaacttgaggaagctttccttgattctcacttggggcaggattgctttgtaaccctagatattttccaccaaagactgagatgctcagagccaccatgcccagctcaaggctttgcacttgtctcttacagctctgtgacacccaggatgaagtttctcagactctggctggtggggtaacaaatggcttaggtgagtgtttcttcctttcatcctggaagacttcgcttccctgtgctgtgatgagtttgacagtagatttgcttttccgggtgcaggcaggcctctcctagcctgccctccctggggctcatctgcgggagcagtcagggaattgccatttcctcctcgacagctgtgctcatgacccatctgtgctgcggcattcctcattcacaaggcttctgactggaggatcctccttcaagggcagtgggaatcagggtcaggtccatggtgttaacagaatacacctccttggtgacttagcttggagtgtggaagaatcatctctgcttgaagctaccctcctgacttccgggatttttttttaatctgcaaggaggcctggcatcttttgtaaagctaagcgggttttggtaacctcagtcctgtactcattaatgcatttctcccttgagtttatgcatctttatgttgccttttctttccagattttgacagtgaagaactggagaaggaattggacatcctccttcaggataccaccaaagaacctttggatctgcctgacaacccccgcaataggcattttaccaacagcgtgcctaaccctaggatctcagatgctgaacttgaagctgaacttgagaaactgtccttatcagagggaggtttggtcccaagcagtaaatctccaaaaaggcaattggaaccgactctaaagccattgtaggaccctcaagtgaaggaccctcatgtaaaagagagaccaggcctgctgggtgtgtacatagttatttaaacaagaaactctcagaatgtgtttggaagaggagaaaggagaaccactgattttatctggatgctactacttactacaggacagatagaatttctggaagcgatgctccaaaggcttgctcccagctgtatcatggacctgccttctcatctttatagtgccacgatttatacagtcctgtgtctgacctgtcatttcatagcctgcagttcttgccattggcacacttagatttgtcttcacccaccagcttcgttccagcccatgaaggggaaagatttgcagctttgccaaatctgaatcagttcccactcccccctgcggttttttagaggggtttatcctgtcgctaatgtcagttaaatagcttattcctgtcccacttgatttcactggtaagaatgagaatgaaatacttaaaggttttatttgaggggacttagctgccattttatggaaaaacatgtagtataaaaggtttttctccagggtcatttgacagaattctccaggtgttcagagaaagaggtcgccccaagtggcccagagtcgtgacagtccggaggggctggtgtggccggtgggcgctgcctcttcatctgatggagccaggaggtccgccggtgggggaaaggcttcttccgaggcttctgcactcgcctgggaagaggcccagtcactacaggaccctgagatgtccagaccccttatgcaaagaggcaaaattgttgccttggccccatcatggagtaacttaaaaatacatatctatcttccagaacaagccacacaacaacacacctcccctccttgagcctggcacacagcaccgggctctctgaatttggaaagtgtttcattttgtggcctactgctcggggcaggggggctgagccaggatgtgcaatagaagcaggggttgtcccctctgccagatctgtggggagctgcccaggccacccgtgcacctgtcctgcttcctgcagtccccactccctgcctcctttgagggactgggggacttggggtagggggacagacgggaaagggtctgaatgctctggcaatggcgagaagaagcgatcgccacactgccactctgctgcccagccaccaggatttctgcctggagccctttgccctgtccctgctgcctgaggtggcgtagagcagaggagaagaatttgctccaggccaggagcacaaatcgttgttcaatgaatttctctccaactcgaccttggtaaacggaaatgttgggggtgaagagaaacaatcactatttttttcttttttatctggtaaataattaaaagaaaaaccgaacacttgtcccgtctcctctttaggttttatcaagcgtcttgttccttggtgcgtccccacgcttccagcttctgcacactttggttctttctcttaaggccacaggagaatatggagagcctgaccgtgtgagctttaagctgcggcagctgctgctccatccaagtggccgctctcactgagctcccctggggaggactcattctttgaatggcctccctggttttagcagtgtgccattgctactgttttccattgcctgggctctgaggacctctttctctggaagttcccttacctgattaagaacacttctaaaataaatgcagccgtcttaaagccccctccctatgaatctcattaaataaccaggaatgattaatcacccaagaaaagactgaaaaagaagctacagccaggataccatacccagacagacttttcgtcttttcttctgagggaggttccaagagataacctgggagactgtatctgcataataagacaaccttagttcacagtgcagtaccacccctcaccttccatgacttgtccacaagctattgtttgtccttcagtcccattcagcatccaaagagaaccatttgcaaaccactgtcaggtatttgggtccattcatatacagccccccagctccctttccctagtgaagagagtatttaagtgccaaccattgggcctttctgtgtatgttcatattttttatatggcttccctgcttcatgcatgttaataaatttgttatgattttctcttgttaacctgtct

SEQ ID NO: 465799 - DNA, 452 bp, Homo sapiens
  misc_feature (7)..(7): n is a, c, g, or t
  misc_feature (116)..(117): n is a, c, g, or t
ggggggngggggggggggggtaaaaaaaaaataaaaaaaaaaaggggtgttcccccccacaaattttgggggaagcccaaacccccggggtaatttttttttttagaagaccccanntccccccccctaaggatgggggggtcttgggaaagggaacacccccggagaaggtctgaatgctctggcaatggcgagaagaagcgatcgccacactgccactctgctgcccagccaccaggatttctgcctggagccctttgccctgtccctgctgcctgaggtggcgtagagcagaggagaagaatttgctccaggccaggagcacaaatcgttgttcaatgaatttctctccaactcgaccttggtaaacggaaatgttgggggtgaagagaaacaatcactatttttttcttttttatctggtaaataattaaaagaaaaaccgaacactt

SEQ ID NO: 465800 - DNA, 254 bp, Homo sapiens
gttgcttcgcactccacgacccaaatggctgttccagggcgctagtcaacctcgtgccgaattcggcacgagggtttggtcccaagcagtaaatctccaaaaaggcaattggaaccgactctaaagccattgtaggaccctcaagtgaaggaccctcatgtaaaagagagaccaggcattctgagagtttcttgtttaaataactatgtacacacccagcaggcctggtctctcttttacatgagcctcgtgcc

SEQ ID NO: 465801 - DNA, 2859 bp, Homo sapiens
ggagagggagtgctaaaaattaggctaggtacgaggctggtgttaaggacaccagggccaggcttgtgttcgcagccttgccgtggctggggttccgatgtggtccccggagcgggaggccgaggccccagccgggggagacccggcgggccttctgccccccgagtgggaggaggacgaggagcgcatgtccttcctgttctccgctttcaagaggagtcgcgaggtgaacagcaccgactgggacagcaagatgggcttctgggcgccgttggtgctgagccacagccgccgccagggggtggtgcgcctgcgtctgcgggacttgcaggaggcctttcagcgcaaggggagcgtcccgctggggctggccacggtgctgcaggacctgctgcgtcgaggggagctgcagcgggagtcagacttcatggccagtgtagacagcagctggatctcctggggggttggggtcttcctgctgaagcctctcaagtggactctttctaacatgctgggagataataaggttccagctgaggaggtccttgtcgctgtggagctgttgaaggaaaaggctgaggaggtgtatcgtctgtatcagaactcgcccctctcctcccaccccgtggtggccctgtcagagctcagcaccctctgtgctaactcctgcccagatgagaggaccttctacttggtgttgctgcagctgcagaaggagaagagggtcacagtcctcgagcagaacggggagaagattgtgaagtttgcccgagggccacgtgccaaggtctctccagtcaatgacgtagatgttggggtgtaccagctgatgcagagtgaacagcttctctcacgcaaagtggagtccttatcccaggaagcagagaggtgtaaagaagaagcccgccgggcatgccgagcaggaaagaagcagctggcactgaggtctctcaaggccaagcaacggacagagaagcgcatcgaggccttgcatgccaagctggacactgttcaaggcatcctggaccggatctatgcctcccagacagatcagatggtttttaacgcctaccaggctggggtaggagcactcaaactctccatgaaggatgtcacagtggagaaggcagagagcctcgtggatcagatccaagagctctgtgacacccaggatgaagtttctcagactctggctggtggggtaacaaatggcttagattttgacagtgaagaactggagaaggaattggacatcctccttcaggataccaccaaagaacctttggatctgcctgacaacccccgcaataggcattttaccaacagcgtgcctaaccctaggatctcagatgctgaacttgaagctgaacttgagaaactgtccttatcagagggaggtttggtcccaagcagtaaatctccaaaaaggcaattggaaccgactctaaagccattgtaggaccctcaagtgaaggaccctcatgtaaaagagagaccaggcctgctgggtgtgtacatagttatttaaacaagaaactctcagaatgtgtttggaagaggagaaaggagaaccactgattttatctggatgctactacttactacaggacagatagaatttctggaagcgatgctccaaaggcttgctcccagctgtatcatggacctgccttctcatctttatagtgccacgatttatacagtcctgtgtctgacctgtcatttcatagcctgcagttcttgccattggcacacttagatttgtcttcacccaccagcttcgttccagcccatgaaggggaaagatttgcagctttgccaaatctgaatcagttcccactcccccctgcggttttttagaggggtttatcctgtcgctaatgtcagttaaatagcttattcctgtcccacttgatttcactggtaagaatgagaatgaaatacttaaaggttttatttgaggggacttagctgccattttatggaaaaacatgtagtataaaaggtttttctccagggtcatttgacagaattctccaggtgttcagagaaagaggtcgccccaagtggcccagagtcgtgacagtccggaggggctggtgtggccggtgggcgctgcctcttcatctgatggagccaggaggtccgccggtgggggaaaggcttcttccgaggcttctgcactcgcctgggaagaggcccagtcactacaggaccctgagatgtccagaccccttatgcaaagaggcaaaattgttgccttggccccatcatggagtaacttaaaaatacatatctatcttccagaacaagccacacaacaacacacctcccctccttgagcctggcacacagcaccgggctctctgaatttggaaagtgtttcattttgtggcctactgctcggggcaggggggctgagccaggatgtgcaatagaagcaggggttgtcccctctgccagatctgtggggagctgcccaggccacccgtgcacctgtcctgcttcctgcagtccccactccctgcctcctttgagggactgggggacttggggtagggggacagacgggaaagggtctgaatgctctggcaatggcgagaagaagcgatcgccacactgccactctgctgcccagccaccaggatttctgcctggagccctttgccctgtccctgctgcctgaggtggcgtagagcagaggagaagaatttgctccaggccaggagcacaaatcgttgttcaatgaatttctctccaactcgaccttggtaaacggaaatgttgggggtgaagagaaacaatcactatttttttcttttttatctggtaaataattaaaagaaaaaccgaacactt

SEQ ID NO: 465802 - DNA, 3327 bp, Homo sapiens
  misc_feature (6)..(6): n is a, c, g, or t
ggaacngaagccgggagggaacgagggcggaagcggaccagggccaggcttgtgttcgcagccttgccgtggctggggttccgatgtggtccccggagcgggaggccgaggccccagccgggggagacccggcgggccttctgccccccgagtgggaggaggacgaggagcgcatgtccttcctgttctccgctttcaagaggagtcgcgaggtgaacagcaccgactgggacagcaagatgggcttctgggcgccgttggtgctgagccacagccgccgccagggggtggtgcgcctgcgtctgcgggacttgcaggaggcctttcagcgcaaggggagcgtcccgctggggctggccacggtgctgcaggacctgctgcgtcgaggggagctgcagcgggagtcagacttcatggccagtgtagacagcagctggatctcctggggggttggggtcttcctgctgaagcctctcaagtggactctttctaacatgctgggagataataaggttccagctgaggaggtccttgtcgctgtggagctgttgaaggaaaaggctgaggaggtgtatcgtctgtatcagaactcgcccctctcctcccaccccgtggtggccctgtcagagctcagcaccctctgtgctaactcctgcccagatgagaggaccttctacttggtgttgctgcagctgcagaaggagaagagggtcacagtcctcgagcagaacggggagaagattgtgaagtttgcccgagggccacgtgccaaggtctctccagtcaatgacgtagatgttggggtgtaccagctgatgcagagtgaacagcttctctcacgcaaagtggagtccttatcccaggaagcagagaggtgtaaagaagaagcccgccgggcatgccgagcaggaaagaagcagctggcactgaggtctctcaaggccaagcaacggacagagaagcgcatcgaggccttgcatgccaagctggacactgttcaaggcatcctggaccggatctatgcctcccagacagatcagatggtttttaacgcctaccaggctggggtaggagcactcaaactctccatgaaggatgtcacagtggagaaggcagagagcctcgtggatcagatccaagagctctgtgacacccaggatgaagtttctcagactctggctggtggggtaacaaatggcttaggtgagtgtttcttcctttcatcctggaagacttcgcttccctgtgctgtgatgagtttgacagtagatttgcttttccgggtgcaggcaggcctctcctagcctgccctccctggggctcatctgcgggagcagtcagggaattgccatttcctcctcgacagctgtgctcatgacccatctgtgctgcggcattcctcattcacaaggcttctgactggaggatcctccttcaagggcagtgggaatcagggtcaggtccatggtgttaacagaatacacctccttggtgacttagcttggagtgtggaagaatcatctctgcttgaagctaccctcctgacttccgggatttttttttaatctgcaaggaggcctggcatcttttgtaaagctaagcgggttttggtaacctcagtcctgtactcattaatgcatttctcccttgagtttatgcatctttatgttgccttttctttccagattttgacagtgaagaactggagaaggaattggacatcctccttcaggataccaccaaagaacctttggatctgcctgacaacccccgcaataggcattttaccaacagcgtgcctaaccctaggatctcagatgctgaacttgaagctgaacttgagaaactgtccttatcagagggaggtttggtcccaagcagtaaatctccaaaaaggcaattggaaccgactctaaagccattgtaggaccctcaagtgaaggaccctcatgtaaaagagagaccaggcctgctgggtgtgtacatagttatttaaacaagaaactctcagaatgtgtttggaagaggagaaaggagaaccactgattttatctggatgctactacttactacaggacagatagaatttctggaagcgatgctccaaaggcttgctcccagctgtatcatggacctgccttctcatctttatagtgccacgatttatacagtcctgtgtctgacctgtcatttcatagcctgcagttcttgccattggcacacttagatttgtcttcacccaccagcttcgttccagcccatgaaggggaaagatttgcagctttgccaaatctgaatcagttcccactcccccctgcggttttttagaggggtttatcctgtcgctaatgtcagttaaatagcttattcctgtcccacttgatttcactggtaagaatgagaatgaaatacttaaaggttttatttgaggggacttagctgccattttatggaaaaacatgtagtataaaaggtttttctccagggtcatttgacagaattctccaggtgttcagagaaagaggtcgccccaagtggcccagagtcgtgacagtccggaggggctggtgtggccggtgggcgctgcctcttcatctgatggagccaggaggtccgccggtgggggaaaggcttcttccgaggcttctgcactcgcctgggaagaggcccagtcactacaggaccctgagatgtccagaccccttatgcaaagaggcaaaattgttgccttggccccatcatggagtaacttaaaaatacatatctatcttccagaacaagccacacaacaacacacctcccctccttgagcctggcacacagcaccgggctctctgaatttggaaagtgtttcattttgtggcctactgctcggggcaggggggctgagccaggatgtgcaatagaagcaggggttgtcccctctgccagatctgtggggagctgcccaggccacccgtgcacctgtcctgcttcctgcagtccccactccctgcctcctttgagggactgggggacttggggtagggggacagacgggaaagggtctgaatgctctggcaatggcgagaagaagcgatcgccacactgccactctgctgcccagccaccaggatttctgcctggagccctttgccctgtccctgctgcctgaggtggcgtagagcagaggagaagaatttgctccaggccaggagcacaaatcgttgttcaatgaatttctctccaactcgaccttggtaaacggaaatgttgggggtgaagagaaacaatcactatttttttcttttttatctggtaaataattaaaagaaaaaccgaacactt

SEQ ID NO: 465803 - DNA, 2791 bp, Homo sapiens
  misc_feature (6)..(6): n is a, c, g, or t
ggaacngaagccgggagggaacgagggcggaagcggaccagggccaggcttgtgttcgcagccttgccgtggctggggttccgatgtggtccccggagcgggaggccgaggccccagccgggggagacccggcgggccttctgccccccgagtgggaggaggacgaggagcgcatgtccttcctgttctccgctttcaagaggagtcgcgaggtgaacagcaccgactgggacagcaagatgggcttctgggcgccgttggtgctgagccacagccgccgccagggggtggtgcgcctgcgtctgcgggacttgcaggaggcctttcagcgcaaggggagcgtcccgctggggctggccacggtgctgcaggacctgctgcgtcgaggggagctgcagcgggagtcagacttcatggccagtgtagacagcagctggatctcctggggggttggggtcttcctgctgaagcctctcaagtggactctttctaacatgctgggagataataaggttccagctgaggaggtccttgtcgctgtggagctgttgaaggaaaaggctgaggaggtgtatcgtctgtatcagaactcgcccctctcctcccaccccgtggtggccctgtcagagctcagcaccctctgtgctaactcctgcccagatgagaggaccttctacttggtgttgctgcagctgcagaaggagaagagggtcacagtcctcgagcagaacggggagaagattgtgaagtttgcccgagggccacgtgccaaggtctctccagtcaatgacgtagatgttggggtgtaccagctgatgcagagtgaacagcttctctcacgcaaagtggagtccttatcccaggaagcagagaggtgtaaagaagaagcccgccgggcatgccgagcaggaaagaagcagctggcactgaggtctctcaaggccaagcaacggacagagaagcgcatcgaggccttgcatgccaagctggacactgttcaaggcatcctggaccggatctatgcctcccagacagatcagatggtttttaacgcctaccaggctggggtaggagcactcaaactctccatgaaggatgtcacagtggagaaggcagagagcctcgtggatcagatccaagagctctgtgacacccaggatgaagtttctcagactctggctggtggggtaacaaatggcttagattttgacagtgaagaactggagaaggaattggacatcctccttcaggataccaccaaagaacctttggatctgcctgacaacccccgcaataggcattttaccaacagcgtgcctaaccctaggatctcagatgctgaacttgaagctgaacttgagaaactgtccttatcagagggaggtttggtcccaagcagtaaatctccaaaaaggcaattggaaccgactctaaagccattgtaggaccctcaagtgaaggaccctcatgtaaaagagagaccaggcctgctgggtgtgtacatagttatttaaacaagaaactctcagaatgtgtttggaagaggagaaaggagaaccactgattttatctggatgctactacttactacaggacagatagaatttctggaagcgatgctccaaaggcttgctcccagctgtatcatggacctgccttctcatctttatagtgccacgatttatacagtcctgtgtctgacctgtcatttcatagcctgcagttcttgccattggcacacttagatttgtcttcacccaccagcttcgttccagcccatgaaggggaaagatttgcagctttgccaaatctgaatcagttcccactcccccctgcggttttttagaggggtttatcctgtcgctaatgtcagttaaatagcttattcctgtcccacttgatttcactggtaagaatgagaatgaaatacttaaaggttttatttgaggggacttagctgccattttatggaaaaacatgtagtataaaaggtttttctccagggtcatttgacagaattctccaggtgttcagagaaagaggtcgccccaagtggcccagagtcgtgacagtccggaggggctggtgtggccggtgggcgctgcctcttcatctgatggagccaggaggtccgccggtgggggaaaggcttcttccgaggcttctgcactcgcctgggaagaggcccagtcactacaggaccctgagatgtccagaccccttatgcaaagaggcaaaattgttgccttggccccatcatggagtaacttatgagcctggcacacagcaccgggctctctgaatttggaaagtgtttcattttgtggcctactgctcggggcaggggggctgagccaggatgtgcaatagaagcaggggttgtcccctctgccagatctgtggggagctgcccaggccacccgtgcacctgtcctgcttcctgcagtccccactccctgcctcctttgagggactgggggacttggggtagggggacagacgggaaagggtctgaatgctctggcaatggcgagaagaagcgatcgccacactgccactctgctgcccagccaccaggatttctgcctggagccctttgccctgtccctgctgcctgaggtggcgtagagcagaggagaagaatttgctccaggccaggagcacaaatcgttgttcaatgaatttctctccaactcgaccttggtaaacggaaatgttgggggtgaagagaaacaatcactatttttttcttttttatctggtaaataattaaaagaaaaaccgaacactt

SEQ ID NO: 465804 - DNA, 2579 bp, Homo sapiens
aagcaggctggtactggcctgggagatttttgggcatatcgtcgacccacgctggtcgttctgcgcaaggggagcgtcccgctggggctggccacggtgctgcaggacctgctgcgtcgaggggagctgcagcgggagtcagacttcatggccagtgtagacagcagctggatctcctggggggttggggtcttcctgctgaagcctctcaagtggactctttctaacatgctgggagataataaggttccagctgaggaggtccttgtcgctgtggagctgttgaaggaaaaggctgaggaggtgtatcgtctgtatcagaactcgcccctctcctcccaccccgtggtggccctgtcagagctcagcaccctctgtgctaactcctgcccagatgagaggaccttctacttggtgttgctgcagctgcagaaggagaagagggtcacagtcctcgagcagaacggggagaagattgtgaagtttgcccgagggccacgtgccaaggtctctccagtcaatgacgtagatgttggggtgtaccagctgatgcagagtgaacagcttctctcacgcaaagtggagtccttatcccaggaagcagagaggtgtaaagaagaagcccgccgggcatgccgagcaggaaagaagcagctggcactgaggtctctcaaggccaagcaacggacagagaagcgcatcgaggccttgcatgccaagctggacactgttcaaggcatcctggaccggatctatgcctcccagacagatcagatggtttttaacgcctaccaggctggggtaggagcactcaaactctccatgaaggatgtcacagtggagaaggcagagagcctcgtggatcagatccaagagctctgtgacacccaggatgaagtttctcagactctggctggtggggtaacaaatggcttagattttgacagtgaagaactggagaaggaattggacatcctccttcaggataccaccaaagaacctttggatctgcctgacaacccccgcaataggcattttaccaacagcgtgcctaaccctaggatctcagatgctgaacttgaagctgaacttgagaaactgtccttatcagagggaggtttggtcccaagcagtaaatctccaaaaaggcaattggaaccgactctaaagccattgtaggaccctcaagtgaaggaccctcatgtaaaagagagaccaggcctgctgggtgtgtacatagttatttaaacaagaaactctcagaatgtgtttggaagaggagaaaggagaaccactgattttatctggatgctactacttactacaggacagatagaatttctggaagcgatgctccaaaggcttgctcccagctgtatcatggacctgccttctcatctttatagtgccacgatttatacagtcctgtgtctgacctgtcatttcatagcctgcagttcttgccattggcacacttagatttgtcttcacccaccagcttcgttccagcccatgaaggggaaagatttgcagctttgccaaatctgaatcagttcccactcccccctgcggttttttagaggggtttatcctgtcgctaatgtcagttaaatagcttattcctgtcccacttgatttcactggtaagaatgagaatgaaatacttaaaggttttatttgaggggacttagctgccattttatggaaaaacatgtagtataaaaggtttttctccagggtcatttgacagaattctccaggtgttcagagaaagaggtcgccccaagtggcccagagtcgtgacagtccggaggggctggtgtggccggtgggcgctgcctcttcatctgatggagccaggaggtccgccggtgggggaaaggcttcttccgaggcttctgcactcgcctgggaagaggcccagtcactacaggaccctgagatgtccagaccccttatgcaaagaggcaaaattgttgccttggccccatcatggagtaacttaaaaatacatatctatcttccagaacaagccacacaacaacacacctcccctccttgagcctggcacacagcaccgggctctctgaatttggaaagtgtttcattttgtggcctactgctcggggcaggggggctgagccaggatgtgcaatagaagcaggggttgtcccctctgccagatctgtggggagctgcccaggccacccgtgcacctgtcctgcttcctgcagtccccactccctgcctcctttgagggactgggggacttggggtagggggacagacgggaaagggtctgaatgctctggcaatggcgagaagaagcgatcgccacactgccactctgctgcccagccaccaggatttctgcctggagccctttgccctgtccctgctgcctgaggtggcgtagagcagaggagaagaatttgctccaggccaggagcacaaatcgttgttcaatgaatttctctccaactcgaccttggtaaacggaaatgttgggggtgaagagaaacaatcactatttttttcttttttatctggtaaataattaaaagaaaaaccgaacactt

SEQ ID NO: 465805 - DNA, 2696 bp, Homo sapiens
  misc_feature (22)..(22): n is a, c, g, or t
  misc_feature (74)..(74): n is a, c, g, or t
  misc_feature (86)..(86): n is a, c, g, or t
  misc_feature (92)..(92): n is a, c, g, or t
  misc_feature (110)..(110): n is a, c, g, or t
  misc_feature (137)..(137): n is a, c, g, or t
cattctgggcccaggccacaantttccccctttcataaggggtctggacatctcagggtcctgtagtgactggncctcttcccagncgagtncagaaccctcggaagaancctttcccccaccggcggacctcctgnctccatcagatgaagaggcagcgcccaccggccacaccagcccctccggactgtcacgactctgggccacttggggcgacctctttctctgaacactcgaggggagctgcagcgggagtcagacttcatggccagtgtagacagcagctggatctcctggggggttggggtcttcctgctgaagcctctcaagtggactctttctaacatgctgggagataataaggttccagctgaggaggtccttgtcgctgtggagctgttgaaggaaaaggctgaggaggtgtatcgtctgtatcagaactcgcccctctcctcccaccccgtggtggccctgtcagagctcagcaccctctgtgctaactcctgcccagatgagaggaccttctacttggtgttgctgcagctgcagaaggagaagagggtcacagtcctcgagcagaacggggagaagattgtgaagtttgcccgagggccacgtgccaaggtctctccagtcaatgacgtagatgttggggtgtaccagctgatgcagagtgaacagcttctctcacgcaaagtggagtccttatcccaggaagcagagaggtgtaaagaagaagcccgccgggcatgccgagcaggaaagaagcagctggcactgaggtctctcaaggccaagcaacggacagagaagcgcatcgaggccttgcatgccaagctggacactgttcaaggcatcctggaccggatctatgcctcccagacagatcagatggtttttaacgcctaccaggctggggtaggagcactcaaactctccatgaaggatgtcacagtggagaaggcagagagcctcgtggatcagatccaagagctctgtgacacccaggatgaagtttctcagactctggctggtggggtaacaaatggcttagattttgacagtgaagaactggagaaggaattggacatcctccttcaggataccaccaaagaacctttggatctgcctgacaacccccgcaataggcattttaccaacagcgtgcctaaccctaggatctcagatgctgaacttgaagctgaacttgagaaactgtccttatcagagggaggtttggtcccaagcagtaaatctccaaaaaggcaattggaaccgactctaaagccattgtaggaccctcaagtgaaggaccctcatgtaaaagagagaccaggcctgctgggtgtgtacatagttatttaaacaagaaactctcagaatgtgtttggaagaggagaaaggagaaccactgattttatctggatgctactacttactacaggacagatagaatttctggaagcgatgctccaaaggcttgctcccagctgtatcatggacctgccttctcatctttatagtgccacgatttatacagtcctgtgtctgacctgtcatttcatagcctgcagttcttgccattggcacacttagatttgtcttcacccaccagcttcgttccagcccatgaaggggaaagatttgcagctttgccaaatctgaatcagttcccactcccccctgcggttttttagaggggtttatcctgtcgctaatgtcagttaaatagcttattcctgtcccacttgatttcactggtaagaatgagaatgaaatacttaaaggttttatttgaggggacttagctgccattttatggaaaaacatgtagtataaaaggtttttctccagggtcatttgacagaattctccaggtgttcagagaaagaggtcgccccaagtggcccagagtcgtgacagtccggaggggctggtgtggccggtgggcgctgcctcttcatctgatggagccaggaggtccgccggtgggggaaaggcttcttccgaggcttctgcactcgcctgggaagaggcccagtcactacaggaccctgagatgtccagaccccttatgcaaagaggcaaaattgttgccttggccccatcatggagtaacttaaaaatacatatctatcttccagaacaagccacacaacaacacacctcccctccttgagcctggcacacagcaccgggctctctgaatttggaaagtgtttcattttgtggcctactgctcggggcaggggggctgagccaggatgtgcaatagaagcaggggttgtcccctctgccagatctgtggggagctgcccaggccacccgtgcacctgtcctgcttcctgcagtccccactccctgcctcctttgagggactgggggacttggggtagggggacagacgggaaagggtctgaatgctctggcaatggcgagaagaagcgatcgccacactgccactctgctgcccagccaccaggatttctgcctggagccctttgccctgtccctgctgcctgaggtggcgtagagcagaggagaagaatttgctccaggccaggagcacaaatcgttgttcaatgaatttctctccaactcgaccttggtaaacggaaatgttgggggtgaagagaaacaatcactatttttttcttttttatctggtaaataattaaaagaaaaaccgaacactt

SEQ ID NO: 465806 - DNA, 2588 bp, Homo sapiens
atctgtccctttgtttccaggtgtaaagaagaagcccgccgggcatgccgagcaggaaagaagcagctggtttttaacgcctaccaggctggggtaggagcactcaaactctccatgaaggatgtcacagtggagaaggcagagagcctcgtggatcagatccaagaggtacagaaaggggccagggagggacacacagagaaggaggtgacagagaacagatttgacttcattgcacatcctctttaacgaaacttgacttgtgaccttgtgaacttgaggaagctttccttgattctcacttggggcaggattgctttgtaaccctagatattttccaccaaagactgagatgctcagagccaccatgcccagctcaaggctttgcacttgtctcttacagctctgtgacacccaggatgaagtttctcagactctggctggtggggtaacaaatggcttaggtgagtgtttcttcctttcatcctggaagacttcgcttccctgtgctgtgatgagtttgacagtagatttgcttttccgggtgcaggcaggcctctcctagcctgccctccctggggctcatctgcgggagcagtcagggaattgccatttcctcctcgacagctgtgctcatgacccatctgtgctgcggcattcctcattcacaaggcttctgactggaggatcctccttcaagggcagtgggaatcagggtcaggtccatggtgttaacagaatacacctccttggtgacttagcttggagtgtggaagaatcatctctgcttgaagctaccctcctgacttccgggatttttttttaatctgcaaggaggcctggcatcttttgtaaagctaagcgggttttggtaacctcagtcctgtactcattaatgcatttctcccttgagtttatgcatctttatgttgccttttctttccagattttgacagtgaagaactggagaaggaattggacatcctccttcaggataccaccaaagaacctttggatctgcctgacaacccccgcaataggcattttaccaacagcgtgcctaaccctaggatctcagatgctgaacttgaagctgaacttgagaaactgtccttatcagagggaggtttggtcccaagcagtaaatctccaaaaaggcaattggaaccgactctaaagccattgtaggaccctcaagtgaaggaccctcatgtaaaagagagaccaggcctgctgggtgtgtacatagttatttaaacaagaaactctcagaatgtgtttggaagaggagaaaggagaaccactgattttatctggatgctactacttactacaggacagatagaatttctggaagcgatgctccaaaggcttgctcccagctgtatcatggacctgccttctcatctttatagtgccacgatttatacagtcctgtgtctgacctgtcatttcatagcctgcagttcttgccattggcacacttagatttgtcttcacccaccagcttcgttccagcccatgaaggggaaagatttgcagctttgccaaatctgaatcagttcccactcccccctgcggttttttagaggggtttatcctgtcgctaatgtcagttaaatagcttattcctgtcccacttgatttcactggtaagaatgagaatgaaatacttaaaggttttatttgaggggacttagctgccattttatggaaaaacatgtagtataaaaggtttttctccagggtcatttgacagaattctccaggtgttcagagaaagaggtcgccccaagtggcccagagtcgtgacagtccggaggggctggtgtggccggtgggcgctgcctcttcatctgatggagccaggaggtccgccggtgggggaaaggcttcttccgaggcttctgcactcgcctgggaagaggcccagtcactacaggaccctgagatgtccagaccccttatgcaaagaggcaaaattgttgccttggccccatcatggagtaacttaaaaatacatatctatcttccagaacaagccacacaacaacacacctcccctccttgagcctggcacacagcaccgggctctctgaatttggaaagtgtttcattttgtggcctactgctcggggcaggggggctgagccaggatgtgcaatagaagcaggggttgtcccctctgccagatctgtggggagctgcccaggccacccgtgcacctgtcctgcttcctgcagtccccactccctgcctcctttgagggactgggggacttggggtagggggacagacgggaaagggtctgaatgctctggcaatggcgagaagaagcgatcgccacactgccactctgctgcccagccaccaggatttctgcctggagccctttgccctgtccctgctgcctgaggtggcgtagagcagaggagaagaatttgctccaggccaggagcacaaatcgttgttcaatgaatttctctccaactcgaccttggtaaacggaaatgttgggggtgaagagaaacaatcactatttttttcttttttatctggtaaataattaaaagaaaaaccgaacactt

SEQ ID NO: 465807 - DNA, 361 bp, Homo sapiens
gtgagccaccacacctggcccaaggtgagtgtttcttcctttcatcctggaagacttcgcttccctgtgctgtgatgagtttgacagtagatttgcttttccgggtgcaggcaggcctctcctagcctgccctccctggggctcatctgcgggagcagtcagggaattgccatttcctcctcgacagctgtgctcatgacccatctgtgctgcggcattcctcattcacaaggcttctgactggaggatcctccttcaagggcagtgggaatcagggtcaggtccatggtgttaacagaatacacctccttggtgacttagcttggagtgtggaagaatcatctctgcttgaagctaccct

SEQ ID NO: 465808 - DNA, 463 bp, Homo sapiens
ttggagggcatatggccttctggctgacagagttgatgggcccaagcccaattactccatttgccagagtaccagagccctgtagggagttgagggttgtttatattaagactcagtctcttaatcactggaatgccttcatcttcaagattttcctgttatagtgttcagtcatttctttgccttgcaggtttggtcccaagcagtaaatctccaaaaaggcaattggaaccgactctaaagccattgtaggaccctcaagtgaaggaccctcatgtaaaagagagaccaggcctgctgggtgtgtacatagttatttaaacaagaaactctcagaatgtgtttggaagaggagaaaggagaaccactgattttatctggatgctactacttactacaggacagatagaatttctggaagcgatgctccaaaggcttgctcccagctgtatcatggacctgc

SEQ ID NO: 465809 - DNA, 2845 bp, Homo sapiens
  misc_feature (6)..(6): n is a, c, g, or t
ggaacngaagccgggagggaacgagggcggaagcggaccagggccaggcttgtgttcgcagccttgccgtggctggggttccgatgtggtccccggagcgggaggccgaggccccagccgggggagacccggcgggccttctgccccccgagtgggaggaggacgaggagcgcatgtccttcctgttctccgctttcaagaggagtcgcgaggtgaacagcaccgactgggacagcaagatgggcttctgggcgccgttggtgctgagccacagccgccgccagggggtggtgcgcctgcgtctgcgggacttgcaggaggcctttcagcgcaaggggagcgtcccgctggggctggccacggtgctgcaggacctgctgcgtcgaggggagctgcagcgggagtcagacttcatggccagtgtagacagcagctggatctcctggggggttggggtcttcctgctgaagcctctcaagtggactctttctaacatgctgggagataataaggttccagctgaggaggtccttgtcgctgtggagctgttgaaggaaaaggctgaggaggtgtatcgtctgtatcagaactcgcccctctcctcccaccccgtggtggccctgtcagagctcagcaccctctgtgctaactcctgcccagatgagaggaccttctacttggtgttgctgcagctgcagaaggagaagagggtcacagtcctcgagcagaacggggagaagattgtgaagtttgcccgagggccacgtgccaaggtctctccagtcaatgacgtagatgttggggtgtaccagctgatgcagagtgaacagcttctctcacgcaaagtggagtccttatcccaggaagcagagaggtgtaaagaagaagcccgccgggcatgccgagcaggaaagaagcagctggcactgaggtctctcaaggccaagcaacggacagagaagcgcatcgaggccttgcatgccaagctggacactgttcaaggcatcctggaccggatctatgcctcccagacagatcagatggtttttaacgcctaccaggctggggtaggagcactcaaactctccatgaaggatgtcacagtggagaaggcagagagcctcgtggatcagatccaagagctctgtgacacccaggatgaagtttctcagactctggctggtggggtaacaaatggcttagattttgacagtgaagaactggagaaggaattggacatcctccttcaggataccaccaaagaacctttggatctgcctgacaacccccgcaataggcattttaccaacagcgtgcctaaccctaggatctcagatgctgaacttgaagctgaacttgagaaactgtccttatcagagggaggtttggtcccaagcagtaaatctccaaaaaggcaattggaaccgactctaaagccattgtaggaccctcaagtgaaggaccctcatgtaaaagagagaccaggcctgctgggtgtgtacatagttatttaaacaagaaactctcagaatgtgtttggaagaggagaaaggagaaccactgattttatctggatgctactacttactacaggacagatagaatttctggaagcgatgctccaaaggcttgctcccagctgtatcatggacctgccttctcatctttatagtgccacgatttatacagtcctgtgtctgacctgtcatttcatagcctgcagttcttgccattggcacacttagatttgtcttcacccaccagcttcgttccagcccatgaaggggaaagatttgcagctttgccaaatctgaatcagttcccactcccccctgcggttttttagaggggtttatcctgtcgctaatgtcagttaaatagcttattcctgtcccacttgatttcactggtaagaatgagaatgaaatacttaaaggttttatttgaggggacttagctgccattttatggaaaaacatgtagtataaaaggtttttctccagggtcatttgacagaattctccaggtgttcagagaaagaggtcgccccaagtggcccagagtcgtgacagtccggaggggctggtgtggccggtgggcgctgcctcttcatctgatggagccaggaggtccgccggtgggggaaaggcttcttccgaggcttctgcactcgcctgggaagaggcccagtcactacaggaccctgagatgtccagaccccttatgcaaagaggcaaaattgttgccttggccccatcatggagtaacttaaaaatacatatctatcttccagaacaagccacacaacaacacacctcccctccttgagcctggcacacagcaccgggctctctgaatttggaaagtgtttcattttgtggcctactgctcggggcaggggggctgagccaggatgtgcaatagaagcaggggttgtcccctctgccagatctgtggggagctgcccaggccacccgtgcacctgtcctgcttcctgcagtccccactccctgcctcctttgagggactgggggacttggggtagggggacagacgggaaagggtctgaatgctctggcaatggcgagaagaagcgatcgccacactgccactctgctgcccagccaccaggatttctgcctggagccctttgccctgtccctgctgcctgaggtggcgtagagcagaggagaagaatttgctccaggccaggagcacaaatcgttgttcaatgaatttctctccaactcgaccttggtaaacggaaatgttgggggtgaagagaaacaatcactatttttttcttttttatctggtaaataattaaaagaaaaaccgaacactt

SEQ ID NO: 465810 - DNA, 2851 bp, Homo sapiens
tactgcagtacaccccggagtaatgtagcgaggctgggtggcgccagggccaggcttgtgttcgcagccttgccgtggctggggttccgatgtggtccccggagcgggaggccgaggccccagccgggggagacccggcgggccttctgccccccgagtgggaggaggacgaggagcgcatgtccttcctgttctccgctttcaagaggagtcgcgaggtgaacagcaccgactgggacagcaagatgggcttctgggcgccgttggtgctgagccacagccgccgccagggggtggtgcgcctgcgtctgcgggacttgcaggaggcctttcagcgcaaggggagcgtcccgctggggctggccacggtgctgcaggacctgctgcgtcgaggggagctgcagcgggagtcagacttcatggccagtgtagacagcagctggatctcctggggggttggggtcttcctgctgaagcctctcaagtggactctttctaacatgctgggagataataaggttccagctgaggaggtccttgtcgctgtggagctgttgaaggaaaaggctgaggaggtgtatcgtctgtatcagaactcgcccctctcctcccaccccgtggtggccctgtcagagctcagcaccctctgtgctaactcctgcccagatgagaggaccttctacttggtgttgctgcagctgcagaaggagaagagggtcacagtcctcgagcagaacggggagaagattgtgaagtttgcccgagggccacgtgccaaggtctctccagtcaatgacgtagatgttggggtgtaccagctgatgcagagtgaacagcttctctcacgcaaagtggagtccttatcccaggaagcagagaggtgtaaagaagaagcccgccgggcatgccgagcaggaaagaagcagctggcactgaggtctctcaaggccaagcaacggacagagaagcgcatcgaggccttgcatgccaagctggacactgttcaaggcatcctggaccggatctatgcctcccagacagatcagatggtttttaacgcctaccaggctggggtaggagcactcaaactctccatgaaggatgtcacagtggagaaggcagagagcctcgtggatcagatccaagagctctgtgacacccaggatgaagtttctcagactctggctggtggggtaacaaatggcttagattttgacagtgaagaactggagaaggaattggacatcctccttcaggataccaccaaagaacctttggatctgcctgacaacccccgcaataggcattttaccaacagcgtgcctaaccctaggatctcagatgctgaacttgaagctgaacttgagaaactgtccttatcagagggaggtttggtcccaagcagtaaatctccaaaaaggcaattggaaccgactctaaagccattgtaggaccctcaagtgaaggaccctcatgtaaaagagagaccaggcctgctgggtgtgtacatagttatttaaacaagaaactctcagaatgtgtttggaagaggagaaaggagaaccactgattttatctggatgctactacttactacaggacagatagaatttctggaagcgatgctccaaaggcttgctcccagctgtatcatggacctgccttctcatctttatagtgccacgatttatacagtcctgtgtctgacctgtcatttcatagcctgcagttcttgccattggcacacttagatttgtcttcacccaccagcttcgttccagcccatgaaggggaaagatttgcagctttgccaaatctgaatcagttcccactcccccctgcggttttttagaggggtttatcctgtcgctaatgtcagttaaatagcttattcctgtcccacttgatttcactggtaagaatgagaatgaaatacttaaaggttttatttgaggggacttagctgccattttatggaaaaacatgtagtataaaaggtttttctccagggtcatttgacagaattctccaggtgttcagagaaagaggtcgccccaagtggcccagagtcgtgacagtccggaggggctggtgtggccggtgggcgctgcctcttcatctgatggagccaggaggtccgccggtgggggaaaggcttcttccgaggcttctgcactcgcctgggaagaggcccagtcactacaggaccctgagatgtccagaccccttatgcaaagaggcaaaattgttgccttggccccatcatggagtaacttaaaaatacatatctatcttccagaacaagccacacaacaacacacctcccctccttgagcctggcacacagcaccgggctctctgaatttggaaagtgtttcattttgtggcctactgctcggggcaggggggctgagccaggatgtgcaatagaagcaggggttgtcccctctgccagatctgtggggagctgcccaggccacccgtgcacctgtcctgcttcctgcagtccccactccctgcctcctttgagggactgggggacttggggtagggggacagacgggaaagggtctgaatgctctggcaatggcgagaagaagcgatcgccacactgccactctgctgcccagccaccaggatttctgcctggagccctttgccctgtccctgctgcctgaggtggcgtagagcagaggagaagaatttgctccaggccaggagcacaaatcgttgttcaatgaatttctctccaactcgaccttggtaaacggaaatgttgggggtgaagagaaacaatcactatttttttcttttttatctggtaaataattaaaagaaaaaccgaacactt

SEQ ID NO: 465811 - DNA, 2784 bp, Homo sapiens
  misc_feature (6)..(6): n is a, c, g, or t
ggaacngaagccgggagggaacgagggcggaagcggaccagggccaggcttgtgttcgcagccttgccgtggctggggttccgatgtggtccccggagcgggaggccgaggccccagccgggggagacccggcgggccttctgccccccgagtgggaggaggacgaggagcgcatgtccttcctgttctccgctttcaagaggagtcgcgaggtgaacagcaccgactgggacagcaagatgggcttctgggcgccgttggtgctgagccacagccgccgccagggggtggtgcgcctgcgtctgcgggacttgcaggaggcctttcagcgcaaggggagcgtcccgctggggctggccacggtgctgcaggacctgctgcgtcgaggggagctgcagcgggagtcagacttcatggccagtgtagacagcagctggatctcctggggggttggggtcttcctgctgaagcctctcaagtggactctttctaacatgctgggagataataaggttccagctgaggaggtccttgtcgctgtggagctgttgaaggaaaaggctgaggaggtgtatcgtctgtatcagaactcgcccctctcctcccaccccgtggtggccctgtcagagctcagcaccctctgtgctaactcctgcccagatgagaggaccttctacttggtgttgctgcagctgcagaaggagaagagggtcacagtcctcgagcagaacggggagaagattgtgaagtttgcccgagggccacgtgccaaggtctctccagtcaatgacgtagatgttggggtgtaccagctgatgcagagtgaacagcttctctcacgcaaagtggagtccttatcccaggaagcagagaggtgtaaagaagaagcccgccgggcatgccgagcaggaaagaagcagctggcactgaggtctctcaaggccaagcaacggacagagaagcgcatcgaggccttgcatgccaagctggacactgttcaaggcatcctggaccggatctatgcctcccagacagatcagatggtttttaacgcctaccaggctggggtaggagcactcaaactctccatgaaggatgtcacagtggagaaggcagagagcctcgtggatcagatccaagagattttgacagtgaagaactggagaaggaattggacatcctccttcaggataccaccaaagaacctttggatctgcctgacaacccccgcaataggcattttaccaacagcgtgcctaaccctaggatctcagatgctgaacttgaagctgaacttgagaaactgtccttatcagagggaggtttggtcccaagcagtaaatctccaaaaaggcaattggaaccgactctaaagccattgtaggaccctcaagtgaaggaccctcatgtaaaagagagaccaggcctgctgggtgtgtacatagttatttaaacaagaaactctcagaatgtgtttggaagaggagaaaggagaaccactgattttatctggatgctactacttactacaggacagatagaatttctggaagcgatgctccaaaggcttgctcccagctgtatcatggacctgccttctcatctttatagtgccacgatttatacagtcctgtgtctgacctgtcatttcatagcctgcagttcttgccattggcacacttagatttgtcttcacccaccagcttcgttccagcccatgaaggggaaagatttgcagctttgccaaatctgaatcagttcccactcccccctgcggttttttagaggggtttatcctgtcgctaatgtcagttaaatagcttattcctgtcccacttgatttcactggtaagaatgagaatgaaatacttaaaggttttatttgaggggacttagctgccattttatggaaaaacatgtagtataaaaggtttttctccagggtcatttgacagaattctccaggtgttcagagaaagaggtcgccccaagtggcccagagtcgtgacagtccggaggggctggtgtggccggtgggcgctgcctcttcatctgatggagccaggaggtccgccggtgggggaaaggcttcttccgaggcttctgcactcgcctgggaagaggcccagtcactacaggaccctgagatgtccagaccccttatgcaaagaggcaaaattgttgccttggccccatcatggagtaacttaaaaatacatatctatcttccagaacaagccacacaacaacacacctcccctccttgagcctggcacacagcaccgggctctctgaatttggaaagtgtttcattttgtggcctactgctcggggcaggggggctgagccaggatgtgcaatagaagcaggggttgtcccctctgccagatctgtggggagctgcccaggccacccgtgcacctgtcctgcttcctgcagtccccactccctgcctcctttgagggactgggggacttggggtagggggacagacgggaaagggtctgaatgctctggcaatggcgagaagaagcgatcgccacactgccactctgctgcccagccaccaggatttctgcctggagccctttgccctgtccctgctgcctgaggtggcgtagagcagaggagaagaatttgctccaggccaggagcacaaatcgttgttcaatgaatttctctccaactcgaccttggtaaacggaaatgttgggggtgaagagaaacaatcactatttttttcttttttatctggtaaataattaaaagaaaaaccgaacactt

SEQ ID NO: 465812 - DNA, 2675 bp, Homo sapiens
  misc_feature (6)..(6): n is a, c, g, or t
ggaacngaagccgggagggaacgagggcggaagcggaccagggccaggcttgtgttcgcagccttgccgtggctggggttccgatgtggtccccggagcgggaggccgaggccccagccgggggagacccggcgggccttctgccccccgagtgggaggaggacgaggagcgcatgtccttcctgttctccgctttcaagaggagtcgcgagtcgaggggagctgcagcgggagtcagacttcatggccagtgtagacagcagctggatctcctggggggttggggtcttcctgctgaagcctctcaagtggactctttctaacatgctgggagataataaggttccagctgaggaggtccttgtcgctgtggagctgttgaaggaaaaggctgaggaggtgtatcgtctgtatcagaactcgcccctctcctcccaccccgtggtggccctgtcagagctcagcaccctctgtgctaactcctgcccagatgagaggaccttctacttggtgttgctgcagctgcagaaggagaagagggtcacagtcctcgagcagaacggggagaagattgtgaagtttgcccgagggccacgtgccaaggtctctccagtcaatgacgtagatgttggggtgtaccagctgatgcagagtgaacagcttctctcacgcaaagtggagtccttatcccaggaagcagagaggtgtaaagaagaagcccgccgggcatgccgagcaggaaagaagcagctggcactgaggtctctcaaggccaagcaacggacagagaagcgcatcgaggccttgcatgccaagctggacactgttcaaggcatcctggaccggatctatgcctcccagacagatcagatggtttttaacgcctaccaggctggggtaggagcactcaaactctccatgaaggatgtcacagtggagaaggcagagagcctcgtggatcagatccaagagctctgtgacacccaggatgaagtttctcagactctggctggtggggtaacaaatggcttagattttgacagtgaagaactggagaaggaattggacatcctccttcaggataccaccaaagaacctttggatctgcctgacaacccccgcaataggcattttaccaacagcgtgcctaaccctaggatctcagatgctgaacttgaagctgaacttgagaaactgtccttatcagagggaggtttggtcccaagcagtaaatctccaaaaaggcaattggaaccgactctaaagccattgtaggaccctcaagtgaaggaccctcatgtaaaagagagaccaggcctgctgggtgtgtacatagttatttaaacaagaaactctcagaatgtgtttggaagaggagaaaggagaaccactgattttatctggatgctactacttactacaggacagatagaatttctggaagcgatgctccaaaggcttgctcccagctgtatcatggacctgccttctcatctttatagtgccacgatttatacagtcctgtgtctgacctgtcatttcatagcctgcagttcttgccattggcacacttagatttgtcttcacccaccagcttcgttccagcccatgaaggggaaagatttgcagctttgccaaatctgaatcagttcccactcccccctgcggttttttagaggggtttatcctgtcgctaatgtcagttaaatagcttattcctgtcccacttgatttcactggtaagaatgagaatgaaatacttaaaggttttatttgaggggacttagctgccattttatggaaaaacatgtagtataaaaggtttttctccagggtcatttgacagaattctccaggtgttcagagaaagaggtcgccccaagtggcccagagtcgtgacagtccggaggggctggtgtggccggtgggcgctgcctcttcatctgatggagccaggaggtccgccggtgggggaaaggcttcttccgaggcttctgcactcgcctgggaagaggcccagtcactacaggaccctgagatgtccagaccccttatgcaaagaggcaaaattgttgccttggccccatcatggagtaacttaaaaatacatatctatcttccagaacaagccacacaacaacacacctcccctccttgagcctggcacacagcaccgggctctctgaatttggaaagtgtttcattttgtggcctactgctcggggcaggggggctgagccaggatgtgcaatagaagcaggggttgtcccctctgccagatctgtggggagctgcccaggccacccgtgcacctgtcctgcttcctgcagtccccactccctgcctcctttgagggactgggggacttggggtagggggacagacgggaaagggtctgaatgctctggcaatggcgagaagaagcgatcgccacactgccactctgctgcccagccaccaggatttctgcctggagccctttgccctgtccctgctgcctgaggtggcgtagagcagaggagaagaatttgctccaggccaggagcacaaatcgttgttcaatgaatttctctccaactcgaccttggtaaacggaaatgttgggggtgaagagaaacaatcactatttttttcttttttatctggtaaataattaaaagaaaaaccgaacactt

SEQ ID NO: 465813 - DNA, 2534 bp, Homo sapiens
ccctctttctggagcccttggatgcgtgtgtgccattgactaggatccttgtgcggtgaggtgcccgttgcatgggacagtgtaggacgagtttgttgtactctcgcgtgagtcgccgtcgcctgtctttcctgctggttccctctcttctgcaactcttccctaggcactgctggcgatgattgtaagttgttcgcgagacatggaattgatgtccgtcgttgtcatgtgaagcttttcatggaaaaggctgaggaggtgtatcgtctgtatcagaactcgcccctctcctcccaccccgtggtggccctgtcagagctcagcaccctctgtgctaactcctgcccagatgagaggaccttctacttggtgttgctgcagctgcagaaggagaagagggtcacagtcctcgagcagaacggggagaagattgtgaagtttgcccgagggccacgtgccaaggtctctccagtcaatgacgtagatgttggggtgtaccagctgatgcagagtgaacagcttctctcacgcaaagtggagtccttatcccaggaagcagagaggtgtaaagaagaagcccgccgggcatgccgagcaggaaagaagcagctggcactgaggtctctcaaggccaagcaacggacagagaagcgcatcgaggccttgcatgccaagctggacactgttcaaggcatcctggaccggatctatgcctcccagacagatcagatggtttttaacgcctaccaggctggggtaggagcactcaaactctccatgaaggatgtcacagtggagaaggcagagagcctcgtggatcagatccaagagctctgtgacacccaggatgaagtttctcagactctggctggtggggtaacaaatggcttagattttgacagtgaagaactggagaaggaattggacatcctccttcaggataccaccaaagaacctttggatctgcctgacaacccccgcaataggcattttaccaacagcgtgcctaaccctaggatctcagatgctgaacttgaagctgaacttgagaaactgtccttatcagagggaggtttggtcccaagcagtaaatctccaaaaaggcaattggaaccgactctaaagccattgtaggaccctcaagtgaaggaccctcatgtaaaagagagaccaggcctgctgggtgtgtacatagttatttaaacaagaaactctcagaatgtgtttggaagaggagaaaggagaaccactgattttatctggatgctactacttactacaggacagatagaatttctggaagcgatgctccaaaggcttgctcccagctgtatcatggacctgccttctcatctttatagtgccacgatttatacagtcctgtgtctgacctgtcatttcatagcctgcagttcttgccattggcacacttagatttgtcttcacccaccagcttcgttccagcccatgaaggggaaagatttgcagctttgccaaatctgaatcagttcccactcccccctgcggttttttagaggggtttatcctgtcgctaatgtcagttaaatagcttattcctgtcccacttgatttcactggtaagaatgagaatgaaatacttaaaggttttatttgaggggacttagctgccattttatggaaaaacatgtagtataaaaggtttttctccagggtcatttgacagaattctccaggtgttcagagaaagaggtcgccccaagtggcccagagtcgtgacagtccggaggggctggtgtggccggtgggcgctgcctcttcatctgatggagccaggaggtccgccggtgggggaaaggcttcttccgaggcttctgcactcgcctgggaagaggcccagtcactacaggaccctgagatgtccagaccccttatgcaaagaggcaaaattgttgccttggccccatcatggagtaacttaaaaatacatatctatcttccagaacaagccacacaacaacacacctcccctccttgagcctggcacacagcaccgggctctctgaatttggaaagtgtttcattttgtggcctactgctcggggcaggggggctgagccaggatgtgcaatagaagcaggggttgtcccctctgccagatctgtggggagctgcccaggccacccgtgcacctgtcctgcttcctgcagtccccactccctgcctcctttgagggactgggggacttggggtagggggacagacgggaaagggtctgaatgctctggcaatggcgagaagaagcgatcgccacactgccactctgctgcccagccaccaggatttctgcctggagccctttgccctgtccctgctgcctgaggtggcgtagagcagaggagaagaatttgctccaggccaggagcacaaatcgttgttcaatgaatttctctccaactcgaccttggtaaacggaaatgttgggggtgaagagaaacaatcactatttttttcttttttatctggtaaataattaaaagaaaaaccgaacactt

SEQ ID NO: 465814 - DNA, 1163 bp, Homo sapiens
ttgttcccagtaccttcccattggactggacattgatattgcccaggatggtctcgaactcctgcactcaagcgatcctcccacctcagcctcccaaagtgttaagattacaggcgttgagccactgcacctggccaacgaggctttctgaggcactgaggtctctcaaggccaagcaacggacagagaagcgcatcgaggccttgcatgccaagctggacactgttcaaggcatcctggaccggatctatgcctcccagacagatcagatggtttttaacgcctaccaggctggggtaggagcactcaaactctccatgaaggatgtcacagtggagaaggcagagagcctcgtggatcagatccaagagctctgtgacacccaggatgaagtttctcagactctgggccggtgggcgctgcctcttcatctgatggagccaggaggtccgccggtgggggaaaggcttcttccgaggcttctgcactcgcctgggaagaggcccagtcactacaggaccctgagatgtccagaccccttatgcaaagaggcaaaattgttgccttggccccatcatggagtaacttaaaaatacatatctatcttccagaacaagccacacaacaacacacctcccctccttgagcctggcacacagcaccgggctctctgaatttggaaagtgtttcattttgtggcctactgctcggggcaggggggctgagccaggatgtgcaatagaagcaggggttgtcccctctgccagatctgtggggagctgcccaggccacccgtgcacctgtcctgcttcctgcagtccccactccctgcctcctttgagggactgggggacttggggtagggggacagacgggaaagggtctgaatgctctggcaatggcgagaagaagcgatcgccacactgccactctgctgcccagccaccaggatttctgcctggagccctttgccctgtccctgctgcctgaggtggcgtagagcagaggagaagaatttgctccaggccaggagcacaaatcgttgttcaatgaatttctctccaactcgaccttggtaaacggaaatgttgggggtgaagagaaacaatcactatttttttcttttttatctggtaaataattaaaagaaaaaccgaacactt

SEQ ID NO: 465815 - DNA, 428 bp, Homo sapiens
tgaattgactaataatgcttaaaaatcaggataaaaaatttaataagaccatctgaatttcactttctcttgaataatccagcaaactgggaatgcattcccatatggcagtgatcttataaggttgagtggagtcacaccttagatggggccctgtgccttcagtgagctcaccatggcatcacccagcctggtcatctcttggttaactgtcaggcccccggtgacattttaattagtcattcctgaaggcaggcgcggtggcttatgcctgtaatcctggcactttgggaggccgaggtggtcagatcacctgaggtcaggagttcgagaccagcctggccaacatggcaaaaccctgtctctactaaaaatacaaaaattagctgggtgtggtggtgtgcacctgtaatcccagctactcagaa

SEQ ID NO: 465816 - DNA, 1157 bp, Homo sapiens
aggccagaggaagcaccgtgctcacgtctaggcctagcctacctgtggccgttctgtccattatgtataaatacaaacaggctgctggtgtctggggcttctgcgcatccactgactgcttttctggaacagacctgctcaggatatttcaggctcaggcatgtcatgtttcacgtgctggcagaatgtgggcctcctgttctatttctatccccttcggggtgacatacctcttcagatacttagccacgatccgcagcgcgtggatagcccaaatgtcactgattgggttgctgccctggtacgcaggccgtgtgatgggatttgaagggcaggggctccgcaggtgcaacaaaaaagcactgaatctaaaaaatgacttccttatggaagatatttaccattttataccttgcattgatcaaataccatattaccaaaagtgggtcatagctacaccagatttctatgaaaattacagtgtaatgagtgagaatatagactttggggtcagctgcccagatgtcaatcctggaacaagatattcctgctgcggacctggtggcctcataaagtttacgggtgagagaaaggcttttacactgatggatgatgggtcatgtttcgcctgaaatatattttatttgatctgtgttacgtttaaatttctttttttttttgaattgactaataatgcttaaaaatcaggataaaaaatttaataagaccatctgaatttcactttctcttgaataatccagcaaactgggaatgcattcccatatggcagtgatcttataaggttgagtggagtcacaccttagatggggccctgtgccttcagtgagctcaccatggcatcacccagcctggtcatctcttggttaactgtcaggcccccggtgacattttaattagtcattcctgaaggcaggcgcggtggcttatgcctgtaatcctggcactttgggaggccgaggattatgggtgcgagccaccgtgcccggcctaataaacatttttataaggtgctatttccttgcaaaggattaggttttaattatggtaaaaatgattttctgtcatattggaacaatgaaagggacctaattaaagatttttatccttgtttttatcaatacttatttatatcaata

SEQ ID NO: 465817 - DNA, 1401 bp, Homo sapiens
agctctctctccaggccatgggctcttcccaaatgttcacttgcaacccaagtcccaagattggcacagaggaagatgctgtgatctctacctgtctgatgcccatatttgatcaaatctgctgtgaagaggaggcactggggcaaggcaccagggaaagtgaagtccttcctggttctcaggccgaaagatccagaccatcatggactatctacacacacactagtctccccacagagccgctccagtggtttaacacaataggaccaccacccagaaggaacgcagacccagctcatcacaagcatcactgcagatttctagtgtccctctcattgcctgagaagagacccaaggaaactttggaggtgataggaatgtcctataccttgattgtgggggcggtttcatggaagtgtacgttactcagaagtcactgaattgtttgcttaaaagagggagatgagaataaacaacttcaacggcctttccatgcccaaagacactgcagcagagccgtctatgaatgacagatgaaatgccttagagtcttagttccaaaccacctccccggacagtcggaaatcccactggctggaggaataaataaattccttatcttgtcaaggaagctcctcccaagctacaaaagttgcagacagcaaagggatcaagtgaccccagagatgaaatctgtgactctctggtggagcaacatgatagtaataaacaaaggttgagtgcctgctgtataaagcaacctctggagtgcctgatatctactaactcttttagcacccactcgaccctgtgagatgcgtattactttattgtatctaccactgtaaaaaagaatgaaccaagctacagcaatattatgttgcttgccctgagtcacacagctgagtaagtcacaggagtttgtgctcataatgactttgctatgctgatgtttgaacctggaaccattcagcaaccctccagctaatatggctccatgctctacttctggaaaagctgagttcctgcagccttgtcctacatcacccaaaagagctggaaaagaatgcagtgagttccattctatttgttccgagaataggaaagccacattgaagcaatatcttaaagagaaatctatagttaggagtgatgaagatttgaaacagatgtcagcagaaagaaaaagggagaggcaccatgataattatactcagtgatgctttttaaatgacatatattcagttaaatatagggaggtttgctgctagccatatgaacaaagcacaagagaattcctggatcaaggcagacttaaagagacattgaaaaaaaaacaaaattcaaaattttgacctagtgcaggaagaagtgcaagtacaggggaagtggagggaagga

SEQ ID NO: 465818 - DNA, 1093 bp, Homo sapiens
gaacgggtggaggacttgaggtctgaggagctcgaggccgtgatgagggcgaatgccatttgtggagaatgggagacccgccgctttggtggtggaaatggtgatgctcttcgtttaggagggggaggaggtgaagccgttcttctctttggaggtggagaaggagagtatctcctctgtattggaggagagtatcttctaggagaagccgtcgaggatgaggggcgggagaaggagaccgtcgccttctggtgggtggtggggatggacttctcctccgtctaccatgaggggaagtctctttttggtgctttcgtggtgatggagaagcactccgggaaggggaatgtctccgccgcttgccaacctcaccattcttcacatgggatctcttgggtcgttcatcttctgaggagaaggaggaaccagagtcagatgaagactgctggttttgtcgtctgtattggcgtctctgctgagatcaatgaggaaggcccaagtgtccccacagtcttagggggaaatgtttgttatgatgtaaattttatttggattgaattaatgaatcctttcttctcactcatgcagagtgtgatcctatacagcaaagctgtcctcacaaacaatagttgactaaataaacacatggctttatggaagaaatgtattttattgtggaaatgatctcatggcaaagtttttaaagaggctgcagaacaataaagagagataacacattttgcttttatgaaaaagccgatgttccaaatttgctgaccttctctgtaaataagaagtgactgtcagtagccagcagatgtgtttataaaaataacccacttgatctgtccctgcaaggttctgtgaagcgggtaaaaacaaaatttggcatccagtttcaaaaggagaattgcaaactaatagaacatatagcacaaaatgattatatcaatagaatgctaattgcatatcaaggatatttggtataatacaaattattctaccttaaacatatggaaatttgtggtccatgatgttgtagattctatcttcccactctgcattttcaaaggcatatggtattgactcattc

SEQ ID NO: 465819 - DNA, 3105 bp, Homo sapiens
ttacccagcgggccgccggcggtcgtgggcaagcttcgccatgcagagcactgacctaggcaacaaggagagcggcaagatatggcaccgcaagccgtccccggccacgcgggacggaattatagtgaacattattcacaacacttccgattaccatccaaaagttttgcgatttttgaatgtggcttttgatggcacaggcgactgcttaattgctggggaccaccaaggaaatatttatgtttttgacttacatggaaacaggttcaatcttgttcagcgaacagcacaagcttgcacagctctggcctttaatcttcgtaggaaatctgaattccttgtggcattagctgattattctattaaatgttttgatacagtcaccaaggagctagttagctggatgagaggacatgaatcatcagtattttcgatctctgtgcatgcatcagggaaatatgccatcacaacttcttctgatacagcacaattatgggacttggatacctttcagagaaaaagaaagctgaatattcgccagtctgtgggtatacagaaggttttctttctaccattaagtaataccatcctcagctgttttaaagataattccatttttgcctgggaatgtgacacacttttttgcaaatatcaattgccagctccacctgaaagctctagtatattatacaaagtgtttgctgtaaccagagatggccgaatcctggctgctggaggcaagtcaaatcatcttcatttgtggtgcttggaagctaggcagctctttagaattatccagatgcccactaaagttcgagccattcgccatctggaatttcttcctgatagttttgatgctggttctaatcaggttcttggagtactaagtcaagatggtattatgagatttatcaatatgcagacttgtaaacttctctttgagattgggagcctcgatgaaggaattagctcatcagcaattagcccacatggacggtacattgcatctattatggaaaatggaagtctaaacatatattcagttcaggctttaacacaagaaataaataaggaagaagttcgtgctcaaaattaatcacacagcgagtaactagcagttctgggtgttccaattcttccaagatcacatgagattgggtgcatttggagtggcgtttgccacctttttttattctaaaaaaaagtttgtgcctcctcctttttgttttatcttttaaaaaattatacaagtagtgtcttattgcagaaaaaaataagaatgtacagaatagcaaacagacaaatacaaatcactgaaagtctcaccattctcagaagattctgatttatatgttcccaatttcttttctatgtgtgtaaatatatatagtcactcctcattatttgtgcattctatacatgagaattcacctgctcactaaaatttatttgtaacttcaaaattaatagttgcagtgctttcatggtcattcagggacatgcacagagcagtgaaaatttgagtcaccagataccctttttcccagctgaagtcaaatgaggcaacactctgtcttcttatttcagctctcatagtgtaaacaagtatcctttttgtgatctacttaataccatttatttttttgcattttgaagctttttgttaagattctactgcttaaagtggtccccaagcgtagcgctgaagcgctatttattgtttctaaatacaggaaggctgtggcttaccttacagagaaaatacatgtgttaaataaactcattcaggaatgagttatagtgctaagctttttattttcttgtcattggagaatttctggtattgtggtaatagagtaaatgaattcttaagtgttgaaggtttaacactacaaaggtatgtcaagtcaggttgtttctcaggttcttttttgggaggttatacttcatggtagaggataaggctcaaacgggaaattgtgacattttaataaattttaattttaataaaattttagtaaatttcagctctcatggtgtaaacaagtatcctttttgtggtctacttaatgccatttttttctgtgttttgaagctttttgttaagattttacttgttaaagtgttccccaagcgtagcattgaagcgctatttattgtttgtaaacacaggctgtggcttaccttacagagaatatatgtgtttttaataaaaatttagaagaatggattgaagtcaaaaaatagtttaaggatattaaatatgggtaatattcataagtcagaccactattaatcccatcccatagatgaattgaagaattgaatcataaactgtaaatggtcattgtgttttaattgtatttagaacttagaaagcctgagttaccttatttgctcacttcctttgaagaaggaagatcttttgatttcaaagagaatattgtttatggagaaaatgttctagtgagtaatgttactttaagtaaattgaagttgttcaggtttttttccgtgtttgatgggccccataaaaatgaaggtataggttctaagtcacattgtctgaactgcttaagctgttgatacaataaggaactaatagtgatcactaagcagattaaaacatttaaccaagggatagaggggcagaggttccatgcttctagaagaaagtcatttggcagtttcctcttagaaatttcacttgaccccaaagaatattagggtacttctgtcagaattctagagggccatacctctaactgtaccttttttgctgtagataataatcaccatactaactttaccatgtatgtgtaaacatgatttggtattaaatgatttaaggccagctttcaaggaataattatatttattgctattgttaatcatgtatctttattatgttcttcaaaaggattcagcagaaatttgctttgatttattagtcaaagcaaatgttcctagacattttacttaagttttttgcctgaagaataattctacatattaaggcatgttattaaagcaaattttgaaaatcatacattaacaggcctgtcttccaaggatatccattagaatatatatatatttattttt

SEQ ID NO: 465820 - DNA, 830 bp, Homo sapiens
  misc_feature (786)..(786): n is a, c, g, or t
  misc_feature (790)..(790): n is a, c, g, or t
  misc_feature (797)..(797): n is a, c, g, or t
  misc_feature (800)..(800): n is a, c, g, or t
  misc_feature (803)..(803): n is a, c, g, or t
gactcattctttgctctcctgctaccacgtgaagaaggatgtatttgcttccccttctgccatgttgtaagtttcctgaggcctccccagcccttcagaactatggggtaacacatagaaaaggcacggagaagttaagtgatttgcctgtggtcacaaagcctgttagcagcaaacccagaacaagaacctaagatttatgaccgccagttccagctgtttttcttcgtcatgtatcctcagcaatcaacataatcaaaatctgtttggagactactgatttgtataaaggaagataacaccgaacaaccaaacaggaagtaatccagcgaatctggaacagcggtggaatttagaagcaaggccagatgaggaccctaagacctagagaaactaagtcatttgctcaagaagacaaaggcatcgtctggtccagttcagcacagagctagctgcaagtgacaacctaagagaaaagtcagcgagaacaaagatccatctcttcgttgactgccttaatccctagagctgtgttcttcaatttgttactatttgctacaatttttctgcctaacaagcaagttctatcctgcctaggagagaaacttttagtaaattcatcttcattcactactattcagctcatgctgtaaaaacttagataatgctgtctgaaatacttaactcctggtcaaatgcagctgctatttcattcagtataatcaaagaatagccaaggactttagttaatatttcttcagatgatagagaataaatgggtgggtntttnccaggcnccnaangtggggttttttttaaaaattaaaagg

SEQ ID NO: 465821 - DNA, 802 bp, Homo sapiens
gagagcaccacacattgttgtgtatgaaatactctattcagcaaacaagccgtgcagcaacaagacctagtgtggtcaaggatggtggactaaaaaccactatgaaagcagagatgtagccacctctgagactggttttctaagcaggatgacttggttccatccctacaggcatcgtctggtccagttcagcacagagctagctgcaagtgacaacctaagagaaaagtcagcgagaacaaagatccatctcttcgttgactgccttaatccctagagctgtgttcttcaatttgttactatttgctacaatttttctgcctaacaagcaagttctatcctgcctaggagagaaacttttagtaaattcatcttcattcactactattcagctcatgctgtaaaaacttagataatgctgtctgaaatacttaactcctggtcaaatgcagctgctatttcattcagtataatcaaagaatagccaaggactttagttaatatttcttcagatgatagagaataaacaaattgttttggatatatctaccatgccctccaaacatgattgttgatatcttttctatataaattactttcctacataaatggtacttagcttttccttgaaagatatgctcttctctccagctcaaagataaccctctttccctcaaattataagtaatttatatttaataatctttcatacgaatttttaaaattacaaatggtaaggtaccactattttttattttgtaacagcacaaaccatcaaatcagaaaaaaagaaaggttgagt

SEQ ID NO: 465822 - DNA, 624 bp, Homo sapiens
gtgaagagcagagaactatgaagatgattcaggaagaggcacatggagactagagatgaggaccctaagacctagagaaactaagtcatttgctcaagaagacaaaggtaatcatcagaaatcaacatgagatttcagctctcctgatccttagtacaacatgtgaaagaagatatgttgtctttactcacagtggaggcatttttctagctgtgtttgatttggcttccctatagattcaggacccataactcttgttctcactcatctgctatgctgctgataaggactttcaggtcaacagctgtaactgctaaatgaagttaatactctggaaaaaaaaacaaatttgtgggggccggcttggggccctgggaaaaagttttcacaacacctcccctgtgtggggcgcgggggccccagttgtaggttatgggacacccttggccacacccgctggtcccaaagggaagcccctggcgccaggaccaactggtttggtttcccccccaattaaaaaacccgccggggggcaccccaggggttcgggccaacccagagggggcccggcggcctacgggctctcccaccggtccccgaagcagaataatcgggccgcggggg

SEQ ID NO: 465823 - DNA, 738 bp, Homo sapiens
gtgaagagcagagaactatgaagatgattcaggaagaggcacatggagactagagatgaggaccctaagacctagagaaactaagtcatttgctcaagaagacaaaggcatcgtctggtccagttcagcacagagctagctgcaagtgacaacctaagagaaaagtcagcgagaacaaagatccatctcttcgttgactgccttaatccctagagctgtgttcttcaatttgttactatttgctacaatttttctgcctaacaagcaagttctatcctgcctaggagagaaacttttagtaaattcatcttcattcactactattcagctcatgctgtaaaaacttagataatgctgtctgaaatacttaactcctggtcaaatgcagctgctatttcattcagtataatcaaagaatagccaaggactttagttaatatttcttcagatgatagagaataaacaaattgttttggatatatctaccatgccctccaaacatgattgttgatatcttttctatataaattactttcctacataaatggtacttagcttttccttgaaagatatgctcttctctccagctcaaagataaccctctttccctcaaattataagtaatttatatttaataatctttcatacgaatttttaaaattacaaatggtaaggtaccactattttttattttgtaacagcacaaaccatcaaatcagaaaaaaagaaaggttgagt

SEQ ID NO: 465824 - DNA, 612 bp, Homo sapiens
cggggtggacaaggggcagtcaagcagggcgcgtccttcaggtatgaggaccctaagacctagagaaactaagtcatttgctcaagaagacaaaggtaatcatcagaaatcaacatgagatttcagctctcctgatccttagtacaacatgtgaaagaagatatgttgtctttactcacagtggaggcatttttctagctgtgtttgatttggcttccctatagattcaggacccataactcttgttctcactcatctgctatgctgctgataaggactttcaggtcaacagctgtaactgctaaatgaagttaatactctggaaaaaaaaacaaatttgtgggggccggcttggggccctgggaaaaagttttcacaacacctcccctgtgtggggcgcgggggccccagttgtaggttatgggacacccttggccacacccgctggtcccaaagggaagcccctggcgccaggaccaactggtttggtttcccccccaattaaaaaacccgccggggggcaccccaggggttcgggccaacccagagggggcccggcggcctacgggctctcccaccggtccccgaagcagaataatcgggccgcggggg

SEQ ID NO: 465825 - DNA, 1788 bp, Homo sapiens
ggcggcagcgggaggctcaggcatgggggcctgcagatcccaagccctgccccacagggaggcagctgaggccccgcgagaattcgagtgcagcgccagcaggccggcactgctgggggaccccacacaccctccacagctgctggcccagttactaagcccctcactccccgaggcctgcggcccccagcggccacttggagtgcagggccgccaaacccacgcccacccggaactcgcgctggcccacaagcgcctggcgcagccccgaaaggggatcccacagtgcagcagcgggctgaagggctcctcaagcgcggccagagtgggcgctgaggccgaggaggagccaatagcgagcgagagctgccagcacgctagcttcttcacttccttgttctcaggtccattttccccaaacacaccagattgaaatttcaagaactctaatcccatctcattactatttaaaggcatttaatgaattctccatgacctgtgtggggaagcataaagagtgctacatgttttttatttgtgtttttctatttttactgttaaagagaacactgaacttgtctctctagcagcctcagtggttaggatgctgggttaattttactcccaaggaaagtgacgcctgagagaaagagccatttgtttgtctttttaatttcagcttcttcctaaataagacagccttttagaaagactttcacagtgtcaggttagttacctaaatcttaggtaactttaggttagttacctaaagtcactctgtgacttcatcctgatataaaggaacaaggaagagagtcggattaggctaactcactatgatggggtaacacatagaaaaggcacggagaagttaagtgatttgcctgtggtcacaaagcctgttagcagcaaacccagaacaagaacctaagatttatgaccgccagttccagctgtttttcttcgtcatgtatcctcagcaatcaacataatcaaaatctgtttggagactactgatttgtataaaggaagataacaccgaacaaccaaacaggaagtaatccagcgaatctggaacagcggtggaatttagaagcaaggccagatgaggaccctaagacctagagaaactaagtcatttgctcaagaagacaaaggcatcgtctggtccagttcagcacagagctagctgcaagtgacaacctaagagaaaagtcagcgagaacaaagatccatctcttcgttgactgccttaatccctagagctgtgttcttcaatttgttactatttgctacaatttttctgcctaacaagcaagttctatcctgcctaggagagaaacttttagtaaattcatcttcattcactactattcagctcatgctgtaaaaacttagataatgctgtctgaaatacttaactcctggtcaaatgcagctgctatttcattcagtataatcaaagaatagccaaggactttagttaatatttcttcagatgatagagaataaacaaattgttttggatatatctaccatgccctccaaacatgattgttgatatcttttctatataaattactttcctacataaatggtacttagcttttccttgaaagatatgctcttctctccagctcaaagataaccctctttccctcaaattataagtaatttatatttaataatctttcatacgaatttttaaaattacaaatggtaaggtaccactattttttattttgtaacagcacaaaccatcaaatcagaaaaaaagaaaggttgagt

SEQ ID NO: 465826 - DNA, 1674 bp, Homo sapiens
ggcggcagcgggaggctcaggcatgggggcctgcagatcccaagccctgccccacagggaggcagctgaggccccgcgagaattcgagtgcagcgccagcaggccggcactgctgggggaccccacacaccctccacagctgctggcccagttactaagcccctcactccccgaggcctgcggcccccagcggccacttggagtgcagggccgccaaacccacgcccacccggaactcgcgctggcccacaagcgcctggcgcagccccgaaaggggatcccacagtgcagcagcgggctgaagggctcctcaagcgcggccagagtgggcgctgaggccgaggaggagccaatagcgagcgagagctgccagcacgctagcttcttcacttccttgttctcaggtccattttccccaaacacaccagattgaaatttcaagaactctaatcccatctcattactatttaaaggcatttaatgaattctccatgacctgtgtggggaagcataaagagtgctacatgttttttatttgtgtttttctatttttactgttaaagagaacactgaacttgtctctctagcagcctcagtggttaggatgctgggttaattttactcccaaggaaagtgacgcctgagagaaagagccatttgtttgtctttttaatttcagcttcttcctaaataagacagccttttagaaagactttcacagtgtcaggttagttacctaaatcttaggtaactttaggttagttacctaaagtcactctgtgacttcatcctgatataaaggaacaaggaagagagtcggattaggctaactcactatgatggggtaacacatagaaaaggcacggagaagttaagtgatttgcctgtggtcacaaagcctgttagcagcaaacccagaacaagaacctaagatttatgaccgccagttccagctgtttttcttcgtcatgtatcctcagcaatcaacataatcaaaatctgtttggagactactgatttgtataaaggaagataacaccgaacaaccaaacaggaagtaatccagcgaatctggaacagcggtggaatttagaagcaaggccagatgaggaccctaagacctagagaaactaagtcatttgctcaagaagacaaaggtaatcatcagaaatcaacatgagatttcagctctcctgatccttagtacaacatgtgaaagaagatatgttgtctttactcacagtggaggcatttttctagctgtgtttgatttggcttccctatagattcaggacccataactcttgttctcactcatctgctatgctgctgataaggactttcaggtcaacagctgtaactgctaaatgaagttaatactctggaaaaaaaaacaaatttgtgggggccggcttggggccctgggaaaaagttttcacaacacctcccctgtgtggggcgcgggggccccagttgtaggttatgggacacccttggccacacccgctggtcccaaagggaagcccctggcgccaggaccaactggtttggtttcccccccaattaaaaaacccgccggggggcaccccaggggttcgggccaacccagagggggcccggcggcctacgggctctcccaccggtccccgaagcagaataatcgggccgcggggg

SEQ ID NO: 465827 - DNA, 448 bp, Homo sapiens
gtaaccagtactagaatagtcagtacctagaagccactcttctttgaaaaggattatcacctgatcaggttctctctgcatttgcccctttagattgtgaaatgtggctcaaggtcttcacaactttcctttcctttgcaacaggtgcttgctcggggctgaaggtgacagtgccatcacacactgtccatggcgtcagaggtcaggccctctacctacccgtccactatggcttccacactccagcatcagacatccagatcatatggctatttgagagaccccacacaatgcccaaatacttactgggctctgtgaataagtctgtggttcctgacttggaataccaacacaagttcaccatgatgccacccaatgcatctctgcttatcaacccactgcagttccctgatgaaggcaattacatcgtgaaggtcaacattcaggg

SEQ ID NO: 465828 - DNA, 1565 bp, Homo sapiens
cagggcactgcatgcatgggacaggatgctttcatggagcccttcggtgacacacttggggtctttcagtgcaaaatatacctccttctcttcggtgcttgctcggggctgaaggtgacagtgccatcacacactgtccatggcgtcagaggtcaggccctctacctacccgtccactatggcttccacactccagcatcagacatccagatcatatggctatttgagagaccccacacaatgcccaaatacttactgggctctgtgaataagtctgtggttcctgacttggaataccaacacaagttcaccatgatgccacccaatgcatctctgcttatcaacccactgcagttccctgatgaaggcaattacatcgtgaaggtcaacattcagggaaatggaactctatctgccagtcagaagatacaagtcacggttgatgatcctgtcacaaagccagtggtgcagattcatcctccctctggggctgtggagtatgtggggaacatgaccctgacatgccatgtggaagggggcactcggctagcttaccaatggctaaaaaatgggagacctgtccacaccagctccacctactccttttctccccaaaacaatacccttcatattgctccagtaaccaaggaagacattgggaattacagctgcctggtgaggaaccctgtcagtgaaatggaaagtgatatcattatgcccatcatatattatggaccttatggacttcaagtgaattctgataaagggctaaaagtaggggaagtgtttactgttgaccttggagaggccatcctatttgattgttctgctgattctcatccccccaacacctactcctggattaggaggactgacaatactacatatatcattaagcatgggcctcgcttagaagttgcatctgagaaagtagcccagaagacaatggactatgtgtgctgtgcttacaacaacataaccggcaggcaagatgaaactcatttcacagttatcatcacttccgtagctgaaatctatggaagttcacaaggggagtctcaacaccttggaaattacaaaattctactctcctttgcacacaagtcaaatgccacttgggcaaaatctgggagcaggtttggacaggacatggtggttaagatgcttattcctcaattattatccctgacaaaaatacctattttgtcttttcaggccagaaacagaatacaggaaagctcaaacattttcaggtttcatgctggcagctccatcccaaagagaagaggaaaagaagatttggcaggggccaggattgcttctttgtccccactgtaaccctcattatcatcaatattgactgtactgacttattataagttaacaaagttttggctcaggccacaaaatcacagggagccaagtttcagttttatttcccctcatgtcaccttaggaaaattatttttcttaaccgcaacttcctcttctatataatagggataaaaacttcccccttaaggttgctatgagaattaaataaaatgatataggtggagtgcctg

SEQ ID NO: 465829 - DNA, 1127 bp, Homo sapiens
gaaagaaatgagagaaagatggatctgagccttttaggaagacgtcttcatttgagatggtgtatgacagtagatagtgtcagaggtgagcatacaagagcagaagaatgcaatgtggctttggggctctcccatcaagaagtggggtccatttcctgatccctggagtctggactcaggagcagcctgtgacttgcactgacatcaatggataatgaaatggatggagacagagttgtgcaaattccagaagctacgccttgagggctcttgcagattttgcttttgacctcttgaaactgccctgagaccactaggaaggaatacctatctggttttctggaggaagagagtcacatggagaagaactgaggcagccaccaactgccagacatgtgaccaccagctctgctgaccccacagctcaaagaagctgcacagatgagctgaggccacactcttcagggaacaatccgcacagtcctgagagacagcaactccttgctcttctgagccactaggctttggaacagttcattgcctcttttacatgacatactctaattgcatcatcttgttcaatgctcacaacaaccctgcaaggttcttattaattttccattttacagataagaaaactgagcctcacagagtagatgcaaaaccgttaagtggcaggactggaatttgcactcacatctatgtggccctaaaggccaccctctccccatttcactggcccatcaaaaaccacagagaccagataacaagagcttgtcatagtgctgacagcagagctgaggtcccaaactgcagcatgctctgcattcttctggtcacagggcaaaggccatcaaaagggatcaagagaagacacaggagcttccaggattggagggactggggctcatggcctgagtatcattcacaaagaagccagaaaactccatgtgtccacgtgtccaggggcaggaatgcccacgcaggcactgtatcgctgcagctgaatacctgccagagaagctttgctaccctaaagccaaggccaggccttctaagaatgcgccacaccaatgaggtgacatgtcctgtgatggcctagtatggttatgtgctttgcctagaat

SEQ ID NO: 465830 - DNA, 724 bp, Homo sapiens
aggattgtggaggctgggatcatggggaccagcccatggcttggagttgtctggagcccagggctgctggggctagcctgctcagatttcttcatgcagactcaaaagcagcaagagaagaatccccaatgcacatgcactatttccattatttgcctgcataatatttatttgtattccattagccaaaacaagttacaagatcagaccagacccatggaggtagaggaagattcaacatttgatggcagagaaagcttttatcacacttgggcagtaatgttggttctacatatgtctggcagtgtctttgacaaagttacaggatcaaaattgaaaggagagcttttggattacatgctagccaagctaatgctgacttctgttcagagaaaatttggatatttattctttacactgaagatcccgacttccattacacaggtgcagatgggaaatcagaaaatatattcaaaagcattttaattttaaacatatgcacttgattgtttactatagatattctctgagtttgaaaaagcataaaggctcaaccaagataccgcaaaaataccaagcaaaaagcaagaaagcccttgccagatactggcctctcaatcttggactcctcagccccccataactgtgagccaataaatttatgttcattatcaattactccgtcttaggtattctgttatagcagcacaaaatgatctaagat

SEQ ID NO: 465831 - DNA, 581 bp, Homo sapiens
ggcaaatgttccaaatctgccactatgaaataattggcagcaaggatgggaaaaagaaaaacctcattttaatgcgaatgacttaccaggaaataaaacacaggacctcagatgagtgggcgttctccatagcaaaccctgcccacttaacagttttgccaagatatggtccagatacaggtccttacctctggtttggctttcacagtgaagccaaaccaggacagcttgttacacagagtctggaaagcagcccttcatgttgggattctggaattgggtcactgccgagtcagatttcaataaggaaaacatacttgaaaatcatgctgaccaactatattgatgacattaggctaatttgacatggtagacaagaaattccaagtactgtccaagatttgaaaatgactttggaactctctcaagaaatcccttatccaagaaatacggataaatagccatgtggagatgatcaacatcaggagtatggttgtacaaccagagctgatgaataaacttttaggtattcctagttttctttttcaataatataaatacattttaaacaatttatgtgt

SEQ ID NO: 465832 - DNA, 1513 bp, Homo sapiens
ggcaaatgttccaaatctgccactatgaaataattggcagcaaggatgggaaaaagaaaaacctcattttaatgcgaatgacttaccaggaaataaaacacaggacctcagatgagtgggcgttctccatagcaaaccctgcccacttaacagttttgccaagatatggtccagatacaggtccttacctctggtttggctttcacagtgaagccaaaccaggacagcttgttacacagagtctggaaagcagcccttcatgttgggattctggaattgggtcactgccgagtcagatttcaataaggaaaacatacttgaaaatcatgctgaccaactatattgatgacattaggctaatttgacatggtagacaagaaattccaagtactggataaaatgatctggagcatgccaagtaaatgaaagttattggatcttgaatcttctaccactaagaaagaggcacagtgctttttggacctctttggattttagggaagtatattctataattgaaagtggctctctgacctattcattatatgactgtgaagactacctattttgaatgaaactctgaggaagaaagggctctggggcaggtccagcctgcagagtaaccttccctcccacttggaaatcctaacaaaatcaaagatatccttgatagctaaagataggtaagtaggaattctacaagaaatcaccagcataatgttatacgaaatatcagtatggatccctagaatctagagggagaataggctttctgtcccaaagaactactcaccatttgaaaattagctacttgtatgctattgagctctgtctgaggtcaagtaaccatgaaaacagagcactgcatcattatctgggtattatcctatctaccaagttatgaggagtacaaatccattttatgatggaaatagtagacttgaaattaggtccaagcttgctggtccagagggtataaactactccagtgaggatagagaaatgagaaaattttggctaaaaaataacaaaaatggatctgaaaaattaaattacaagctagaggctacatggatcttaaaagaagaaccagcagtctgcagagggagggatgaggaagccgctgtggaatgcgtcacattaccttccaaatataatacaatagcttcagcttgtgctgatgtggaggcttatatggaaggagtagacagcaggagagcctgccgagcacagagattccaagctgaagttccagagttccagtattgcgttcaaactccagctctgtttcttaagtgctgcataaacctggcccagtttttaaactctgtgcatcagttttcctatctataaaatgcacattgtaataatagtacttacttcacgggctgttatgaaggctgggtgaattcagatatgtaaaggacctagcatagggttatatgagtgtttcatatatgttagctatttttattcttaatggtcatctcagcagatgctagctatggataga

SEQ ID NO: 465833 - DNA, 627 bp, Homo sapiens
ggcaaatgttccaaatctgccactatgaaataattggcagcaaggatgggaaaaagaaaaacctcattttaatgcgaatgacttaccaggaaataaaacacaggacctcagatgagtgggcgttctccatagcaaaccctgcccacttaacagttttgccaagatatggtccagatacaggtccttacctctggtttggctttcacagtgaagccaaaccaggacagcttgttacacagagtctggaaagcagcccttcatgttgggattctggaattgggtcactgccgagtcagatttcaataaggaaaacatacttgaaaatcatgctgaccaactatattgatgacattaggctaatttgacatggtagacaagaaattccaagtactgttctttgcattattggtaactgtgtctgctgtgctttggaataaggtccaagatttgaaaatgactttggaactctctcaagaaatcccttatccaagaaatacggataaatagccatgtggagatgatcaacatcaggagtatggttgtacaaccagagctgatgaataaacttttaggtattcctagttttctttttcaataatataaatacattttaaacaatttatgtgt

SEQ ID NO: 465834 - DNA, 1937 bp, Homo sapiens
tggatagagggactccttgtgtgtgtgtgtgcagcaggggaaattgatgtacactgtcacagagatgaagtcccgtgataggctgtctgcaagttggagaaccagagaagtcaatagtgtggctcagtctggaagccagagaaccagagtccaaaaaccaaagaacctggagtctgatgtccaaaggcagaggaaaaacagcatcccacttcagaaggaagacagcacaaggtgcaagctgttgatggctctaccatgctcaggtctaaaggacagtggccccattctcacagctccactaggcagtgccccagtggagacctactacctgacatttcccttttgcactggccttgcagaggttctctgtgagggctctgtccctgctgcaggcttctgccttggacacccaggcatttctttagaatccaccactctcgcactctgcacacctgcaggcttaacaccacattaaacagtgctggcaactgctcagcttctgcagaggatttaggaggcttacaatcatgacagaaagtgaaggggagcagataagaaaactgaaattttcaaagaaggtattttgttattattgctgacatttcacccaacatataagcataaccagaatgaagattttctattacctatagatatatattttaatatttgtacagttttatgtatttaaaacttcaagtttttctttgaattattgctgaaaaaatgcataaattttaagtggtcatttagatagacgttaggagcttatgtaattattatttatttattttctaccagttctaagaaggcacaattggttaagattagaccatcaaactctgattaacagatttttaataattttaggaaatagatgtttgagttttgcatattttctatagcatataatggtatataatagcatatactaagaaaacaaataaatgtactgattttcttcaattcttttcataatttttcaggtttatctatccatacctcccttgaaacacatttaaagaacacagaaaagcctttaggaacagattagctttaatcttgtgaaagaggagtaacaataatgcaacacagatatataaaactgcctcttgtctggggccacaatattcatactacctctgaatctaaaatgaccctgtctgatgtagaaattatattaccgtcattgaagttaccttcataattactaatatctatcaaacatcattgtattattacagcttaatgtattctgaggttatttgaaaaaaaagtagtccaaatattttagcagataataattcacattttcttcatattagccataaatatgaattgattctgatttttataaactaacatgtacataacaagttcagtagtgtttttattatgaaaatagttttctcagataaaatgaagagtcctgaggacagctgcagaaatagctacacatgttaaagagggaataacatgctgcataagattagtatgtcatgcagttctcttagcaagatgtttcttagattatgtgtgtacacagagtgtttcacctataaattcaggttaagtagtttcagttgcaaaaccaagtagttcaaattaagtaactactaagttggaataatgactgcctaaattgactaattgaatattgaagtaagaacagttaaccttcaaatgtcttgtatgtatatcatcatgaccgtttattttgtttgttttaaaataaatgttaagtttctattcttataaaacaggtttcttctaactgattgatattaatcaaatattgccaaggttattatatagtggtgcttacaaatccaaccaaatatcctttgcatagaattgaagttgcctcagtaccatgctgttttggttaccgtagccttgtagtatagtttgaagtcaggtggcatggtgcctccagc

SEQ ID NO: 465835 - DNA, 1795 bp, Homo sapiens
tccagcagccaccatcaccaccactgcggttgctgctgcagctgcagctgctgctctccctccggctgcttcttcgcgtggccagcagcgaatggagcgatggagcccagactgttctgctggaccactctctttctcctggccgggtggtgcctgccagggttgccctgccccagccggtgcctttgctttaagagcaccgtccgctgcatgcacttgatgctggaccacattcctcagaattctggaatgctccacggtcaagtaaacacaaagaagaacaaaagccaggacggtcaccagtggttgtgtaggctgtgtactgcacaactccaaagtgtgctgggaaatgtgccccccttgcagctgtgcaacactgtggtcctggaggaaaaggagggaagagacagaggaacacatctaccgaagactcaggaggagcccagaagacagtatcgtttgttcttcaagagagaggatgggggccacatctgtcagagctcgaggtggcagaggctgctgtggtttcctgggggtccactccagacctgggtccctcgtgcaagtgtcatcagtggaggttacagaacagcaaagatggctgccgctccttcccctgggctgtctgtcccagaggggcaccaacctgatgccgagccctcaggggtaaagactaagtctgctgattcatggagaccacggctgcctctccctacaggagctcagtcccaggaagatcagagtgctgtccctaaacccaaggctggaggctgctggcacccggggctgggcccatccggacctcgcccccgctgccctccgccgcctccaggcccttccctcgcccatcagggaggacagtgtcgcagagagctgcgactccggcatgggcccacgtgactaccccaaaagcaagtgacatacttgcagggtcgtctttccttacttgcccccaaggaataggggtctttggcatctgaaggactgctggattccaagattctgccatcgctgctgctgccgtccatgtgtctgtgatggctggtgggaacagcactttccttttgtgggaagatggtgtggtgtgcagtagtggtcactgttggagagatgtttatgtcttgtacatgaagagctgctctccctctgatagctgcctgccaagcggctccatccatcattgagagcgggcaccacacggctcactgccccaagcatcttagactaaacaccagctagaatgtggagttaggcaatcaagtgtgaaacttaacttgtacttgtcttagaagcagcaaaggcagctgggccagctgatagacaaggaacgctgtcctcccagaaccagccacgggtgcagatgatgggcactgcggagcctgctgtcttacagaagctgatcctggagggtgcctttcaatcctcgatgtcaggaggttttcttttagaaaacaatctgattcagaataatgactgcaatttttcactggatggaaaacaagtctagaggaattgacccttattttaagttcaaagatagtatatccttgttactactgttacatgttttatagccaatcttcaagaccacctctgggcaatgaagttatttgtgatggaaacacttaggttcttgattaagtgaatattaaaaaaaaatcactatcagagaaaagtatacctgatacaatgactagaactgaaaaattatgaacaaatagcaaaacaattagtactatttgacaaaaagaagtaatcaccaatataaaactttggtatgatgttctaaacatac

SEQ ID NO: 465836 - DNA, 4122 bp, Homo sapiens
agcagtcaccatacattagttaagcttcatcaagtgtcagcaaattctgcaccctcatgaaagatggaatataattggcattacttcttatccatcgcaggaatatgtagggttttggctgtttctctttctgtacccattcaagaatggctttgtttaaattgccaaacccagagagcaatatcaggacagcttggagacatacgcaaaatgccacctgcaccatcaggacccaaagcatctcctatgcctgttcctacagaatcatcatctcagaaaacagcagtgcctccccaagtaaaattagtgaaaaagcaagaacaagaagtaaaaacggaagctgaaaaagtcattctggaaaaagtaaaggaaacactatcaatggaaaaaattcctcctatggtaaccacagatcaaaaacaagaagagagtaaactagagaaagacaaagcttcagctcttcaagaaaaaaagccactccctgaagaaaaaaaactaatccctgaagaagaaaagatacgttctgaagaaaaaaagccactcctagaagaaaaaaagccaacccctgaagacaaaaagctactcccagaggcaaaaacatcagccccagaagaacagaaacatgacttacttaaatctcaagtacaaattgctgaagaaaagcttgaaggcagagtggctccaaagacagtgcaagaagggaaacaaccacagaccaagatggaaggtttaccatctggcacacctcagagtttacctaaagaagatgataagacaaccaaaacaataaaagaacagccacagccaccatgcacagcaaaacctgatcaggtggaacctgggaaagaaaaaacagaaaaggaagatgacaaatcagacacctcaagttctcagcagcctaaaagcccccaaggtctgagcgacacgggatattcttccgatggaatatcaagctcacttggtgaaattccaagtcttattccaactgatgaaaaggatattctcaagggactcaaaaaggactctttttcacaagaaagcagcccttccagcccctcagatttggctaagttagaaagtacagtcctatctattttggaagctcaagcaagtacacttgctgatgaaaagtcagaaaagaaaacacaaccccatgaagtttctcctgaacagcctaaagaccaagagaaaactcagagtttatctgaaaccttggaaattactatttcagaagaggagatcaaagagagtcaagaagaaaggaaagacacttttaaaaaagatagccaacaagatattccttccagcaaggaccataaagagaagtctgagtttgttgatgacataactactagaagagagccttatgattcagttgaagagagtagtgaaagtgaaaactcacctgttccacaaagaaaacgaagaactagtgttggctcatcaagcagtgatgagtataaacaggaagacagccaaggatcaggggaagaggaggacttcattcgaaaacaaatcatagaaatgagtgctgatgaagatgcttcaggttctgaagatgatgagttcatcagaaaccagctcaaagagattagtagcagtactgagagccagaagaaggaagaaacaaagggaaaaggcaaaataacagcagggaaacacagacgactgactcgaaaaagtagcacaagcattgatgaagatgcaggaagacgtcactcatggcatgatgaagacgatgaagcatttgatgaaagtcctgaacttaaatacagagaaactaaaagtcaggaaagtgaagaacttgtagttactggaggaggagggctacgccgatttaaaacaattgagctcaacagtacaatagcagataaatattctgcagagtcatcacagaaaaaaacaagtttgtattttgacgaagagccagaattggaaatggaaagcctgacagactcacctgaagataggtcaaggggagagggatcttcgagtctgcatgcttccagcttcactcctggtacatcccctacatcagtatcatcacttgatgaggacagtgacagtagcccgagtcacaaaaaaggagagagcaaacagcaacgcaaagctcggcacagaccacatggccctcttttgcctactattgaagattcttcagaggaagaagaattgagagaggaagaagaattattaaaggagcaagaaaagcagagggaaatagaacagcaacaaagaaagagttctagtaaaaaatcaaagaaagacaaagatgaacttcgagctcagagaagaagggaaaggccaaagacaccacctagtaatctctctcccattgaagatgcatctccgacagaagagttacgtcaggctgcagaaatggaggagctccatagatcttcttgttctgaatattcacctagcatagagtcagacccagaaggttttgaaataagcccggaaaaaataatagaagtacaaaaagtttataaattgcccacagctgtttcattatactcaccaacagatgagcaatctattatgcagaaagaaggtagccaaaaggcgttaaaaagtgctgaggagatgtatgaagaaatgatgcataaaacacacaaatacaaagcttttccagctgcaaatgaacgagatgaagtgtttgaaaaagagcctttgtatggtgggatgctaatagaggattatatttatgaatctttagtagaagacacgtacaatggatcggtagatggcagtctgctaacaaggcaagaagaagaaaatggatttatgcagcagaaaggaagagagcaaaagataagactttcagaacagatttatgaagatcctatgcagaaaattacagacctccagaaagagttttatgagttagaaagcttacattctgttgtgcctcaggaagatattgtttcaagctcttttatcatcccagaaagccatgagatagtggacctgggtactatggtaacttctacagaagaagaaaggaaactactagatgctgatgctgcctatgaagaacttatgaagaggcaacagatgcaattaacacctggatctagcccaacccaggcccccattggtgaggatatgacagagtccaccatggactttgacagaatgccagatgcctctttgacatcaagtgttctctcaggagcgtctcttacagattcgaccagcagtgcaacactctctatcccagatgttaaaataacccaacatttttcaacagaagaaattgaggatgaatatgtaaccgattatacaagagaaattcaagagataattgcccatgaatcgctgattttgacctactcggagccttcagaaagtgctacatctgtcccaccctctgacacaccttctctcacatcatctgtttcttcggtctgtaccacagatagctcttcacccattactaccctggatagcataaccacagtttatacagagccagtggacatgataactaaatttgaagattctgaggaaatttcttcatcaacttattttccaggcagcattatagactatccagaagaaataagtgtatctttagatcggactgccccaccagatggtagagctagtgctgatcatattgttatttccttatctgatatggcatcttctatcatagaatctgtagtacctaaacctgaagggccagttgctgacactgtttctactgacttacttatatctgaaaaggacccagtgaagaaagccaagaaggaaactgggaatggaatcattctggaagttttggaagcttacagagataaaaaggagttggaggccgaacgaacaaaaagtagcttatccgaaaccgtgtttgatcacccaccttcttctgtaatagcccttccaatgaaagagcagctttcaactacatactttacatctggagagacctttggtcaggaaaaacctgcatctcagttaccatctggcagtccttctgtttcctctcttccagctaaacctcgcccattctttagaagttcttctttggatatatcagctctctgtcctttcctttctaatgatgttggcccacttttatgactgaatacatattaaaatcaccattcaaattat

SEQ ID NO: 465837 - DNA, 2248 bp, Homo sapiens
agcagtcaccatacattagttaagcttcatcaagtgtcagcaaattctgcaccctcatgaaagatggaatataattggcattacttcttatccatcgcaggaatatgtagggttttggctgtttctctttctgtacccattcaagaatggctttgtttaaattgccaaacccagagagcaatatcaggacagcttggagacatacgcaaaatgccacctgcaccatcaggacccaaagcatctcctatgcctgttcctacagaatcatcatctcagaaaacagcagtgcctccccaagtaaaattagtgaaaaagcaagaacaagaagtaaaaacggaagctgaaaaagtcattctggaaaaagtaaaggaaacactatcaatggaaaaaattcctcctatggtaaccacagatcaaaaacaagaagagagtaaactagagaaagacaaagcttcagctcttcaagaaaaaaagccactccctgaagaaaaaaaactaatccctgaagaagaaaagatacgttctgaagaaaaaaagccactcctagaagaaaaaaagccaacccctgaagacaaaaagctactcccagaggcaaaaacatcagccccagaagaacagaaacatgacttacttaaatctcaagtacaaattgctgaagaaaagcttgaaggcagagtggctccaaagacagtgcaagaagggaaacaaccacagaccaagatggaaggtttaccatctggcacacctcagagtttacctaaagaagatgataagacaaccaaaacaataaaagaacagccacagccaccatgcacagcaaaacctgatcaggtggaacctgggaaagaaaaaacagaaaaggaagatgacaaatcagacacctcaagttctcagcagcctaaaagcccccaaggtctgagcgacacgggatattcttccgatggaatatcaagctcacttggtgaaattccaagtcttattccaactgatgaaaaggatattctcaagggactcaaaaaggactctttttcacaagaaagcagcccttccagcccctcagatttggctaagttagaaagtacagtcctatctattttggaagctcaagcaagtacacttgctgatgaaaagtcagaaaagaaaacacaaccccatgaagtttctcctgaacagcctaaagaccaagagaaaactcagagtttatctgaaaccttggaaattactatttcagaagaggagatcaaagagagtcaagaagaaaggaaagacacttttaaaaaagatagccaacaagatattccttccagcaaggaccataaagagaagtctgagtttgttgatgacataactactagaagagagccttatgattcagttgaagagagtagtgaaagtgaaaactcacctgttccacaaagaaaacgaagaactagtgttggctcatcaagcagtgatgagtataaacaggaagacagccaaggatcaggggaagaggaggacttcattcgaaaacaaatcatagaaatgagtgctgatgaagatgcttcaggttctgaagatgatgagttcatcagaaaccagctcaaagagattagtagcagtactgagagccagaagaaggaagaaacaaagggaaaaggcaaaataacagcagggaaacacagacgactgactcgaaaaagtagcacaagcattgatgaagatgcaggaagacgtcactcatggcatgatgaagacgatgaagcatttgatgaaagtcctgaacttaaatacagagaaactaaaagtcaggaaagtgaagaacttgtagttactggaggaggagggctacgccgatttaaaacaattgagctcaacagtacaatagcagataaatattctgcagagtcatcacagaaaaaaacaagtttgtattttgacgaagagccagaattggaaatggaaagcctgacagactcacctgaagataggtcaaggggagagggatcttcgagtctgcatgcttccagcttcactcctggtacatcccctacatcagtatcatcacttgatgaggacagtgacagtagcccgagtcacaaaaaaggagagagcaaacagcaacgcaaagctcggcacagaccacatggccctcttttgcctactattgaagattcttcagaggaagaagaattgagagaggaagaagaattattaaaggagcaagaaaagcagagggactgatgggagcaagattggggtaccgagc

SEQ ID NO: 465838 - DNA, 6872 bp, Homo sapiens
agcagtcaccatacattagttaagcttcatcaagtgtcagcaaattctgcaccctcatgaaagatggaatataattggcattacttcttatccatcgcaggaatatgtagggttttggctgtttctctttctgtacccattcaagaatggctttgtttaaattgccaaacccagagagcaatatcaggacagcttggagacatacgcaaaatgccacctgcaccatcaggacccaaagcatctcctatgcctgttcctacagaatcatcatctcagaaaacagcagtgcctccccaagtaaaattagtgaaaaagcaagaacaagaagtaaaaacggaagctgaaaaagtcattctggaaaaagtaaaggaaacactatcaatggaaaaaattcctcctatggtaaccacagatcaaaaacaagaagagagtaaactagagaaagacaaagcttcagctcttcaagaaaaaaagccactccctgaagaaaaaaaactaatccctgaagaagaaaagatacgttctgaagaaaaaaagccactcctagaagaaaaaaagccaacccctgaagacaaaaagctactcccagaggcaaaaacatcagccccagaagaacagaaacatgacttacttaaatctcaagtacaaattgctgaagaaaagcttgaaggcagagtggctccaaagacagtgcaagaagggaaacaaccacagaccaagatggaaggtttaccatctggcacacctcagagtttacctaaagaagatgataagacaaccaaaacaataaaagaacagccacagccaccatgcacagcaaaacctgatcaggtggaacctgggaaagaaaaaacagaaaaggaagatgacaaatcagacacctcaagttctcagcagcctaaaagcccccaaggtctgagcgacacgggatattcttccgatggaatatcaagctcacttggtgaaattccaagtcttattccaactgatgaaaaggatattctcaagggactcaaaaaggactctttttcacaagaaagcagcccttccagcccctcagatttggctaagttagaaagtacagtcctatctattttggaagctcaagcaagtacacttgctgatgaaaagtcagaaaagaaaacacaaccccatgaagtttctcctgaacagcctaaagaccaagagaaaactcagagtttatctgaaaccttggaaattactatttcagaagaggagatcaaagagagtcaagaagaaaggaaagacacttttaaaaaagatagccaacaagatattccttccagcaaggaccataaagagaagtctgagtttgttgatgacataactactagaagagagccttatgattcagttgaagagagtagtgaaagtgaaaactcacctgttccacaaagaaaacgaagaactagtgttggctcatcaagcagtgatgagtataaacaggaagacagccaaggatcaggggaagaggaggacttcattcgaaaacaaatcatagaaatgagtgctgatgaagatgcttcaggttctgaagatgatgagttcatcagaaaccagctcaaagagattagtagcagtactgagagccagaagaaggaagaaacaaagggaaaaggcaaaataacagcagggaaacacagacgactgactcgaaaaagtagcacaagcattgatgaagatgcaggaagacgtcactcatggcatgatgaagacgatgaagcatttgatgaaagtcctgaacttaaatacagagaaactaaaagtcaggaaagtgaagaacttgtagttactggaggaggagggctacgccgatttaaaacaattgagctcaacagtacaatagcagataaatattctgcagagtcatcacagaaaaaaacaagtttgtattttgacgaagagccagaattggaaatggaaagcctgacagactcacctgaagataggtcaaggggagagggatcttcgagtctgcatgcttccagcttcactcctggtacatcccctacatcagtatcatcacttgatgaggacagtgacagtagcccgagtcacaaaaaaggagagagcaaacagcaacgcaaagctcggcacagaccacatggccctcttttgcctactattgaagattcttcagaggaagaagaattgagagaggaagaagaattattaaaggagcaagaaaagcagagggaaatagaacagcaacaaagaaagagttctagtaaaaaatcaaagaaagacaaagatgaacttcgagctcagagaagaagggaaaggccaaagacaccacctagtaatctctctcccattgaagatgcatctccgacagaagagttacgtcaggctgcagaaatggaggagctccatagatcttcttgttctgaatattcacctagcatagagtcagacccagaaggttttgaaataagcccggaaaaaataatagaagtacaaaaagtttataaattgcccacagctgtttcattatactcaccaacagatgagcaatctattatgcagaaagaaggtagccaaaaggcgttaaaaagtgctgaggagatgtatgaagaaatgatgcataaaacacacaaatacaaagcttttccagctgcaaatgaacgagatgaagtgtttgaaaaagagcctttgtatggtgggatgctaatagaggattatatttatgaatctttagtagaagacacgtacaatggatcggtagatggcagtctgctaacaaggcaagaagaagaaaatggatttatgcagcagaaaggaagagagcaaaagataagactttcagaacagatttatgaagatcctatgcagaaaattacagacctccagaaagagttttatgagttagaaagcttacattctgttgtgcctcaggaagatattgtttcaagctcttttatcatcccagaaagccatgagatagtggacctgggtactatggtaacttctacagaagaagaaaggaaactactagatgctgatgctgcctatgaagaacttatgaagaggcaacagatgcaattaacacctggatctagcccaacccaggcccccattggtgaggatatgacagagtccaccatggactttgacagaatgccagatgcctctttgacatcaagtgttctctcaggagcgtctcttacagattcgaccagcagtgcaacactctctatcccagatgttaaaataacccaacatttttcaacagaagaaattgaggatgaatatgtaaccgattatacaagagaaattcaagagataattgcccatgaatcgctgattttgacctactcggagccttcagaaagtgctacatctgtcccaccctctgacacaccttctctcacatcatctgtttcttcggtctgtaccacagatagctcttcacccattactaccctggatagcataaccacagtttatacagagccagtggacatgataactaaatttgaagattctgaggaaatttcttcatcaacttattttccaggcagcattatagactatccagaagaaataagtgtatctttagatcggactgccccaccagatggtagagctagtgctgatcatattgttatttccttatctgatatggcatcttctatcatagaatctgtagtacctaaacctgaagggccagttgctgacactgtttctactgacttacttatatctgaaaaggacccagtgaagaaagccaagaaggaaactgggaatggaatcattctggaagttttggaagcttacagagataaaaaggagttggaggccgaacgaacaaaaagtagcttatccgaaaccgtgtttgatcacccaccttcttctgtaatagcccttccaatgaaagagcagctttcaactacatactttacatctggagagacctttggtcaggaaaaacctgcatctcagttaccatctggcagtccttctgtttcctctcttccagctaaacctcgcccattctttagaagttcttctttggatatatcagctcaacctcctccccctcctccccctccccctcctcctcctcctccaccaccaccccctcctcccccaccacttcctccaccaacttcacctaaaccaactattcttcctaaaaaaaagttaacagttgcatctccagtgactacagctacacctctgtttgatgctgttactactctagagaccacagctgttctgagaagtaatggattacctgttacaagaatatgtactactgcacctcctcctgttcctcctaagccatcttcaattccatctggacttgtatttacccacaggcctgagccaagcaaacctccaatcgcccccaaaccagtgattcctcagcttccaacaactacacaaaaaccaacagatatacaccccaaaccaacaggcctatctttaacttcaagtatgaccttaaatttagtgacttcagcagattataaattgccttcccctacctccccactttccccacactccaacaagtcttcaccaagattttccaaatccctcacagaaacttatgtagttattacattgccatctgaaccagggactccaacagattcttctgctagtcaagcaattaccagttggcccttgggatcaccctccaaagatctggtttctgttgaacctgtgttttctgtagttcctcctgtgacagctgtagaaattccaatttcttcagaacagaccttctacatctctggagctttacagacattttctgctacccctgtcacagcaccctcttcatttcaagcagctcccacatcagttacacagtttctcactactgaagtttccaagactgaggtttcagcaaccagaagtacagctcctagtgttggtctcagcagcatttccataacaattcctccagagcctcttgctctagataacatacatttagagaagcctcagtataaagaagatggaaaattgcaacttgttggtgatgtaattgatttgcgtacagtaccaaaggtagaagttaaaacaactgataaatgtattgatctttctgcttctacaatggatgtgaaaaggcagatcacagcaaatgaagtttatgggaaacaaattagtgctgtccaaccctctattataaatcttagtgtgacatcatcaatagtgactcctgtatctctggccactgagacagtgacctttgtcacatgcacagctagtgcaagttacactacaggcacagaaagcctagtgggtgcagaacatgcaatgacaacaccactccaacttacaacatcaaagcatgctgagcccccatacaggataccaagtgaccaggtctttcctatagctagggaagaagcaccaataaacttatctctaggtactccagcacatgcagtgacattggctattacaaaacctgtcactgtgcctcctgttggtgtcacaaatggatggactgatagcaccgtatcccagggaatcactgatggggaagtagtggatctcagtacaaccaagtctcacagaacagtcgtaacaatggatgagtctacttcaagtgtgatgaccaaaataatagaagatgaaaaacccgttgatttaaccgcagggagaagagctgtgtgctgtgatgtggtttataaattaccatttggaaggagctgcacagcacagcagcctgcaactactcttcctgaggatcgttttggttatagggatgaccactatcagtatgatcgatcagggccatatggttatagagggattgggggaatgaagccttccatgtctgacacaaatttagcagaagctggacattttttctataaaagtaagaatgcttttgattattctgaaggaactgacacagcagtagatctgacttcagggagagttactacaggtcagtatgatgtggcagcagacctttccttgaaatatcattatggtgttcctcatctcatttcaggatgaaaatgtggcttcttttccagttttgttactttttctctttctttggatgttatagcagcatattttggagtacaagtgcgcttttgttccttcattttaaaaaaaatttgttctgctcaaaatcactgcatgcgcctgcatgttcaacattgctttcattccgcatataattaggttaccctgtggatttgcatgcagtctcattcattatgttcatcaagatgagagggttttcaaactcaaaaagcatcattcattctgggaactggactataactctgccctgtatttcaggtgaggtaatggattattcaagcaagactacaggtccatatccagaaacacgacaagtcatttcaggagctgggattagtaccccacagtattccacagcaagaatgacaccaccaccaggaccccagtattgtgtggggagtgttttgaggtcatctaatggtgttgtctattcttcagtagcaactccaacaccctctacatttgctatcaccacacaacctggctccattttcagcaccacagtgagggatttgtctggtattcatacggctgatgcagtgacttcattacctgccatgcaccatagccagccaatgcctagatcatattttataacaacaggtgcatctgaaacggacattgcagtaactggtattgatatcagtgccagtttgcaaactattactatggagtctcttactgctgagacgatagactctgttcccactttaaccacagcatccgaagtgtttcctgaagtggtgggagatgaaagtgctcttttaattgtccctgaagaagataaacaacagcagcagctagacttggagcgtgagctcctggaactg

SEQ ID NO: 465839 - DNA, 999 bp, Homo sapiens
tgattttgacgattatttttagatggttggtgagctctgggacagatttcaaacaagatctttcttggcaccagtcaaaccaattaatttaattcttcagcatactattcacagtggaagcctcctgtacgtaaatgttccttccaagagctcacacaaagacctatatgtgaacgtttataacagctttattcatgatctccaaaacccagaaacaaccaagatgcccttcagcagtggtcatgtgcagtctacaaatgctgatgatgttgacaaccccttgggagacatcgcatcgctagccaagcagcggtactctaagcctctttatacaaacacaagtcgtgctgcaaatattccaggatataccggcaaggttcatttcacagccacccacccagcaaattctaatattccatcaacaaccccatcaccagattcagaactgcaccgcgtcttccagaaagaaatggcagttgacctcttccgtcaccaggctcccctgtctcgactggtcacaactgtgagaccctacaaccctttcaacaagaaggacaaagaaaccatagactactagaggaggcggccctgcgcgggctgtccaggcctccgcctggggaaggcttgtgcggcggtgggaaataaaggctgcttctccgcgctgcgcagtgtggtgggttcggtgctgttctccgctggcctgcgcgtccctgcccagcccgcctctctcccccggcaggcggcgctcagctggacactgggcgcccgccagccgcggcgcagactcccaagccgccggcagcagggtagcagggcctgtgttgcagaagattcctctttagggttggaatattgggtctacctagaggtttcacatggcaccacttcagtgcagggattctagagcagagagcagaccatagattttagaatctcaaaggcagtctagtcaaaaatccgtatgctgtcagtgggaaccctgagctactgagaaagtgc

SEQ ID NO: 465840 - DNA, 2743 bp, Homo sapiens
  misc_feature (123)..(124): n is a, c, g, or t
  misc_feature (126)..(126): n is a, c, g, or t
  misc_feature (129)..(130): n is a, c, g, or t
ggagtgggtacattctgaaaacctgagaattacccctttgacatgttcccagtgataagcaaacattatgaacgcagcaagttgagaaatatcaacattgagatgagactcaagagaccgggnntncannaggccccccaggcagagatggtgaagatggtcccacaggccctcctggtccacctggtcctcctggcccccctggtctcggtgggaactttgctgctcagtatgatggaaaaggagttggacttggccctggaccaatgggcttaatgggacctagaggcccacctggtgcagctggagccccaggccctcaaggtttccaaggacctgctggtgagcctggtgaacctggtcaaactggtcctgcaggtgctcgtggtccagctggccctcctggcaaggctggtgaagatggtcaccctggaaaacccggacgacctggtgagagaggagttgttggaccacagggtgctcgtggtttccctggaactcctggacttcctggcttcaaaggcattaggggacacaatggtctggatggattgaagggacagcccggtgctcctggtgtgaagggtgaacctggtgcccctggtgaaaatggaactccaggtcaaacaggagcccgtgggcttcctggtgagagaggacgtgttggtgcccctggcccagctggtgcccgtggcagtgatggaagtgtgggtcccgtgggtcctgctggtcccattgggtctgctggccctccaggcttcccaggtgcccctggccccaagggtgaaattggagctgttggtaacgctggtcctgctggtcccgccggtccccgtggtgaagtgggtcttccaggcctctccggccccgttggacctcctggtaatcctggagcaaacggccttactggtgccaagggtgctgctggccttcccggcgttgctggggctcccggcctccctggaccccgcggtattcctggccctgttggtgctgccggtgctactggtgccagaggacttgttggtgagcctggtccagctggctccaaaggagagagcggtaacaagggtgagcccggctctgctgggccccaaggtcctcctggtcccagtggtgaagaaggaaagagaggccctaatggggaagctggatctgccggccctccaggacctcctgggctgagaggtagtcctggttctcgtggtcttcctggagctgatggcagagctggcgtcatgggccctcctggtagtcgtggtgcaagtggccctgctggagtccgaggacctaatggagatgctggtcgccctggggagcctggtctcatgggacccagaggtcttcctggttcccctggaaatatcggccccgctggaaaagaaggtcctgtcggcctccctggcatcgacggcaggcctggcccaattggcccagctggagcaagaggagagcctggcaacattggattccctggacccaaaggccccactggtgatcctggcaaaaacggtgataaaggtcatgctggtcttgctggtgctcggggtgctccaggtcctgatggaaacaatggtgctcagggacctcctggaccacagggtgttcaaggtggaaaaggtgaacagggtccccctggtcctccaggcttccagggtctgcctggcccctcaggtcccgctggtgaagttggcaaaccaggagaaaggggtctccatggtgagtttggtctccctggtcctgctggtccaagaggggaacgcggtcccccaggtgagagtggtgctgccggtcctactggtcctattggaagccgaggtccttctggacccccagggcctgatggaaacaaggtaaaatcttatgttttctatattgctggtttggcccagtctgcctggaataagtagaccctttacaatagaaagataattgtttttcagatttttatttatttccagttctgtgatgacttccctctcagtaaacagcaatccgattccagtggacctgaattattctaaacaaacaaacaatagcaacaaactgtgggggaaaattcagagttcccaaaacataaatgaattagtatgggttgtcactcttttctcctcacgctgtttatgcttttgttttaatctagaaacattgtattcattggacattattttcagagaaaataactttttatcttaacatctcatcccatagagtaaaatttcaacaagtagtctgacttttaataataagagtttatgatgatgaaaattcattgggcaatacattcacccccaaaaatttgtctggaaacttgtgttccaaaatagaatctgtggtttagattttaaaatagatttaatatacattcctgaaaaagagattaccttaaccacaataaaaagaagacaacacatattattttcattcttaactctaggggaaaaaatgtaaacattagttgcaaaaagctattttagtgtatggaaggatgttcttgggaaaaaaataaaaacataaaagggagagaggaaataaagaaaccacggttttgtgaggtagtactttcaaagggatctatgtatctcagaagctagtcaacaggttttaagtatgtggaattgtagggttttatataaaaatggaagatacagtctctactcttaaggagattaaaacacaaacatctcctcaattgacaaggtctctttccatgctttctatctgggctaagagacttatcctt

SEQ ID NO: 465841 - DNA, 5437 bp, Homo sapiens
ggaaagaacttctcccagagggaaccccaaaagcccagaaaagttcttgacgggcagagaccacgtgctccccacagggttttgcacaggcagtcattgcacccagcagtcgtaaccaagagagctgccaccttggtgccagggcttaaagaagacatgtgtgaccatggaccaggaacgcccacgctctgacctcagcataaacaacagaaatgatcttcgaaaggttttgcatcttgaatttctctataaggagaacaagtggttccatgaaaaaaccagcaagttcactcgcagcctagatggtcgtgcagtgccagctgccatcctccacggtcagcggaatgcctgccgtgtccctcccactgtgtcactcagggtgttgaagagcagctccacccaaccccaagaagagagccggaaggtccctgagctctttgtctgcacccaacaggacattctggcttcgagcaacagctccccctccaggacctccctgggtcagcttagtgaactgaccgtagaaaggcagaaaaccactgccagcagccctccccatctgcccagcaaacggctgcccccatgggacagggccaggccgagggatccctccgaggacaccccagcagtggacggcagcacagacacggacaggatgcccttgaagctctacttgcctggtggtaattccaggatgacccaggagaggctggaaagagcgttcaaacggcagggcagccagcccgcacctgtcagtctccttggtctctcagaacaagcctgcgaagtaaccggcaaggtagagtttgttatggtcaaccaggaagaaaactcagccagagctcacacacctggaaagctgaagaatgctctagacaggggtgtccaaccttttggcttccctgggccacattggaagaacaattgtcttgtgccacgcataaaatatactaacaatagttgatgagctaaaaaaaaattgcaaaaaaaactcaatgttttaagaaagtttatgaatttgtgttgggctgcattcaaagccatcctgggctgcatgtgggctgcgggttggacaagcttgctttagcagatggtcccaaaacatacctgcagcaacatggccaggcagacgtggctaagagtttcttgtgggaagccagagatacagtgatgaatcagctcccacaaggctccctttgggcattatttctattttattttatttttcatcctatccttacttttattctttacaataagccttaatgattcctacattgattgatttctgaatgttaaaccaaccttacatcctaagaataaatcccacttggctatgatatattatctttttatatatcattggatttgacttattaatatttcgtgtaggggttttgtgtgtaggtttatgaagaagattggctggcagatttcctttcttgcaacagctttgtcagatgctgatacctaggttatgctagaagtggtccctctttttctatccccttgaagagtgagtgtaagattgatgtgatttctttcttaaatatttgggagaatttactggagaaattttctgtgcattaagttgaaaggtgttaaattatgtgttcaattaaaaactttttaattcaaatttcaactttcttcttgtgtaagttttggcaagttgtattttttcaaagagtttggccactttatatgtgtgttttaaatttattggtataaaattgtataattatattatcctcttattatcactttgaagtttgtgagatctgtagttatgtctttgtttcattcctgtgattggtaatttatgttctttctctcttaactagtctcactgggaatttatcatttgtgtaatatactcaaagaaaacttttggctttatgtttgttttctatttcattgacctctgctcttatttttattattttcttcattctattctctctgagtttaatttgctattattttctagtttactgattctcagccttcttcttttgtaatatgttttaaagctgcaaatttctctgtaagtaatgttttgtctgtattccgtaagttaatacgttacatattcgtataacttagttaatatattttctaattcccatcgtggtttcttttttttttttaacccatgggttatttaggcatgtactactaatttcatacatttagggttttttttgtttatatttatatatatattatatatattgtttatttaattgtttatatatgtattattctttatgattgcaatcctttgatatttgctgagatttccttctagtatatagttaaagcctatctctgataaacagcatgtatttggaactttaaatccagtcgataattttttattctagttggaataattatggcatttatattttctttttactcgaataacttcctttagtatttttttttagcaggtttaagaggccacctgaattccttggctcccttccttcacctttgaagccagtgacgttggctgaatcctgctcaggctgccttctttctgcttttccccttcctgctccctcttctgcttttgaggacctttgtgattaccttggacccacctggttgatccagaacactcagcatatctcaagttttgtgatttttctagaaaatggtcccatctgtcagttttcagatgtattggtttgaacttattcatactagtttcttcttactgaaaagctcctattgataatgtttagttttatccttccttttcactcttagtattgtttatttatactctcttctctttatcaatcttgccaaaggtttgcctttttactaatcttttaaaagaatcggttttgaaggttgttgaatctattattttttatttcattaactttttcatcttgcatttatttttcctccttcctactctcttttggtctattctgttgttctcttttgctgggggatgcttactttgctttccactgttccacaataataggtgcctttatgctatacactgccctctccatattactttaactgcttcccgtaagactttataagttgtgtttttaatgttaaccattttgaaatattttctgccattatttctttaaaattttctaatgcatgggttattttgggggagtgtagaggagctatctctttatcattgaattctttttttatttctttgtaatcagaaacacagtttggaattttttgagacataatatgtggactgctgtatggtcaatatttatacatttgtgcttgacaagaatatattatttaacagttggatgttttggatcaaacatgttaatttagtgttcaaattttagtctttattcttattaatgttatttttctgcttgatctgttagttgctgggagagatgtgttaaaattttctattatgctcacggattgaagagtttctcctcgtagttctgtcaaatttttgataatatgttttgaagctttgttgttaggagcatagagtttcatgatggctacatttttctgttgaatttttccttttattattctctaataaaataatattccgttgtatggatatataacattttatttatttactcatttgttgattgacatttgggttgtctccaccttttggttattgtaaatagtgctgccgtgaacatttacgcacatgtatttgtttgagtccctgttttcagttctttgggggtgcatactgaaaaatggaattgcagaataatgctatttttaactttttgaggaactcccagactgttttccacagtggcacttacttgtgaattaactgaaatgtattttttttctactcttttcacatttagaaattatacactatgtttttattgttctagtggttacttctaaaattttaatcttaattgactttaatcaatccctctaccccctcaaaaaaatgtgagattttaagaagctttaactctgatgattgtttcccattcccatgctcctgtttattatgtctggtgttttagtttcactttgtttttaactactcttaaattagttgctattattattttaattgtttttattgtcggttctcatttaggtttatctaaatgcttgccgatttcttttcttcctgatatgagtccttgatcgttcattcagtgaaggtctgtgatactaaactgttttaatccttgactgaaaatgtcttcattttgttcttacttttagtgatgttttagttgggaatttcaaagttgacagtttttttctttcagctttgaagatgttattttattgtcttatgcccttgtcattgctattgagaagtctgctgtaactgtttataggtaatctgccttttgtctaagatttttctcattgtcttttgtattccagtagttttaaaatgacatgtctaggtatgcatttatttttacatgtccatttgaatctcatgtttctatgagaatgcatgtctggaaagttcttagcaattaccttttcaggtatttcccttcctaaattctctttattctttcattctggagcttcttttatatgtatgttggactttagaagtttttcctccatttctcttatttatttgctccttcgtgcagtttatctctctcctgatggtgatattctgagtaatgtcatctgatagctcttagtagttaatgatgtcttcactaatctactgtttatgtttaccaaaatatttttccaaattttaaggaagttcaaacctgtaaaaagcttgaaagaagagtacaatgaatatctgtagacttttcacttaaattcagcaattgctcattcttccaccagtccccacaggaatgcctgtagaatcctggtggtgttgggcagaggggttttgtggttttgaattaaggcaaatgacttgactgagttgaggaggacacatggaggatgaggactgcctgggagggagggtgagggagttctgtgttctagcgccagtgaaagaaacctggagtctgaagaagtgtgtactcagagatttggtactgtgcgtcctctagctcttccattcacgccccttcatacatcttcaggaggaaaccaattcaatggagtgcaccagggcaagattacgattgttacttcaatcatatcttaccctgcaaggatgttgaaggaaaatatatttcaatgccacactcaaaagagctgtcactttttaacatagtaaatgggttttcagagagtgatgtaatattgttatttttaatacattctgtttagaaatgattttactttagttcagccctaccccttatactcttattaccttcctttcccataagcaaccattctcttatgcttaatctatatctttttcttgtgtatgttcttgcaaaatctatactgttttgtatgcatcatttttacttgacat

SEQ ID NO: 465842 - DNA, 772 bp, Homo sapiens
ctggtgtgctatgaaaaaaaacaaaaccaaagcttgtgctctggctgcaccccaaagcaataaaatcagactctccagggatgggaacaaggcagcagtggctttaaaagctctccaggatgtgaactgtgaccatttgaacagggcactgctccgagtgttattttcaagtccctgttacagagatcatgtcagaagactaaggcaccaccagcagcaccggactgggcttaaagtacatgtggaagggcgagcctcccaggattctcaaacagaagcagcctgccaggctgagccatccagaagaccccctccctcttccctgagctctgtttcttccatgaggttgaagaaaaatgccgtcgtggtcccctgcctgcttactcagcgtgtcaagcaggagttctcagctccagtgtgccatggagggccttgggaagaggtcacataccattcccatccccaggcacaggagcactgaggacccttcttgacctcctggatcagaaaggcagaggaaatgctgggcagaagtcaaggtgtcagtgggctgccctccctccggaggctccaggggagaatctattcctcgcctcttccaattgctggtggctgatggcacaccttggcttgtggccacaatactccaatttctgcctccatggtcacactgacttcatttcttctgtgtgcatcaaatttctctctgctctgtgattgcatttagggcccctggatcagcaatgtcataaaagaccccagttcttcccct

SEQ ID NO: 465843 - DNA, 6253 bp, Homo sapiens
gccctacaggtctgattctgggtcccggaggaagagacggcacagcagtggcagctcccacagcccctccctctcctcccactacagtgattccagatctcccagcaggctgagccccaagcaccgagacgaagggcgaaagacgggcagccagcggtccagcggaagccggtcgccttccccgtcgggcggcagcggatgggggtcgccccagcggaacggcggcagcgggcagcggagcggagcgcacgggggccgccccggctcggcgcacagcccgcccgatgtacgtacgcttcgctttgcggagggttcccgcgccgcgggctgcgccgtgcgtggtcgggcgggtcgccagcggggcagggggcgataagtgtggcatgggggcgggggcgggggcggccgcttcctccctcctcggctccccgctgggcgtcctggctcgggagccgccgggagtgctaggccgttgcgcccacctggccctggtgtcagggtgaggggcgcctgcggtcttgggccacccttgcgcttggcaaactgaaggccagaggggggttgaccgcggggcactgagttgggtacagggctggggaggaatcagggtctcgtgccctccccaggcatattagggtgggaggggcatggacattgataggagtcccaggcaggagcaggattcgagagacaggaccccccactgggcaccacctgggccctgagtctccctcttcccaccaagccctggccccacctctgagcacccccctccccctccctcaatcttctccccagcccctccctccctcagccccctcccccatctcagtccctctgccctctaaagtccctgctctgaggagactctgcccttttccaggcaccgcccacacttggactggtgtctcaaacctgccggctcctcttcccacggccaccctcctgaggcacctgccagcgtgcctcagagaccccacaccaacacccccaaaactgtccccacccttcctccaagaggggcacagatgcccgaagacctacaggcaggtgcaatgggggagctggcagaggagagagacgtctcagcctgtccccagatggatgggctgggcctgggttggggcttctcccagaccccagggaaggtccacatccccttctggtctgttgattatagagtacacagttgagacccctcagagagagggggctgcagtgctggcaggggcactggggtgggtgggggggtggcttggggtggggagacctgcaggttccttcccagacccgcagactgccccccacccaaccccaaagcctcagctgggagtgggagagctgcccctccccagacctcaggtctcagcagcaaacatgtacgtgttggagttggaggctacagtgagctatcatcctgtctgtagtcccagctactcgggaggctgagtcaggagaatcacttgaacccaggaggcagaggttgcagtaagttgagatcgcaccactgcactccagcctgggtgacagagcgagactccatctcaaaaaaaaaccccaaaaaacaaaaaaccctacagtgtccggggctgtctggaaggtgacacccttaggtgagggtggcagagaaggctcaggatcatggccttggggctctctctggcttctccctgtggtccaaattttatcatgtaatgggcagcctcgggtgacccccaagaagaggtgccaaggcaccccctgacctgccttatacaggaacagaaaaaggcaaaagggatgaattttgctaaaaggatgccaaagccagagggaaaggagtgggactgacctgaggcagggccactcctccagatcggctctgtggttgccttcccttttaaatgcgcgttttcccttcacccatctgtccactccgattggccttgtttaaacagtgcttgtctcctctttctgtctgggggcacctttctctcttcctgcctctctgtttctgtttgcttctgtcattgtttctgtctttctgtttctctttctccttctcttcccatttctatctctgcctgactttgtctgttcgtctgtctctctgtctgcctcctgtctctctctcttcctttccatccctctcccccggcatgggcctctctcccatgctgccagcccctctgtagcccaccctgtggttctcttccatcagctgcttcctgcatgctctatggaggttttctgttgtttgaacaataaagaaagcttggctagtggaacccattgtttaaaaaggagaaaaaaaaaagagcaaacagaaatggccgtgcaagagccccctcccatccctgggatgagacaaaagccacattggccacccatctactggctcagagggggagcacagtttagggtcactgtctttcccccattctgcattcccaatgcggagaccttcttttcttttttattattgcattcctgtccctgagcactgagaagaagcccagctcgccctcgcccagggtccgtgacaaggcggcggccgccgcacccacgccgcccgcgcgggggaaggagagcccgagcccgcgctcggcgccgtcgtcccaaggtcgcggaggccgcgcggcgggcggggcgggcaggcggcggcggcggcggcgtaggcggcggcgctcgcggtcctcggcgtccgcgccccgccgcaggggtcgccggcgcccccggcccgcgcccccccggggctcgtcgcgctcgctcagcagggcccgctccagcagcgactccggcagcggccgcggcgcccccggccccgggcccgagcccggctctgagcgaggccacggcggacacgggaaacgggccaaggagcggcccccgcgcgcgcggcccgccagcacctctccgtccccgggcgcgcacggccggcgcggcggcccagaagggaagagctcgtcgcgcagccccggcccgcacccccgctcctggagctccagccgctcgccctccaaatctcgctcgcgctctgcggagaagcggccccacagccccagccgctcgccgtcgcccaagaagcccctcagccgggacaaggacggcgagggccgcgcaaggcactctgaggccgaggccacccgcgcccggcgccgctcccgcagctactcgcccatccgcaagcggcgccgggactcgccaagcttcatggagccgcggcgcatcaccagcgccgcaagcgtcctattccatactaccggcccagcccctcttcctcctccagctgcttgagcagcgactactcgacccggagccacagccgcagccccagccccggccacagccacgggagctacagcagtcgcagccatgggacccgcagccggacacgcagcccctcgaggacccccagtcccagctaccacagccggagcagctctgagagcgggggcttctgagcccagacagactcagcttggtgcccccctggcactgggagaggcgaggggcgggccccaggaccccagtggggagggggctatatctccttgcccccaaggctacaaagaggtctcagggccagtgcacgggcagatgggaccggggaagactttgagggtgggcatccagtggacaaggagaagccagatgtgctgcttctacgggtgtcctctcccacctcctgtccacccactgtgcccggggaacaaagagccgttacgaacacaggaatctccccatcccccttcctgctgatgccaactcaccaggcttgggactgctgccggtggatggtaccagagtccatgatctgctctgtcacttcaccttagctcagtgcagccagggacaccttgcaaggtgccagccctgggagcccctcttccgcactacacagctccctccactcctctcttatcactgggcagacgaggaggtggtacagcacatgggtttggagctagacagaaggaagaacagcctaacccttggtgcacccccatccaagctggggagctgcatccttttgagctggctgcaggaggaccctggctgagggctggtggctggccccacagcctcccccaagctcctccactgacccaggagtgcccagacgggtggcccccaaaatcccagcctggggagctaggcacctcactcttggtctgacctctccaggccaggctctcctcaccccatgccctgggccaaggtcctaccagccatgactactgcatgacaagaggtggggggtacagacctcaggtacatttgaccctgaggttaaaaggggttcaggtcaagaggtgggagaggaaaggggtagatgggaggtggaatctgtaggaaagagaaaaagcaaagtcgttcactgactgagtagcccccagggagtggagacgggtccctggggagggagcagctgacaggtcagcagtgcccccagccccacccaagaggagggcagcgtgtgcctgtggtctgggacgtgggctggatggcagcccagggtcacaggcataggataacatgtgctttggacctgacaagggagtaccttgggggtctgatggggtcatggccagccgagcctctgtagagatggaggctacagccctcagaagggaggggaggaaagagactgagggccctggcctggggcgtcgatggggaagcggtggcccccagtcctcttctgctgctcccagccccctcctcctggggccctcagggatctcatgaagtcttccttggcccaaccaggcagatgccccgggctccagtggggggaggggtctggggtctggtccgggttccccgctttctctatgtcccccctccctctttctccgcagtgcggataaaaattggactcgaataaaacccttggtgcccggatggtaggtggtgagaccaggcctctgtgcatgttggcaccccgggagattcaggagggcagcggggctggggtcttcctctgagggaggcgaaaggctcagactgctccttgggaccccagagagaagagctggcatccaggagccagtgtgtctatccccctgcctctgagcttgaggctaaaacagggacccaaagagaccttcctcccagcctggaggccgggtggactttgaacatcccacggggtgggctgcctgagcccacacacccaggctaccttcagcagtgggtagggatggggtagagggaggagacacagggtggacataggcacaggggacactcacaacatggtggggtgtcacagagtggttgggacacagcctgaggcagcatgcaggcatgcatcctggctcctgtgcctcccagccatgtgacacacagctgagatgaggtgggcaggaaatattctgacagtcctcagctcagtgactgtgactgccatagagtgagcatttaaaaggtggccacagccgggcgcggtggctcgcgcctgtaatcccagcactttgggaggctgaggcggacggatcacctgaggtcaggagttcgagaccagcctgaccaacatggtgaaaccccgtctctactgaaaatacaaaaattagccgagtgtggtggtgggcacctataatcccaggtactcaggaggctgaggcaggagaatcgcttgaacccgggaggcaaaggttgcagtgagccgagatcgagccactgtactcctgcctgggcaacagagtgagactctgtctcaaaaaagaaagaaaagaaagaagaggaaggaaagaaaaaggaaaggaaggaaggaaagaaaagaaaagaggccaggcgcggtggctcacccctgtaatcccagcactttgggaggccgaggcaggcggatcacgaggtcaggagatcaagaccgtcctggctaacatggtgaaaacccatctctactaaaaatacaaaaaattagctgggcataatggcaggcacctgtagtcccagctactagggaggctgaggcaggagaacggcgtgaacccgggaggcggagcttgcagtgagctgagattgcaccactgcactccagcctgggcaacagagcgagactccgtctcaaaaaaaaaaacaaaaaaacaaaaaaacaaaggaaagaaagaaaaaaaacaaagaaaagaaagagaaaagaaaggaaagaaatggtggccacttagggaaaaccccgtgcctgcctctggctagggactagcagggtgcctggaaagagtggtttacagaagttaatttcctttttatttatttatttattaaaaatgtg

SEQ ID NO: 465844 - DNA, 3148 bp, Homo sapiens
gtgtctctaaggccagggctcaggggaaactgaggcaggaagccctggccgctgctgggatggggctcggggcctgggatggcctgtaatcagctttttcttcccggcagcgccgcaagcgtcctattccatactaccggcccagcccctcttcctcctccagctgcttgagcagcgactactcgacccggagccacagccgcagccccagccccggccacagccacgggagctacagcagtcgcagccatgggacccgcagccggacacgcagcccctcgaggacccccagtcccagctaccacagccggagcagctctgagagcgggggcttctgagcccagacagactcagcttggtgcccccctggcactgggagaggcgaggggcgggccccaggaccccagtggggagggggctatatctccttgcccccaaggctacaaagaggtctcagggccagtgcacgggcagatgggaccggggaagactttgagggtgggcatccagtggacaaggagaagccagatgtgctgcttctacgggtgtcctctcccacctcctgtccacccactgtgcccggggaacaaagagccgttacgaacacaggaatctccccatcccccttcctgctgatgccaactcaccaggcttgggactgctgccggtggatggtaccagagtccatgatctgctctgtcacttcaccttagctcagtgcagccagggacaccttgcaaggtgccagccctgggagcccctcttccgcactacacagctccctccactcctctcttatcactgggcagacgaggaggtggtacagcacatgggtttggagctagacagaaggaagaacagcctaacccttggtgcacccccatccaagctggggagctgcatccttttgagctggctgcaggaggaccctggctgagggctggtggctggccccacagcctcccccaagctcctccactgacccaggagtgcccagacgggtggcccccaaaatcccagcctggggagctaggcacctcactcttggtctgacctctccaggccaggctctcctcaccccatgccctgggccaaggtcctaccagccatgactactgcatgacaagaggtggggggtacagacctcaggtacatttgaccctgaggttaaaaggggttcaggtcaagaggtgggagaggaaaggggtagatgggaggtggaatctgtaggaaagagaaaaagcaaagtcgttcactgactgagtagcccccagggagtggagacgggtccctggggagggagcagctgacaggtcagcagtgcccccagccccacccaagaggagggcagcgtgtgcctgtggtctgggacgtgggctggatggcagcccagggtcacaggcataggataacatgtgctttggacctgacaagggagtaccttgggggtctgatggggtcatggccagccgagcctctgtagagatggaggctacagccctcagaagggaggggaggaaagagactgagggccctggcctggggcgtcgatggggaagcggtggcccccagtcctcttctgctgctcccagccccctcctcctggggccctcagggatctcatgaagtcttccttggcccaaccaggcagatgccccgggctccagtggggggaggggtctggggtctggtccgggttccccgctttctctatgtcccccctccctctttctccgcagtgcggataaaaattggactcgaataaaacccttggtgcccggatggtaggtggtgagaccaggcctctgtgcatgttggcaccccgggagattcaggagggcagcggggctggggtcttcctctgagggaggcgaaaggctcagactgctccttgggaccccagagagaagagctggcatccaggagccagtgtgtctatccccctgcctctgagcttgaggctaaaacagggacccaaagagaccttcctcccagcctggaggccgggtggactttgaacatcccacggggtgggctgcctgagcccacacacccaggctaccttcagcagtgggtagggatggggtagagggaggagacacagggtggacataggcacaggggacactcacaacatggtggggtgtcacagagtggttgggacacagcctgaggcagcatgcaggcatgcatcctggctcctgtgcctcccagccatgtgacacacagctgagatgaggtgggcaggaaatattctgacagtcctcagctcagtgactgtgactgccatagagtgagcatttaaaaggtggccacagccgggcgcggtggctcgcgcctgtaatcccagcactttgggaggctgaggcggacggatcacctgaggtcaggagttcgagaccagcctgaccaacatggtgaaaccccgtctctactgaaaatacaaaaattagccgagtgtggtggtgggcacctataatcccaggtactcaggaggctgaggcaggagaatcgcttgaacccgggaggcaaaggttgcagtgagccgagatcgagccactgtactcctgcctgggcaacagagtgagactctgtctcaaaaaagaaagaaaagaaagaagaggaaggaaagaaaaaggaaaggaaggaaggaaagaaaagaaaagaggccaggcgcggtggctcacccctgtaatcccagcactttgggaggccgaggcaggcggatcacgaggtcaggagatcaagaccgtcctggctaacatggtgaaaacccatctctactaaaaatacaaaaaattagctgggcataatggcaggcacctgtagtcccagctactagggaggctgaggcaggagaacggcgtgaacccgggaggcggagcttgcagtgagctgagattgcaccactgcactccagcctgggcaacagagcgagactccgtctcaaaaaaaaaaacaaaaaaacaaaaaaacaaaggaaagaaagaaaaaaaacaaagaaaagaaagagaaaagaaaggaaagaaatggtggccacttagggaaaaccccgtgcctgcctctggctagggactagcagggtgcctggaaagagtggtttacagaagttaatttcctttttatttatttatttattaaaaatgtg

SEQ ID NO: 465845 - DNA, 3122 bp, Homo sapiens
tcaaggtccagcctgctgagtggcctgtggtcagcctgggggccaggcggacccctctgcacaggctgcctgggagatgcccaacgccgcaagcgtcctattccatactaccggcccagcccctcttcctcctccagctgcttgagcagcgactactcgacccggagccacagccgcagccccagccccggccacagccacgggagctacagcagtcgcagccatgggacccgcagccggacacgcagcccctcgaggacccccagtcccagctaccacagccggagcagctctgagagcgggggcttctgagcccagacagactcagcttggtgcccccctggcactgggagaggcgaggggcgggccccaggaccccagtggggagggggctatatctccttgcccccaaggctacaaagaggtctcagggccagtgcacgggcagatgggaccggggaagactttgagggtgggcatccagtggacaaggagaagccagatgtgctgcttctacgggtgtcctctcccacctcctgtccacccactgtgcccggggaacaaagagccgttacgaacacaggaatctccccatcccccttcctgctgatgccaactcaccaggcttgggactgctgccggtggatggtaccagagtccatgatctgctctgtcacttcaccttagctcagtgcagccagggacaccttgcaaggtgccagccctgggagcccctcttccgcactacacagctccctccactcctctcttatcactgggcagacgaggaggtggtacagcacatgggtttggagctagacagaaggaagaacagcctaacccttggtgcacccccatccaagctggggagctgcatccttttgagctggctgcaggaggaccctggctgagggctggtggctggccccacagcctcccccaagctcctccactgacccaggagtgcccagacgggtggcccccaaaatcccagcctggggagctaggcacctcactcttggtctgacctctccaggccaggctctcctcaccccatgccctgggccaaggtcctaccagccatgactactgcatgacaagaggtggggggtacagacctcaggtacatttgaccctgaggttaaaaggggttcaggtcaagaggtgggagaggaaaggggtagatgggaggtggaatctgtaggaaagagaaaaagcaaagtcgttcactgactgagtagcccccagggagtggagacgggtccctggggagggagcagctgacaggtcagcagtgcccccagccccacccaagaggagggcagcgtgtgcctgtggtctgggacgtgggctggatggcagcccagggtcacaggcataggataacatgtgctttggacctgacaagggagtaccttgggggtctgatggggtcatggccagccgagcctctgtagagatggaggctacagccctcagaagggaggggaggaaagagactgagggccctggcctggggcgtcgatggggaagcggtggcccccagtcctcttctgctgctcccagccccctcctcctggggccctcagggatctcatgaagtcttccttggcccaaccaggcagatgccccgggctccagtggggggaggggtctggggtctggtccgggttccccgctttctctatgtcccccctccctctttctccgcagtgcggataaaaattggactcgaataaaacccttggtgcccggatggtaggtggtgagaccaggcctctgtgcatgttggcaccccgggagattcaggagggcagcggggctggggtcttcctctgagggaggcgaaaggctcagactgctccttgggaccccagagagaagagctggcatccaggagccagtgtgtctatccccctgcctctgagcttgaggctaaaacagggacccaaagagaccttcctcccagcctggaggccgggtggactttgaacatcccacggggtgggctgcctgagcccacacacccaggctaccttcagcagtgggtagggatggggtagagggaggagacacagggtggacataggcacaggggacactcacaacatggtggggtgtcacagagtggttgggacacagcctgaggcagcatgcaggcatgcatcctggctcctgtgcctcccagccatgtgacacacagctgagatgaggtgggcaggaaatattctgacagtcctcagctcagtgactgtgactgccatagagtgagcatttaaaaggtggccacagccgggcgcggtggctcgcgcctgtaatcccagcactttgggaggctgaggcggacggatcacctgaggtcaggagttcgagaccagcctgaccaacatggtgaaaccccgtctctactgaaaatacaaaaattagccgagtgtggtggtgggcacctataatcccaggtactcaggaggctgaggcaggagaatcgcttgaacccgggaggcaaaggttgcagtgagccgagatcgagccactgtactcctgcctgggcaacagagtgagactctgtctcaaaaaagaaagaaaagaaagaagaggaaggaaagaaaaaggaaaggaaggaaggaaagaaaagaaaagaggccaggcgcggtggctcacccctgtaatcccagcactttgggaggccgaggcaggcggatcacgaggtcaggagatcaagaccgtcctggctaacatggtgaaaacccatctctactaaaaatacaaaaaattagctgggcataatggcaggcacctgtagtcccagctactagggaggctgaggcaggagaacggcgtgaacccgggaggcggagcttgcagtgagctgagattgcaccactgcactccagcctgggcaacagagcgagactccgtctcaaaaaaaaaaacaaaaaaacaaaaaaacaaaggaaagaaagaaaaaaaacaaagaaaagaaagagaaaagaaaggaaagaaatggtggccacttagggaaaaccccgtgcctgcctctggctagggactagcagggtgcctggaaagagtggtttacagaagttaatttcctttttatttatttatttattaaaaatgtg

SEQ ID NO: 465846 - DNA, 2657 bp, Homo sapiens
ctggggaattccctgtaagccctgttacaggggctgcaccccagatacaacctgacctgtgtccaaggcgggcaactcaacccttagatattgaatgggtcccatggcaccaatgcttaaacaccagcagccctcacaaccacagatcgtgttttaaggatgaggaggtagttctctggatgcacaggcttcaatccaaatgggctcatgacgccgcagcacacacccagactgcagcctgaagagttggagcattgcattcacagaaagcatccagacatgatcatgggctcagggatacacctgttctccgatgtgtaccagtgaaggatggaaactcctatgcctcccagaaagcaccactcaagcttttgctgaatgcttctctgaaggcccacaaggcctgagaggctgtgcaacaccagcagtaaagtgaatgcccagactcccacctcctttcttgggtggccatctggaaaggccactcccaccctgatggctaatgcctcagaccagttcttggcccagatgatcctagacaattgtttaagcttaaactgttcattggccaagcaaacaggtgatagtcacctctggggaaccacatgccgcgtgtacatccagtactcaggagaacccaaaaatgtctgttccacatagcaacagaagcccaggtagcactcattctcacctgggtgttctccaacatcccagctcagccaaatggctttcattgctttttatggttagaccccaggtcctcgggacactgctttagaaacacattccaaatcctcctctgtgtgtaggtggcattcctatcccaatctctttgcagggtgtatactatgatacgcagccaggctgtcccagaggctttaaatattcccttggtgcaggtagttcagcttagccacagccaatgcatcacagggtcaactgtgttaggagccattgagaatccatagttggttgctgcctgggcctggccagggctgaccaaggtagatgagaggttcctctgtggagttctactttaacctcaccttcccaccaaatttctcaactgtccttgccaccacaattatttaatggacccaacagaaagtaaccccggaaattaggacacctcatcccaaaagacctttaaataggggaagtccacttgtgcacggctgctccttgctatagaagacctgggacagaggactgctgtctgccctctctggtcaccctgcctagctagaggatctgtaagtactacaaaacttaaactttacactgagttttcattattgaagctatgcctccaatctgacctctgactgtggggccaccccagagggaaccagcgggcgaatccctgctaggaacgtctgtccggacctctggtgactgctggggacgatggcttccagctaacttaatagagaaactcaagcagtttccttctaaacacacatgtcctggttgacatgtccagtagagactatcacaggtctttggaacattcttttgagagaaacctatttaggtccttggtctgtttttcaatcaggttgtttgatttttgctattgagttgttggaattccttatgtattcagatatttgccccttcggccatgtaggttttgcaaatattttctctcattttctgggttatcttttcactcggttgattgtttcctttgctgtgcagatgctttagcgttaaatgaagccacacttgtctattttcccttttattgcctgtgcctttggtgtcatagccaagaaatcattacctacatcaatgtcaaaagctttatccttctatacacttctagtagtttatggtttcagttgttacatttaggttttcaattcattctgagttgatgtttctacatggtgtgagataaagatttaaatacatacatatataaaatcatgaggtagtgtacactataaatatacaattgttaattgttactcaagtctaagtagaggtggaaataataaactttcttttttttacttaaaccactctgtgtcactgagctgatttcacctttagcctgataaaatcattgtcctctccaccctgattcctacaggagactactcaccccataacctcaaaaacctcttcatgaggatgacctccagagaacagcaggacccatcttcagaaaataagaagcatttgttccctgagcctgtgaccccagccatgaggaccctcgccatccttgctgccattctcctggtggccctgcaggcccaggctgagccactccaggcaagagctgatgaggttgctgcagccccggagcagattgcagcggacatcccagaagtggttgtttcccttgcatgggacgaaagcttggctccaaagcatccaggctcaaggaaaaacatggactgctattgcagaataccagcgtgcattgcaggagaacgtcgctatggaacctgcatctaccagggaagactctgggcattctgctgctgagcttgcagaaaaagaaaaatgagctcaaaatttgctttgagagctacagggaattgctattactcctgtaccttctgctcaatttcctttcctcatctcaaataaatgccttgttacaagatttctgtgtttccacctctttaatgtgtgatatgtgt

SEQ ID NO: 465847 - DNA, 1724 bp, Homo sapiens
cgacgatgtgtggttctggatagaatcttgttctgccaacagacaccaactatgatatctgcagtccttactgcaactcgttacgcaaagtttgcaaagagatccaaccacacgttcgcacagagaggcggccttcacgcatacttcataccccttccctttgtctaccacttgtatgtgctcatgatgccagaacttctcaatgggaatagcctgtttgcacaaaactgtgtggggatgcagggcaagtgttgtgcacggggcctgctgctggggacagcacctgccactggggcctcgtgcgttcgtcatcagctgttgcgattggcccagcatctagatagtatctggaaaattgaatgtgacccttttccacaccttgtaacggagcttcccttggaggtggacaaacttctcactcacaagaattcatgtcttcctgattacgttgctatcatcgatgtgtttgagcccattgatgccgacggcatctgtcggatggaaggaagcaccgtgcaaggctcttccttctgcacagcctcttcccagttttgcgagagacagagagcaacagagagagatgggcagggattgattcgaggattggctgactcgattatggagggtgagaagtcccaggacaggccgtctgcaaggcgtaaacccagggaagctgctggtatggctcggttcaagtccaaaggcctcagcaccaaggaaaccaaggtgataactctcatcacgtatattgtaaattacacggaaacctaccgagtagaaagatctcatattgaacctcatttacatggagatcagttatcagagattacagaaaagagccgctggccagtgagtaagtctcacaagatccgatggttttataaagggcagttcccctgcacaagctctcttctctgccaccacgcgtttgctgttcattcacctttcaccatgattgtgaggcctcccagccatgtggaactgtgcagactgaaagcttacaactgttacattaaatccagatggattggtttctttgcaataatcgtaactcgtctcttcctcccacgtttttaatattaagaaggtgtctatacaaatgcccttagccacatttatggtggtttctgaagaggaaaagtgttccatgaaagatgctggcccagagttatcaactggaaatcagtccaagaaaagatagttttctgtgttaataattttttctcagtgcgattgaattcttgcaatggttacacacagatgactttgattgatttgaaacattctctcctcttcttcccctcctcctccaactccttctcctttcatcctttcttggattcttgtgagagccttcttctgggacaattcccattctagttccagcctcagcacacctgtctggtattaggctgtgattgttctcatcattgaaaaaatagggaaactgagttatcaaagatcttattggttgaattgctctgaatatcagactgcctagcccaacacaggtaaaagagagtatcttatgtaataacagagtcaggtttctgatgataaaatgaagccacaatttcattaatatacaaaatgataatgagtgagtaaccaaaagccctccaaagcttacatcctagagtcccaaaatcccagatgccaggactgggcatggcatgttctttcattccttataaacaggtgataggatagaaagtgagcacaga

SEQ ID NO: 465848 - DNA, 3937 bp, Homo sapiens
ggcgccttgttagttatgcaaatttctgcagctggcttgaatttatccccagaaaatggggttttcttttctgttgcatcgtcatgctgcaaaatttccaaacttttatggagatcaagataaaagtaaaacaagcaaggcctggatccatgacactaagagtggctgtgatctatccagtgtctactttgtgcccatcattgcgctgcactcaactggctccgagggcctggaatgcagatgccatgagacagtgactgtttccttctggctcactcctgacttgtcatctaacacagtgctgactccagaacagaagggagtacgtagccttaatattccattccttgctgccatgcccaagagagacacgactaatccatcacagcattcttcccacaaactctgtaagtggccttgtaatcctcctctaattggccattcccaatctgaatcggcacataagatgaagccatacctgaactaatttgcaagataaagctaaacacaagatttgggtgtgcacctggcttgcagcagaactggctgggatggcttcataacttcccttctaacaatataacaatatgcttctgtaaattttcacactgaattggacaagaatcagaatatcctgttttgaacatctgcacagattgacaaacaaaaatggaacatcaagactgactggaaatggtgatgtgaaattcattaaatgctcttgcaattgccagaggtgccaagactgaggctcagagaaatgaaataacatgccaaaggtcacagtgtctagtggagctggggccaaattcaggttcgcgtggtaataaagctttttttatgccatcaccctgcataactgtctgttatgatctttgaaaagtcagattttttcaaaatcacaaaaattctaattttgattgccttacacactcttcctcatcattgtatttttctattggaattaaagtttgcaacctttggagactagaaatctaaggcagcaatttcagatgttttgaagaccctcataaactacaattagtccacaataactagcaagaaacaaacacttctaaaaaaagcatctagtcatttaaaatgatttttaatttcatgactagtatataattatacaagaacagagctatttagttagaaaaaataactttgaagatgagagtccatttagtatttatttgctccaaggttctaattacttcaaaaactactgaaacttcatatatgattactaacagcattcaatagcagctttgatggaagttgaaccaatcttttaaaaattttttagcctcattaacatgagagaaataaaaaataataaataccaggggcacatatatatgatgtcattattactttcccactttgttgccagttcaggtctcccatgctagaaaaatgaaaaataaaacctaacatgtcttcctggtcattttggaattgaggccaacaaaataagaccagtgaagaacaataaacacagtattgtttttctgtaatatattagcaaatcctggtagcttcaattttgtttcattacatttccaatatgtgcatccatcaattcatcttcttttcttcccatagttaagatttatgcactttattaatcacctcaagacagtcatctcagcagtttcatttggtggagtaaaccagtcaaaccccatcagacttctggggatgtcacacagcaaactttggattcctggcaacttgaatcacccttgccaatatgagatttttcagagcaatccatcttagggccaactaatatatcacatctgcctctgctcttttcctaattaataggttcaaagagagacacctgctagatcacacaaatgtccccctgaagcagcctcagcatataggttccttggcagcagcagatcaaaatggcaggcagttaaatgttctattttccaaatgcaagttgaatgatatgaagggtctaggtggcattcagcaaacccacattctccaaagggcttttaaaaacaaaggtaacacattcttcacattcactgcatgctcaggtggtttaaaaatatgatgttgccatgtgtgatggaccaatcatttgtgctggcttctagcttacagcagtgctaaccagaatcagggctgctgacactctacttaagttgttgccacctgttctaattcttggtaactgtattttttgttatcatttttttgatgccaactgcattctccctaaagttctgaaaggacatagttctaaagttagtgtgctcttaattaatttaaaaatatgctttattaagtccccaactgtgcatttgagttacctgccagcttcttttgagatacagagagtaaagacttgggttccaaatgtaactagatcagaaagatctaactacatttccaaatcagaaagaagcaaatttacaaaattattcattcaagagagatatcttctgagcctttttaggtcttgtctgtttctatgatcaaacagaagggtttgggtgtgcacttttcacactaaaagactcaaataaggaagattcaatgacttgtaagcttgcaaaggatcagctaagtaaaaattataaccttatataacagcactgcacataagaccaaaaataaaaaatgccctatttgatattaagaaaatgtaatgaaaaatccagagaggaaaatgggttaccacagtgctatttctatggtctttcaaatgcagtcacacttccaaaatcttgcaattaatggcattaaaaactctccagcctcacaagtttattaagtagcagtgtagttaaacaaaaagggtgctagactagacattgagagatctatactctagccttgactgtgccttaaactgtagtgtgttggtcttgaaccatggaacccaccatacagtaagtgggctggaataaacaatggctacccactggttgccctcaaaggtagcagtgggtctcctcgcactatttttccttcttagaaaaagccaagaaatcatattaacccataatatgattcacaaattagtcaaaacatcacatttatttgctttttgcttaaattacattaactgaaagagttaacactagttatttcatgctaatccattgctcccattcagggatcatgtttctacttagtgataaatcaagttaattactacttaagttcaaattgtaaaggggatcttgcaaaaagtaaaactcatagggaaactaagttctgagtgggaacttggtggtgaccagttaggaaagggttttactaaaatcccttccagttcaggatttctatgactgcaaatatataaatatgaaaaataattagtctttttccagtgtcttttgaatttcagtgtagaactgttttatttactaaatgcatgcctttacaactcttacagagagaacatatacttgcagagagagcattctagccaaactcaccatttccttggctggcctgctcctcgcttcactggcctaattattctcataagcagcttaactgaaatgttggcttacaaatttatatttcaatttaattgtgcccagttcctagtacaatgaaaatgttaaaagtcttttcctattttgacagtgtttcactgtgtttatttttagggacactaacaaataaacttcatgttatctttatacatacaccttttcttttttctttagattaacaacacacaggaaaaaccctcaacttctttcattcgcctgttgagataaagggaaagagagtccccatccaggcctgcaggagagggagaactggtggatgcaaatgaaaaagcagaggcattcctcagggtcttgctctgccacccaggggttggtggctgcagtgagctatgatgacatcactgtactgcagtctgggtaacacagtgagaccctatctc

SEQ ID NO: 465849 - DNA, 557 bp, Homo sapiens
cacgaggctgaccatcatgaccttatggttttgggtgtgcacctggcttgcagcagaactggctgggatggcttcataacttcccttctaacaatataacaatatgcttctgtaaattttcacactgaattggacaagaatcagaatatcctgttttgaacatctgcacagattgacaaacaaaaatggaacatcaagactgactggaaatggtgatgtgaaattcattaaatgctcttgcaattgccagaggtgccaagactgaggctcagagaaatgaaataacatgccaaaggtcacagtgtctagtggagctggggccaaattcagattaacaacacacaggaaaaaccctcaacttctttcattcgcctgttgagataaagggaaagagagtccccatccaggcctgcaggagagggagaactggtggatgcaaatgaaaaagcagaggcattcctcagggtcttgctctgccacccaggggttggtggctgcagtgagctatgatgacatcactgtactgcagtctgggtaacacagtgagaccctatctc

SEQ ID NO: 465850 - DNA, 484 bp, Homo sapiens
cacgaggctgaccatcatgaccttatggttttgggtgtgcacctggcttgcagcagaactggctgggatggcttcataacttcccttctaacaatataacaatatgcttctgtaaattttcacactgaattggacaagaatcagaatatcctgttttgaacatctgcacagattgacaagtgccaagactgaggctcagagaaatgaaataacatgccaaaggtcacagtgtctagtggagctggggccaaattcagattaacaacacacaggaaaaaccctcaacttctttcattcgcctgttgagataaagggaaagagagtccccatccaggcctgcaggagagggagaactggtggatgcaaatgaaaaagcagaggcattcctcagggtcttgctctgccacccaggggttggtggctgcagtgagctatgatgacatcactgtactgcagtctgggtaacacagtgagaccctatctc

SEQ ID NO: 465851 - DNA, 4933 bp, Homo sapiens
gctgaccgtagcttggacgccgctgccgccggggtccaatgccggtcatgcccatcccgcgggggttgtgctccttccatggtccacacaccacctgcctgcatgcggtctgtgggcccgtgggcgcctcccacctggcccgcaccaagtacaacagcttcgagtacttgggcgttagcgtcctcctgtgcttccagcacaagctgtgggtgctgctgctgctgctgggccgctggcgcgtggaattccgcctggtgaacgagctgctcatctacagcatccacgtcaccatgctgctggatgggggcctgggctggtgcctcatggtcttcgctggcttcctgcgcccaccctccccgtgtgcactctcaggggcggcgcccacctgctggtggctcctgctcccacgtcttcaggtcgtactgcggggtgggcctctctccaggaccacagctgccagggactttagacatcaccctgggaggccgctggacacagagggctgtgtgcccaggagcaaatccagacggggggggcccgcctggctgcacagccccttcctgcgtgccctggtcccagccgcagccaacgggacacggaagactcccctccctgacacaccacactgccacaaagctgcttactctgccctgggccgcctgaggcctggcactgcccgcggaccaccctctgtgtctcacctgaggggctgtgtgggttctgaagccccagccagccttcagggtcaccttggattgtgtagatgcagtctagcagggggccggagtggggctcaggtgggaggggtctcagcaggctcccagctcgggctggcctgggggaaccccgggagccaggggccaactccagcaacactggcctgtctgcctgttcctgtagggctgtatgtcctgcagatgctgtggatttctggggaggaacctccattcctttctggctttttttgcgggggaggactttgggcctctttctttgagggaacaccctcaaagaaagcctgggagattgaggctgcagtgagccaggatggggacttgcgcgtccgagtgtccggagcaggcggcagaggcttcagtgtggcaaccacagccccggagcttgtgtggcaccagcagcgtcttaaagcctcggatcttgtccaggaggccagagacgaaggcctctgtgggtgtgtaacagtcaaccagcagctccttgaccctggcagcccaggcatcgtcagtctccatgtccaggagctcatccacatcaatctccagttctgggatctactcttcctggcaaggggctctgaaagtagacgcgtggtcctgggccgccactgcccggcccgggggccagggccgccaacgcagcgcccccgcgcggtgccgctgtccgccttggcggccgccgggaccacgagcacgcgtcgggccgttccctgcgccgccgccttcgggaggccggccggctggctctggttaggtccccggctcctctccatgctgctcggcggcgagggcagcggcgggggcacccgggggcagctgcagcatgcggagcccccgggcagggcctggccgcgccccgctccctccccgccgatccgcctgccctttgtccccgtgaccgccaccccttaacacccagatattctaattcagtacatctgagtgaggtccaggattctatatgtttaacaaacatcccaggtgatttgaatgaagaccagtgtctgagaaccactgcttacaggaatcggagtacttcactggcatctttgagctcttagggtcctaaactacctgctttcttttcacttgtcttagctttctacacttggaattgggtggcttgttcaagtcctggttcttccactttctggctagcagtcttgggcaagtcacttaaattctgcaactatttcctcatctgtacaatgagaacagtgatcactgcccagcctccaacatatttgtgattaaagaaaaaggagataagatagtaattttccattataaagtaccacacattgttaagtttattgcttctttttttccccctgtttcccaagattattgtcttgggtcactggccttttccgtggcaggtcctaaaataggaggagtccttgaccgtgctttccaggtagtactctgaatttacaacagggctattcaaatagtgctcatactccttatcattagggtgtctggatgaaacatacctctgcttctggtttcttaaatagttttgttttatatattgtgctatgatttagctccagcggcgccatgagcaaatgaaaaagaatttggaagcacagcacaaagaattggaggaaaaacgtcgtcagtttgaggatgagaaagcaaactgggaagctcaacaacgtattttagaacaacagaactcttcaagaaccttggaaaagaacaagaagaaagggcagatcttttaaaccctctattgaccaccagttacgtattagttgccaatatgccagcttggacatcagcgttggatccgtttgaccagtttgcactagttttatccataatgatggatttaacagcatgacaaaaattatttttgttgttgttgttcttgatggagattaagatgcctcgaattgtctagggtgttctgtacttagaaagtaacagctctaagtagctttcctacattttcttttttttttttattaaacagatatctttggtttaatgcaaaagaacattttacagttgtacaatcatgttctggtggtttgattttttacaagatattccaaaaaaaaggactctggaaggttttcattgaggataaattgccataatatgatgcaaactgtgcttctctatgataactataatacaaaggttccattcaatgcagcatatacaataatataatttagtctaacacagttgaccctattttttgacatttccattgtttataaatacacatggggaaaaaaaaaccctatatgcttacagtgcacctagaggtttttttttttataacagtctctttttgtttgtttgttttggattctttaaatatatattattctcatttagtgccctccttagccagagtctcattactgcttcatttttgtaataacatttaatttagatattttccatatattggccctgctaaaatagaatacagcatctttcatatggtaggaaccaacaagaaaactttgcattaactccctttttacactttatggtaagtagcagggggaaaatgcatttatagatcatttctaggcaaaatcatttctaggcaaagctaatgaccaacctgtttctacctatatgcagtctctttattttactagaaatgggaatcatggcctcttgaagagaaaaaaagtcaccattctgcgtttagctgtattcatatattgcatttctgtatgttttgtttgtattgtaaaaaattcacataataagccatgtagtgatgtaatagagtgtgggggcttcaatattccacagtcgatgtacaagagtagaattaggtatactctcaagtccctggaaactgaattttttaactggaaagagagtggtgtaatttctcaagatcaaatgatgtagattttaacataatacataatttaagtgtaattaatgtagcccagtttattatcttgaaatgttttaccctatttactttttaaattaatgacctaagcagagggaataattataagtcaatatcagagattgttgtttgggtgttttttatttatttttttcagtgtttgtgttgagagattgggttaacacctctagccaaaaatgtttggttttagggaggctaagaacaacctactgaatttggagaatgcaaaggtaaaaaatttatacagactgcctgcctaactgattaagtactactgcttctgggaaatattatttcaaaattgtatatattataataacagatttctaagacgcattcattattctaccatcctaatgaaaacttcagaagtttttatccatggcatgcccagggtgtcacctgaatctgatgtaggatctatataactttactaggtctttttattgttgactccagtcttaagtatattagaaggctcgttttgctatttggtctgtggatttctgaaaggatcattcacaatacatgtaaaattcaggtaggcctaaggaaaggccagcctgtagaaagcaaaacggcagtgtctgttctccactgtcagaggcattatgtaattgaagtatcctgttagccactgtctttctgctaataaagtggggctgaacaagttagcactaataataccagtgaaccacttgggcaccttgtgggtaaagttttgctgccacctagtggaatgggatatcattgcttccttatcaggttcagaagcaagttgtgaagttgctaataaaatggacacagagcttctttctgtgtagctcaggctgtaatcttgaaagctgaggagatacagacccatgcctctcacactcattagctgggtgtcaccactaccacctgcacattctgacccaccacatcttaatatgttctgtcctcttggagaaattaatctaggagtagaagtcagaatatggtaggtgaggggaagaaaggaaagatggcttgatagccatgaatgcatcaggagcaaaatgttgactcagaaagttatctagatcacagcctccaaacctgatgttgtttccttatgaaaatatttttgagtgtccatagttatatgtattgatatcggggaaactgccccaatattcatgtaggttcttttctattttccctaagcattggccagcttcagaaataaagggacagagtacaaaagagagaaattttcaagccgggcgtcagggggagacatcgcatgtcagtaggttcc

SEQ ID NO: 465852 - DNA, 2713 bp, Homo sapiens
aaaaatgatagtagagtatagtacgtgaatgttattatcaaatcttgggtgaatgtgagctagcttccgacggcgccatgagcaaatgaaaaagaatttggaagcacagcacaaagaattggaggaaaaacgtcgtcagtttgaggatgagaaagcaaactgggaagctcaacaacgtattttagaacaacagaactcttcaagaaccttggaaaagaacaagaagaaagggcagatcttttaaaccctctattgaccaccagttacgtattagttgccaatatgccagcttggacatcagcgttggatccgtttgaccagtttgcactagttttatccataatgatggatttaacagcatgacaaaaattatttttgttgttgttgttcttgatggagattaagatgcctcgaattgtctagggtgttctgtacttagaaagtaacagctctaagtagctttcctacattttcttttttttttttattaaacagatatctttggtttaatgcaaaagaacattttacagttgtacaatcatgttctggtggtttgattttttacaagatattccaaaaaaaaggactctggaaggttttcattgaggataaattgccataatatgatgcaaactgtgcttctctatgataactataatacaaaggttccattcaatgcagcatatacaataatataatttagtctaacacagttgaccctattttttgacatttccattgtttataaatacacatggggaaaaaaaaaccctatatgcttacagtgcacctagaggtttttttttttataacagtctctttttgtttgtttgttttggattctttaaatatatattattctcatttagtgccctccttagccagagtctcattactgcttcatttttgtaataacatttaatttagatattttccatatattggccctgctaaaatagaatacagcatctttcatatggtaggaaccaacaagaaaactttgcattaactccctttttacactttatggtaagtagcagggggaaaatgcatttatagatcatttctaggcaaaatcatttctaggcaaagctaatgaccaacctgtttctacctatatgcagtctctttattttactagaaatgggaatcatggcctcttgaagagaaaaaaagtcaccattctgcgtttagctgtattcatatattgcatttctgtatgttttgtttgtattgtaaaaaattcacataataagccatgtagtgatgtaatagagtgtgggggcttcaatattccacagtcgatgtacaagagtagaattaggtatactctcaagtccctggaaactgaattttttaactggaaagagagtggtgtaatttctcaagatcaaatgatgtagattttaacataatacataatttaagtgtaattaatgtagcccagtttattatcttgaaatgttttaccctatttactttttaaattaatgacctaagcagagggaataattataagtcaatatcagagattgttgtttgggtgttttttatttatttttttcagtgtttgtgttgagagattgggttaacacctctagccaaaaatgtttggttttagggaggctaagaacaacctactgaatttggagaatgcaaaggtaaaaaatttatacagactgcctgcctaactgattaagtactactgcttctgggaaatattatttcaaaattgtatatattataataacagatttctaagacgcattcattattctaccatcctaatgaaaacttcagaagtttttatccatggcatgcccagggtgtcacctgaatctgatgtaggatctatataactttactaggtctttttattgttgactccagtcttaagtatattagaaggctcgttttgctatttggtctgtggatttctgaaaggatcattcacaatacatgtaaaattcaggtaggcctaaggaaaggccagcctgtagaaagcaaaacggcagtgtctgttctccactgtcagaggcattatgtaattgaagtatcctgttagccactgtctttctgctaataaagtggggctgaacaagttagcactaataataccagtgaaccacttgggcaccttgtgggtaaagttttgctgccacctagtggaatgggatatcattgcttccttatcaggttcagaagcaagttgtgaagttgctaataaaatggacacagagcttctttctgtgtagctcaggctgtaatcttgaaagctgaggagatacagacccatgcctctcacactcattagctgggtgtcaccactaccacctgcacattctgacccaccacatcttaatatgttctgtcctcttggagaaattaatctaggagtagaagtcagaatatggtaggtgaggggaagaaaggaaagatggcttgatagccatgaatgcatcaggagcaaaatgttgactcagaaagttatctagatcacagcctccaaacctgatgttgtttccttatgaaaatatttttgagtgtccatagttatatgtattgatatcggggaaactgccccaatattcatgtaggttcttttctattttccctaagcattggccagcttcagaaataaagggacagagtacaaaagagagaaattttcaagccgggcgtcagggggagacatcgcatgtcagtaggttcc

SEQ ID NO: 465853 - DNA, 1466 bp, Homo sapiens
cgccgcgggggtgctgggactccggccgcagtgccgccgccatcatggacttcctgtgggacaagcgcacgggcctggccgccagaaagatgcctcatcctcgaagtagtagtgaccggacacgacggcgccggcgagaggacagctaccatgtccggaggaggtgcagccggacatttagccgctcgtcttcgcagcacagcagccggaaagccaagagtgtagaggacgacactgagggccacctcatctaccatgtcggggactggctacaagagcgatatgaaatcgtcagcaccttaggaaaggggaccttcggccgagttgtacaatgtgttgaccatcgcaggcgtggggctcgagttgccctgaagatcattaagaatgtggagaagtataaggaagcagctcgacttgagatcaaagtgctggagaaaatcaacgagaaagaccctggcaagaacctctgtgtccagatgtttgactggttcgactaccatggccacatgtgtatctccttggagcttctgggccttagcaccttcgatttcctcaaagacaacaaccacctgccctaccccatccaccaagtgcaccacatggcctcccagctgtgccaggctgtcaagttcctccatgataacaagctgacacatacagacctcaagcctgaaaatattctgtttgtgaattcagactatgagctcacctacaacctagagaagaagcgacatgagcgcagtgtgaagagcacagctgtgcgggtgggagactttggcagtgccacctttgaccatgagcaccatagcaccattgtctccactcgccattaccgagcaccagaagtcatccttgagttgggttggtcacagccttgtgatgtgtggagtataggctgcatcatctttgagtactatgtgggcttcaccctcttccagacccatgacaacagacagcatctagccacgatggaaaggatcttgggtcctatcccttcccggatgatccgaaagacaagaaaacagaaatatttttaccggggtcgcctggattgggatgagaacacatcagctggacgctatgttcgtgagaactgcaaaccgctgcggcagtatctgacctcagaggcagaggaagaccaccagctcttcgatctgattgaaagcatgctagagtatgaaccagctcagcggctgaccttgggtgaagcccttcagcatcctttcttctcccgcctttgggctgagccacccaacaagttgtgggactccagtcaggatatcagtccgtgaccaccaggccctgggcctccctgcatcttttatagcagtgagtgtccagtccaggacattggtgcttttttataaaagagaacagagccagagttcactccttcctgctgcttctctatatacctgtgaatatgtgaaacagtaaatatgaaagaacttgtacctatcacttca

SEQ ID NO: 465854 - DNA, 2558 bp, Homo sapiens
ccggccggcgggcgggcgacgatgccgaacttctgcgctgccgccaactgcacgcggaagagcacgcacttcccgcgggaccctgccagatgccagaagtgggtggagaactgtaggagagcagacttagaagataaaacacctgatcagctaaataaacattatcgattatgtgccaaacattttgagacctctatgatctgtagaactggtccttataggacagttcttcgagataatgcaataccaacaatatttgatcttaacagtcatttgaacaacccacatagtagacacagaaaacgaataaaagaactgagtgaagatgaaatcaggacactgaaacagaaaaaaattgatgaaacttctgagcaggaacaaaaacataaagaaaccaacaatagcaatgctcagaaccccagcgaagaagagggtgaagggcaagatgaggacattttacctctaacccttgaagagaaggaaaacaaagaatacctcaaatatctacttgaaatcttgattctgatgggaaggcaaaacatacctctggacggacatgaggctgatgaaatcccagaaggtctctttactccagataactttcaggcactactggagtgtcggataaattctggtgaagaggttctgagaaagcggtttgagacaacagcagttaacacgttgttttgttcaaaaacacagcagaggcagatgctagagatctgtgagagctgtattcgagaagaaactctcagggaagtgagagactcacacgtcttttccattatcactgacgatgtagtggacatagcaggggaagagcacctacctgtgttggtgaggtttgttgatgaatctcataacctaagagaggaatttataggcttcctgccttatgaagctgatgcagaaattttggctgtgaaatttcacactatgataactgagaagtggggattaaatatggagtattgtcgtggccaggcttacattgtctctagtggattttcttccaaaatgaaagttgttgcttctagacttttagagaaatatccccaagctatctacacactctgctctttctgtgccttaaatatgtggttggcaaaatcagtacctgttatgggagtatctgttgcattaggaacaatcgaggaagtttgttcttttttccatcgatcaccacaactgcttttagaacttgacaacgtaatttctgttctttttcagaacagtaaagaaaggggtaaagaactgaaggaaatctgccattctcagtggacagggaggcatgatgcttttgaaattttagtggaactcctgcaagcacttgttttatgtttagatggtataaatagtgacacaaatattagatggaataactgtatagctggccgagcatttgtactctgcagtgcagtaacagattttgatttcattgttactattgttgttcttaaaaatgtcctatcttttacaagagcctttgggaaaaacctccaggggcaaacctctgatgtcttctttgcagccggtagcttgactgcagtactgcattcactcaacgaagtgatggaaaatattgaagtttataatgaattttggtttgaggaagccacaaatttggcaaccaaacttgatattcaaatgaaactccctgggaaattccgcagagctcaccagggtaacttggaatctcagctaacctttgagagttactataaagaaaccctaagtgtcccaacagtggagcacattattcaggaacttaaagatatattctcagaacagcacctcaaagctcttaaatgcttatctctggtaccctcagtcatgggacaactcaaattcaatactttggaggaacaccatgctgacatgtatagaagtgacttacccaatcctgacacgctgtcagctgagcttcattgttggggaatcaaatggaaacacagggggaaagatatagagcttccgtccaccatctatgaagccctccaactgcctgacatcaagttttttcctaatgtgtatgcattgctgaaggtcctgtgtattcttctgtgatgaaggttgagaatgagcggtatgaaaatggatgaaagcgtcttaaagcatatttgaggaacactttgacagaccaaaggtcaagtaacttggctttgcttaacataaattttgatataaaacacgacctggatttaatggtggacacatatattaaactctatacaagtaagtcagagcttcctacagataattccgaaactgtggaaaatacctaagagacttttaaaaacaggctttcttatatttgatatttggaagtaaaagccgtaaggtgtatgtaggccacttaatcactaaatatctttgcctataggactccattgaatacattagccattgataatctacctgtttaaatggcccctgtttgaactctcaagctttgaagacctacctgttcttccagaagagaacgttgaaagttccatgtttccttttgcgtgatctctgttgacggcactctggaattgtttcagttaagtcatttt

SEQ ID NO: 465855 - DNA, 2428 bp, Homo sapiens
aggagtggggtcaggaagagtcagctgaaagcgcctgcaacggcgcctggctggcaaacagcggacttgttaattacagcctttcaactaagggcgcctgaaactcgcaaacattttgctcgggtgtggattcgctcccgttagttacaaacttgggatcccgggacccggaaagcaagggggaaaaataaatcgcgatggggccaagggacagctgctgcggcaacttttacccagcggagcccacctacagcctcagcctccgggtctcaggtctccgccgtttcttctcaaggagtcggtcgggggagcggcactgcacagcttttctccaatcagacacctcaaggctggcgcctgatccaatctcctcccctggagggtgggaacgcgaagttcctacctgcacctgtggcagcggtgaccgcctcctgggttattttcttttctcccccagctgccccagggttctggtttcccgaatcacttggcaaataaccagcaggtgggcagatgtcttttttgcgttcctacggacgcgtaggcaagttcgatgcgccggagtgaacagccagggtcccatctctcagccggctcccgggcggtgctagcagggaagagggacgcgccggcgaatgaaacactactagcccggaaagccgccctggaccttccacccgggcagcgagtctggcggcccctcgccgccgccccctccgaccagaacagactgcgctgcgagccccgggcttccgccgcagcgcgcagcaattggaggtgccagaggagaccagcagcagcacttgatttagctgggctgcgggaattccgacctgtacactttccagaagcctgatctctccaagtccgcgcccagggactcgagccccggcttccaggttgacccgagcgcgcccccttcgtgctctcggccgcgttcaccgcgcgaggcctccgggtcctgttaagcccgagcagcacaggccgctgcctcagcatccaccccgcagcccacgtgtggcaagccggggaaggggtggagtgaacggccggagaccacgtggagaaaggggccgctttggcccttccatctgggtgccgggagcccctaggccctccggccatggccgacagcggcgatgctggcagctcgggcccctggtggaaatcgctcaccaacagcagaaagaaaagcaaggaagccgcagtgggggtgccgcctcccgcccagcccgctcccggggagcccacgccacctgcgccgcccagcccggactggaccagcagctcccgggagaaccagcaccccaatctcctcgggggcgccggcgagccccccaaaccagacaagttatacggggacaaatccggcagcagccgccgcaatttgaagatctcgcgctccggccgctttaaggagaagaggaaagtgcgcgccacgctgctcccggaggcgggcaggtccccggaggaggcaggctttcctggtgacccccacgaggacaagcagtagccccaatagcctgcgcgctccaggactgcctacccagcactaccccaaacccccagttccaaacccgagacttcaggcccgcccccttacgcgttgtctcattccaccaaattcagaatatttacacaatgccttcatgattttatttttctggaaattgaagtgtcaattgggttctcaatatttcatgactccaaggatgcattaaatatttatttgtggtaagagaagatacctgccgcggaggagggtggcataattattttttttcaaaaagctattctggggccctggccccctggctcctgtcacagctcagcttgaactctgtagcctctcaaatgaagaaggtggctgttatttaggactctgtggaaagcaaatcacagtgctgtttttaatgcctgagaaatgcactttaggggtagacttataccttaagtgaaggagtgggggaggaagaagcattcttaagtagaagcattttaaaataaggcaggattgcttttaatgttaaactacaaaactgtacagcctattttagtgtggactattaaaacccttgcactgtaaggcttaaggtgacttttgtattttttccattccaagactgaatcccatcatacttaaaagcaggcaggcaaagtccgaggtgagagttaatcatttgccacacaacataacagtgactagtggaaagctgcagggaagagaatatttctggaaaccagcaacacctggactggaacttgttagccagatatccctatttatcagccaaattcgaggaagggagagaggtaccaattcattattcctaaattcaccttttacttcagtgcattttcatagactatagtaagttacaatgctagtaatacatccttttcagtatccattgttaaacttactaac

SEQ ID NO: 465856 - DNA, 1413 bp, Homo sapiens
agtaaaaggaagaattaggatggcggttttcaagggaagttaagtctagacatgcttctttgaaagtcacaaggcagaagtggtcaaaagctagaatttaaaagaaccaaaacaaatatcataagcttgtccttctctcctactgggatataaattctcctaagtatctcatcgaaaaggctcctgggacgaaagtcgatgggggcaaatcttggagggaaatttcgtgacttgtttgaccatggactaattaataccgttcacctgtagagaggatgcacttggttcccagcgccctcctcccagcacaggccgctgcctcagcatccaccccgcagcccacgtgtggcaagccggggaaggggtggagtgaacggccggagaccacgtggagaaaggggccgctttggcccttccatctgggtgccgggagcccctaggccctccggccatggccgacagcggcgatgctggcagctcgggcccctggtggaaatcgctcaccaacagcagaaagaaaagcaaggaagccgcagtgggggtgccgcctcccgcccagcccgctcccggggagcccacgccacctgcgccgcccagcccggactggaccagcagctcccgggagaaccagcaccccaatctcctcgggggcgccggcgagccccccaaaccagacaagttatacggggacaaatccggcagcagccgccgcaatttgaagatctcgcgctccggccgctttaaggagaagaggaaagtgcgcgccacgctgctcccggaggcgggcaggtccccggaggaggcaggctttcctggtgacccccacgaggacaagcagtagccccaatagcctgcgcgctccaggactgcctacccagcactaccccaaacccccagttccaaacccgagacttcaggcccgcccccttacgcgttgtctcattccaccaaattcagaatatttacacaatgccttcatgattttatttttctggaaattgaagtgtcaattgggttctcaatatttcatgactccaaggatgcattaaatatttatttgtggtaagagaagatacctgccgcggaggagggtggcataattattttttttcaaaaagctattctggggccctggccccctggctcctgtcacagctcagcttgaactctgtagcctctcaaatgaagaaggtggctgttatttaggactctgtggaaagcaaatcacagtgctgtttttaatgcctgagaaatgcactttaggggtagacttataccttaagtgaaggagtgggggaggaagaagcattcttaagtagaagcattttaaaataaggcaggattgcttttaatgttaaactacaaaactgtacagcctattttagtgtggactattaaaacccttgcactgta

SEQ ID NO: 465857 - DNA, 2085 bp, Homo sapiens
aggagtggggtcaggaagagtcagctgaaagcgcctgcaacggcgcctggctggcaaacagcggacttgttaattacagcctttcaactaagggcgcctgaaactcgcaaacattttgctcgggtgtggattcgctcccgttagttacaaacttgggatcccgggacccggaaagcaagggggaaaaataaatcgcgatggggccaagggacagctgctgcggcaacttttacccagcggagcccacctacagcctcagcctccgggtctcaggtctccgccgtttcttctcaaggagtcggtcgggggagcggcactgcacagcttttctccaatcagacacctcaaggctggcgcctgatccaatctcctcccctggagggtgggaacgcgaagttcctacctgcacctgtggcagcggtgaccgcctcctgggttattttcttttctcccccagctgccccagggttctggtttcccgaatcacttggcaaataaccagcaggtgggcagatgtcttttttgcgttcctacggacgcgtaggcaagttcgatgcgccggagtgaacagccagggtcccatctctcagccggctcccgggcggtgctagcagggaagagggacgcgccggcgaatgaaacactactagcccggaaagccgccctggaccttccacccgggcagcgagtctggcggcccctcgccgccgccccctccgaccagaacagactgcgctgcgagccccgggcttccgccgcagcgcgcagcaattggaggtgccagaggagaccagcagcagcacttgatttagctgggctgcgggaattccgacctgtacactttccagaagcctgatctctccaagtccgcgcccagggactcgagccccggcttccaggttgacccgagcgcgcccccttcgtgctctcggccgcgttcaccgcgcgaggcctccgggtcctgttaagcccgagcagcacaggccgctgcctcagcatccaccccgcagcccacgtgtggcaagccggggaaggggtggagtgaacggccggagaccacgtggagaaaggggccgctttggcccttccatctgggtgccgggagcccctaggccctccggccatggccgacagcggcgatgctggcagctcgggcccctggtggaaatcgctcaccaacagcagaaagaaaagcaaggaagccgcagtgggggtgccgcctcccgcccagcccgctcccggggagcccacgccacctgcgccgcccagcccggactggaccagcagctcccgggagaaccagcaccccaatctcctcgggggcgccggcgagccccccaaaccagacaagttatacggggacaaatccggcagcagccgccgcaatttgaagatctcgcgctccggccgctttaaggagaagaggaaagtgcgcgccacgctgctcccggaggcgggcaggtccccggaggaggcaggctttcctggtgacccccacgaggacaagcagtagccccaatagcctgcgcgctccaggactgcctacccagcactaccccaaacccccagttccaaacccgagacttcaggcccgcccccttacgcgttgtctcattccaccaaattcagaatatttacacaatgccttcatgattttatttttctggaaattgaagtgtcaattgggttctcaatatttcatgactccaaggatgcattaaatatttatttgtggtaagagaagatacctgccgcggaggagggtggcataattattttttttcaaaaagctattctggggccctggccccctggctcctgtcacagctcagcttgaactctgtagcctctcaaatgaagaaggtggctgttatttaggactctgtggaaagcaaatcacagtgctgtttttaatgcctgagaaatgcactttaggggtagacttataccttaagtgaaggagtgggggaggaagaagcattcttaagtagaagcattttaaaataaggcaggattgcttttaatgttaaactacaaaactgtacagcctattttagtgtggactattaaaacccttgcactgta

SEQ ID NO: 465858 - DNA, 2088 bp, Homo sapiens
aggagtggggtcaggaagagtcagctgaaagcgcctgcaacggcgcctggctggcaaacagcggacttgttaattacagcctttcaactaagggcgcctgaaactcgcaaacattttgctcgggtgtggattcgctcccgttagttacaaacttgggatcccgggacccggaaagcaagggggaaaaataaatcgcgatggggccaagggacagctgctgcggcaacttttacccagcggagcccacctacagcctcagcctccgggtctcaggtctccgccgtttcttctcaaggagtcggtcgggggagcggcactgcacagcttttctccaatcagacacctcaaggctggcgcctgatccaatctcctcccctggagggtgggaacgcgaagttcctacctgcacctgtggcagcggtgaccgcctcctgggttattttcttttctcccccagctgccccagggttctggtttcccgaatcacttggcaaataaccagcaggtgggcagatgtcttttttgcgttcctacggacgcgtaggcaagttcgatgcgccggagtgaacagccagggtcccatctctcagccggctcccgggcggtgctagcagggaagagggacgcgccggcgaatgaaacactactagcccggaaagccgccctggaccttccacccgggcagcgagtctggcggcccctcgccgccgccccctccgaccagaacagactgcgctgcgagccccgggcttccgccgcagcgcgcagcaattggaggtgccagaggagaccagcagcagcacttgatttagctgggctgcgggaattccgacctgtacactttccagaagcctgatctctccaagtccgcgcccagggactcgagccccggcttccaggttgacccgagcgcgcccccttcgtgctctcggccgcgttcaccgcgcgaggcctccgggtcctgttaagcccgagcagcacaggccgctgcctcagcatccaccccgcagcccacgtgtggcaagccggggaaggggtggagtgaacggccggagaccacgtggagaaaggggccgctttggcccttccatctgggtgccgggagcccctaggccctccggccatggccgacagcggcgatgctggcagctcgggcccctggtggaaatcgctcaccaacagcagaaagaaaagcaaggaagccgcagtgggggtgccgcctcccgcccagcccgctcccggggagcccacgccacctgcgccgcccagcccggactggaccagcagctcccgggagaaccagcaccccaatctcctcgggggcgccggcgagccccccaaaccagacaagttatacggggacaaatccggcagcagccgccgcaatttgaagatctcgcgctccggccgctttaaggagaagaggaaagtgcgcgccacgctgctcccggaggcgggcaggtccccggaggaggcaggctttcctggtgacccccacgaggacaagcagtagccccaatagcctgcgcgctccaggactgcctacccagcactaccccaaacccccagttccaaacccgagacttcaggcccgcccccttacgcgttgtctcattccaccaaattcagaatatttacacaatgccttcatgattttatttttctggaaattgaagtgtcaattgggttctcaatatttcatgactccaaggatgcattaaatatttatttgtggtaagagaagatacctgccgcggaggagggtggcataattattttttttcaaaaagctattctggggccctggccccctggctcctgtcacagctcagcttgaactctgtagcctctcaaatgaagaaggtggctgttatttaggactctgtggaaagcaaatcacagtgctgtttttaatgcctgagaaatgcactttaggggtagacttataccttaagtgaaggagtgggggaggaagaagcattcttaagtagaagcattttaaaataaggcaggattgctttgatgtaacttaccaaggagcgtgaaataacccgcctttatatgtgctgggatctattaaacacctgc

SEQ ID NO: 465859 - DNA, 1427 bp, Homo sapiens
gaaagcatctgtttggaaccctggaatggatactctgaggccagacaccatgtctttttcaccctttaaggtgcctggcatccgatacaatgcctggaatatagtagacacgggaaagtctgatgatgatgatggtaatgatgacagtgacgataaaaatgatgttgttggtgatattgatgatagtggtaatggtgatgatggctgtggtagtattgatgatgatggtgttaatcatgtttctgctggctatgaattggatgcccttagagtttcaggctcagacccaacctctgcaccctggcctagtttccatagatgtcccccagtgcaagggcccccagtgatccccaacacttcagagcccaagccctgttcagtctccaaaaaaggaaaaagagcctgctcttcctgctccaaaacccctggaccaactcctctcttccttggattaattgatcattgttccttctcttttgatgcccttctcccaaccaggagcaaaagagcagtaggagaaaaacaattctaaccttacataaatgcagttctacaaatagattattttcgcagattctggaaccactgagggaggcatagtcacagatctaaggaattctagaattctggagatgtggccataaatataacaatctagtttccttatttggtgctttttaaactgtcatacccgtgccctgattatgcaaagaggtaccggggacaagaaactataagataagatcccccagagtgacactggtacagaacctaacacaagctaagaaggactagaagaaacaattatcacacatacctagcaagtggatattggtttctaatgccattcaccagtaaaaaaacacacaggactacttggagaaattgactgattctaggactgaggctagaaatactcaagatcagcctggagtttcttatagtgccagaaagtaagaaagtgcttgaaaaaaaagaaccacagagtcccacaataataggagtatgtcaaagacatgaaggagccaactgaaggagctcttaatggccaaaactcgaaaaattggagcaatgaaataaagtaaagcagaattggattataacctaaagtataaaataagtattcataagtctatgccaatagaaatgattgaataaataaatgaggaaaaggggcaaatttcctgtgcagagaaattccagctgatttatgtactcctctctcaagttggagtataacacctaacttcttaagtgtccgttggacttagtgacttccttcaaaactatacagtatgaaaggggaaggaaaaggtaactttacctggaaaaagctgacacatgctacctcagccaggagatcaagttcaacatcaacagtgataagtcatattgatggtatgtacatttatttatgtatttatttg

SEQ ID NO: 465860 - DNA, 743 bp, Homo sapiens
ggaaaaggccaggcgattcaagatggcggaggacctggacgagctcttggatgaagtcgagtccaagttttgcacacctgaccttctaagacggggtatggtcgagcagcccaaaggctgcggcggcggcacccacagtagcgaccggaaccaagccaaggcgaaagagacgctcagatcaacagaaacatttaaaaaagaagatgatcttgacagtcttattaatgaaatacttgaagagcccaacttggacaaaaaaccctctaaattaaaatctaaatcttcaggtaacacatctgtcagagcttccattgaaggccttggtaaaagttgcagtccggtgtaccttggtggaagctctattccatgtgggattggaacaaatatttcatggagagcatgtgaccatcttgcgttgtatagcctgtgatttcttggtagtcagctatgatgactatatgtgggacaaatcgtgtgattatctgtttttcagccaccctactgaagggaggaagatctgatcattagaatccttttcctagccatgacacatttacatacttgtaaaatttattgtacatgattcttacaacaagtaatttgtaaagatgtttgttttatttattccctatgaggaaagcagcaatgcgatcatttatttataactagtgactgtacacatggcgacctttattttatataagttgaagccacaacttttctattaaaaaaaaaaaaaaaga

SEQ ID NO: 465861 - DNA, 2662 bp, Homo sapiens
tgttagccagggccactgggagggggctcacagcgaggcgcccgccgcggctgattgacagcgctgggtgaatgagcgcgcgtggaggcgcccggcaccgaggtggccgcggctccgcgctgctgtgagcgcctgcctgcccgcccgggtgtggggggaccgcgggtggcgggctgggtgggaggaggaggaggaggaggaggagagagggcgcgggagcgagggcgggcggacgggagggccgtcagagccggctgccgcggagccccggcgcgggcggcttcgccggggagcgaggctcggagccaggaggcggcgccgctgggagggagcgcggagtgcggagtgcggagcgcggggcctggccgcccgcctggtgagagcgctgcgggccggggccgggccgggggcggctcaggggcagcggggcggcgaggctgcggtctctggactaggcgaggggccgccgggggctggaggtccggatcttcagtcggggcgctgggcacaacagagagaagcggtgagataccacgaagcgttgcccagctgggcgccagggccgccacgaccgccccttttcggagactcggcgaggagacctgcctgcgggagagaccccggggagcaggaccttcctcctcaaaagctgctgaataactgagtccctgcccaccaaggccacccgaagccaggtggggccatggccaggcatggctgtctagggctgggactgttctgctgcgtcctgtttgctgctactgtgggcccccagcccaccccctccatcccaggtgcccctgccaccactttgacccccgtacctcaaagtgaggcctctatgctgtctctcaacctgggacttaacttcaaattccatcttcggggacctgctgctgtctgggggagcccagtcacagagacccagccactctctcttgggccaggccaggagccaggggaagaggtggccagtgggctgaggactgaccccctttgggaattgctggtgggctcctcagggaactctctcactgagtggggctccaccgaaggtggctcaaagccccgggcctcctccctgcttccggagtccacatcccggcgctctgggcccagcgatgggcccactgccccctatcagcccaggaggagcactgtgacctgggacactgctctgatggtgacagcacttccatccagtgctcccaggccccaccagagcgagctggagctgaagtttgacatggcactgagagcaggtgcagcccccacgcttgggcatcgaacgctgcccctgctgcccagcctgcgggccagcctggcagagattgctgggcgcctgggaccctttggattctttggcactactctgtccccactccggaacttctccggcctgagccccccaggtgaaactacatccacaagctctgcctctggagtttcgggttctctggggttccttggtaccactctgtccctgcccccatactccctggagaggaagctctccagcccaagtcctctggacccagctgcttccctaagttttgcctcgattgcaacaacatcattagaccccacagtccccatctctggcccagatgacctctctcctcccgccagcctcgggaacccttcggggcagccagagtgtgggccagggtcctgcagcgtgggagaattgcctgaacgcgaggggcagcctcccgaggcgccgaggcccctctttttcctgaccctggaggccgactgggcagaggccagggctcgctgggggctggcctgggaggcccacgtgtacgggcgattacaccgtggacttccgcccgccctccccaatcaacctgcgacgcagcatcgaggaggccctctgcagcgaggccctgcttgcgcctggcctcttccagggccctgccttcgaggacgctctgcctgggctcggactctaccgcaccgcctcgctggggaccgggggcagggccagtgagagatcaggggaggcctctggccccgctgcgcccccggagctcccctcccctggggcttggcccgcaggcagcagcgtctcatctggctcgttctgcggactctcgcgggacagctcgtccatgctgctgtgttccagccccgacaggcccccgcgctgccctctggtctgcgtcctcagtcccccgcggccctcgggaagcagccccagcctcccggcctcaggatcctaccaggccctgtccccaccctctcgcgactccccagagcctgcttctgagctgcaggccgaggaggccttgctgcaggagcagttcctggacgcctgccgacagatcgacgagctgagcgtgggcagcgacaccatagacctaccccagggaccttcatacaagaccaacgagtcttgtcctgtttctgggatgagtggggttactgggagcagccccttgaagactcttctgaatcgttgggaagtggcttttcacagagatgggacatcgccctgggagaaccaggagcacccagatttcctagccaattaagagctctcagctttgggtctgtctgatgagctgacttgagacaaagatcttctgtttctaggaggacatgggttctaggtctctgtgtataagttggatgttatgtttgctttgagtgtgtttga

SEQ ID NO: 465862 - DNA, 2139 bp, Homo sapiens
tgttagccagggccactgggagggggctcacagcgaggcgcccgccgcggctgattgacagcgctgggtgaatgagcgcgcgtggaggcgcccggcaccgaggtggccgcggctccgcgctgctgtgagcgcctgcctgcccgcccgggtgtggggggaccgcgggtggcgggctgggtgggaggaggaggaggaggaggaggagagagggcgcgggagcgagggcgggcggacgggagggccgtcagagccggctgccgcggagccccggcgcgggcggcttcgccggggagcgaggctcggagccaggaggcggcgccgctgggagggagcgcggagtgcggagtgcggagcgcggggcctggccgcccgcctggtgagagcgctgcgggccggggccgggccgggggcggctcaggggcagcggggcggcgaggctgcggtctctggactaggcgaggggccgccgggggctggaggtccggatcttcagtcggggcgctgggcacaacagagagaagcggtgagataccacgaagcgttgcccagctgggcgccagggccgccacgaccgccccttttcggagactcggcgaggagacctgcctgcgggagagaccccggggagcaggaccttcctcctcaaaagctgctgaataactgagtccctgcccaccaaggccacccgaagccaggtggggccatggccaggcatggctgtctagggctgggactgttctgctgcgtcctgtttgctgctactgtgggcccccagcccaccccctccatcccaggtgcccctgccaccactttgacccccgtacctcaaagtgaggcctctatgctgtctctcaacctgggacttaacttcaaattccatcttcggggacctgctgctgtctgggggagcccagtcacagagacccagccactctctcttgggccaggccaggagccaggggaagaggtggccagtgggctgaggactgaccccctttgggaattgctggtgggctcctcagggaactctctcactgagtggggctccaccgaaggtggctcaaagccccgggcctcctccctgcttccggagtccacatcccggcgctctgggcccagcgatgggcccactgccccctatcagcccaggaggagcactgtgacctgggacactgctctgatggtgacagcacttccatccagtgctcccaggccccaccagagcgagctggagctgaagtttgacatggcactgagagcaggtgcagcccccacgcttgggcatcgaacgctgcccctgctgcccagcctgcgggccagcctggcagagattgctgggcgcctgggaccctttggattctttggcactactctgtccccactccggaacttctccggcctgagccccccaggtgaaactacatccacaagctctgcctctggagtttcgggttctctggggttccttggtaccactctgtccctgcccccatactccctggagaggaagctctccagcccaagtcctctggacccagctgcttccctaagttttgcctcgattgcaacaacatcattagaccccacagtccccatctctggcccagatgacctctctcctcccgccagcctcgggaacccttcggggcagccagagtgtgggccagggtcctgcagcgtgggagaattgcctgaacgcgaggggcagcctcccgaggcgccgaggcccctctttttcctgaccctggaggccgactgggcagaggccagggctcgctgggggctggcctgggaggcccacgtgtacggggtaggcgcgctcttcggcctggttgccttgctggcgctgctggctctggccctcttgccctggcgctgcccgcccggcgccccctgcctggcgctgctggacctgctgctgctgtcggccgggaccacgcgggccttcccgctcttctacgacgcctatgggcacagggatcgactgcccgcgctcgcctggctgctgctgcaggaccttccgctgccctgcttggctgccggcctggggctggcctgcctgctgctggcccggccgcgcccgccgcggtgccccaccggcctggctgcgctgctgctcctggggctggggctggcggc

SEQ ID NO: 465863 - DNA, 3120 bp, Homo sapiens
tgttagccagggccactgggagggggctcacagcgaggcgcccgccgcggctgattgacagcgctgggtgaatgagcgcgcgtggaggcgcccggcaccgaggtggccgcggctccgcgctgctgtgagcgcctgcctgcccgcccgggtgtggggggaccgcgggtggcgggctgggtgggaggaggaggaggaggaggaggagagagggcgcgggagcgagggcgggcggacgggagggccgtcagagccggctgccgcggagccccggcgcgggcggcttcgccggggagcgaggctcggagccaggaggcggcgccgctgggagggagcgcggagtgcggagtgcggagcgcggggcctggccgcccgcctggtgagagcgctgcgggccggggccgggccgggggcggctcaggggcagcggggcggcgaggctgcggtctctggactaggcgaggggccgccgggggctggaggtccggatcttcagtcggggcgctgggcacaacagagagaagcggtgagataccacgaagcgttgcccagctgggcgccagggccgccacgaccgccccttttcggagactcggcgaggagacctgcctgcgggagagaccccggggagcaggaccttcctcctcaaaagctgctgaataactgagtccctgcccaccaaggccacccgaagccaggtggggccatggccaggcatggctgtctagggctgggactgttctgctgcgtcctgtttgctgctactgtgggcccccagcccaccccctccatcccaggtgcccctgccaccactttgacccccgtacctcaaagtgaggcctctatgctgtctctcaacctgggacttaacttcaaattccatcttcggggacctgctgctgtctgggggagcccagtcacagagacccagccactctctcttgggccaggccaggagccaggggaagaggtggccagtgggctgaggactgaccccctttgggaattgctggtgggctcctcagggaactctctcactgagtggggctccaccgaaggtggctcaaagccccgggcctcctccctgcttccggagtccacatcccggcgctctgggcccagcgatgggcccactgccccctatcagcccaggaggagcactgtgacctgggacactgctctgatggtgacagcacttccatccagtgctcccaggccccaccagagcgagctggagctgaagtttgacatggcactgagagcaggtgcagcccccacgcttgggcatcgaacgctgcccctgctgcccagcctgcgggccagcctggcagagattgctgggcgcctgggaccctttggattctttggcactactctgtccccactccggaacttctccggcctgagccccccaggtgaaactacatccacaagctctgcctctggagtttcgggttctctggggttccttggtaccactctgtccctgcccccatactccctggagaggaagctctccagcccaagtcctctggacccagctgcttccctaagttttgcctcgattgcaacaacatcattagaccccacagtccccatctctggcccagatgacctctctcctcccgccagcctcgggaacccttcggggcagccagagtgtgggccagggtcctgcagcgtgggagaattgcctgaacgcgaggggcagcctcccgaggcgccgaggcccctctttttcctgaccctggaggccgactgggcagaggccagggctcgctgggggctggcctgggaggcccacgtgtacggggtaggcgcgctcttcggcctggttgccttgctggcgctgctggctctggccctcttgccctggcgctgcccgcccggcgccccctgcctggaagggccctggccctggtgggccttccagctaggcctgcgcctgggcgaggtgggcgtcgcgctcccgttggcgctgctgggcctctacccggcgctctgcagtcctcgcgtgccgccgcgctgctgggccaagctcttccgcttgtccccgggccacgcggctccgctgctgccgggaggctgggtcactgggcccccagacaaggagcccctggggagcgccatcgctcgcggggacgcggagctgctgcagctgtgcgcgctggcagggccaggcccagacctcctactccagggcggaggttgccggggcttcgaaggcgcggcggccaacccggccccgtccccggcttcctctccctgcagcgattacaccgtggacttccgcccgccctccccaatcaacctgcgacgcagcatcgaggaggccctctgcagcgaggccctgcttgcgcctggcctcttccagggccctgccttcgaggacgctctgcctgggctcggactctaccgcaccgcctcgctggggaccgggggcagggccagtgagagatcaggggaggcctctggccccgctgcgcccccggagctcccctcccctggggcttggcccgcaggcagcagcgtctcatctggctcgttctgcggactctcgcgggacagctcgtccatgctgctgtgttccagccccgacaggcccccgcgctgccctctggtctgcgtcctcagtcccccgcggccctcgggaagcagccccagcctcccggcctcaggatcctaccaggccctgtccccaccctctcgcgactccccagagcctgcttctgagctgcaggccgaggaggccttgctgcaggagcagttcctggacgcctgccgacagatcgacgagctgagcgtgggcagcgacaccatagacctaccccagggaccttcatacaagaccaacgagtcttgtcctgtttctgggatgagtggggttactgggagcagccccttgaagactcttctgaatcgttgggaagtggcttttcacagagatgggacatcgccctgggagaaccaggagcacccagatttcctagccaattaagagctctcagctttgggtctgtctgatgagctgacttgagacaaagatcttctgtttctaggaggacatgggttctaggtctctgtgtataagttggatgttatgtttgctttgagtgtgtttga

SEQ ID NO: 465864 - DNA, 2426 bp, Homo sapiens
tgttagccagggccactgggagggggctcacagcgaggcgcccgccgcggctgattgacagcgctgggtgaatgagcgcgcgtggaggcgcccggcaccgaggtggccgcggctccgcgctgctgtgagcgcctgcctgcccgcccgggtgtggggggaccgcgggtggcgggctgggtgggaggaggaggaggaggaggaggagagagggcgcgggagcgagggcgggcggacgggagggccgtcagagccggctgccgcggagccccggcgcgggcggcttcgccggggagcgaggctcggagccaggaggcggcgccgctgggagggagcgcggagtgcggagtgcggagcgcggggcctggccgcccgcctggtgagagcgctgcgggccggggccgggccgggggcggctcaggggcagcggggcggcgaggctgcggtctctggactaggcgaggggccgccgggggctggaggtccggatcttcagtcggggcgctgggcacaacagagagaagcggtgagataccacgaagcgttgcccagctgggcgccagggccgccacgaccgccccttttcggagactcggcgaggagacctgcctgcgggagagaccccggggagcaggaccttcctcctcaaaagctgctgaataactgagtccctgcccaccaaggccacccgaagccaggtggggccatggccaggcatggctgtctagggctgggactgttctgctgcgtcctgtttgctgctactgtgggcccccagcccaccccctccatcccaggtgcccctgccaccactttgacccccgtacctcaaagtgaggcctctatgctgtctctcaacctgggacttaacttcaaattccatcttcggggacctgctgctgtctgggggagcccagtcacagagacccagccactctctcttgggccaggccaggagccaggggaagaggtggccagtgggctgaggactgaccccctttgggaattgctggtgggctcctcagggaactctctcactgagtggggctccaccgaaggtggctcaaagccccgggcctcctccctgcttccggagtccacatcccggcgctctgggcccagcgatgggcccactgccccctatcagcccaggaggagcactgtgacctgggacactgctctgatggtgacagcacttccatccagtgctcccaggccccaccagagcgagctggagctgaagtttgacatggcactgagagcaggtgcagcccccacgcttgggcatcgaacgctgcccctgctgcccagcctgcgggccagcctggcagagattgctgggcgcctgggaccctttggattctttggcactactctgtccccactccggaacttctccggcctgagccccccaggtgaaactacatccacaagctctgcctctggagtttcgggttctctggggttccttggtaccactctgtccctgcccccatactccctggagaggaagctctccagcccaagtcctctggacccagctgcttccctaagttttgcctcgattgcaacaacatcattagaccccacagtccccatctctggcccagatgacctctctcctcccgccagcctcgggaacccttcggggcagccagagtgtgggccagggtcctgcagcgtgggagaattgcctgaacgcgaggggcagcctcccgaggcgccgaggcccctctttttcctgaccctggaggccgactgggcagaggccagggctcgctgggggctggcctgggaggcccacgtgtacgggcgattacaccgtggacttccgcccgccctccccaatcaacctgcgacgcagcatcgaggaggccctctgcagcgaggccctgcttgcgcctggcctcttccagggccctgccttcgaggacgctctgcctgggctcggactctaccgcaccgcctcgctggggaccgggggcagggccagtgagagatcaggggaggcctctggccccgctgcgcccccggagctcccctcccctggggcttggcccgcaggcagcagcgtctcatctggctcgttctgcggactctcgcgggacagctcgtccatgctgctgtgttccagccccgacaggcccccgcgctgccctctggtctgcgtcctcagtcccccgcggctcagaagcagccagctccggctcaggactacagcctgtccaacctctgggatccagagctggtctgaatgaagcgagagctgcgagacagtcggaaccgccgaaaatgaagtgggggggggaccaacggaagggccctgccggaagcctggcgcgccacggaggacccccggagaccacccagccggggggggacaggacatccgcggcaagggcaagagcccggtacgggcaagcgcaggc

SEQ ID NO: 465865 - DNA, 2304 bp, Homo sapiens
caggtatggggtggttttagggcccgcacctcacagtcctgccgcctcaggtcccacaaccacagaaccagaggattcgatggccctgcttcaactcttccgagggtgctgggggctgcctggggtggaggaagcgaatcaacaggacgtcccctacgcaacttaatggaccctccctgagggctgggactatctgtcctgttcacagctgtgtagggaccagccccacagggtcggtggatctctccctgtttgcggcgatgagagagtgtagaaagaaagacacaagacaaagagacaagagaaaaggcagctgggcccgggggaccactaccaccaatgtgcggagaccggtagtggccccgaatgccctccacaagaagtggaggagcagagtcttctctaaactcccccggggaaagggagactccctttcccggtctgctaagcagccggtgtttttccttgacactgaggctactgctagaccaccgtccgctcggcaacaggcgtcttcccagacactggcgattctggaatacctgtcccaacgccctgagcctgctcccagctctgtgagaacctccttcctggctccatctgctccaaagaagactgtgcggcaagtcatgcaccctaggcctgagggtggacagcaaggtgctgtctgcaagctggtgtggagggattgggctgacctgtccatatacatgctcatggaccatttcatggcttcatgacactgtttaatattatgtagaataagacccttccattactctagtttttaaaaactttctagctattcagattatgattttactttctgatgaatttcagagttatttagacaagtttttaaaatctcacaggagtattaaatacagactcactgctttgtcctacgtgaggacaaacccagctgcttcatagcctctgggtttatgtatctgctcaagctaaccagcccaatctgagaccaatgcattagtcacaattccaagctccaaggagaatgaatctgattgccttcatcaggttacctactgtggggaggtcattgtcatgtaatagaaaggcagctcccaggagattattgagggctgaaaatatacccctaaaggtatctattatcagattgagcatgtccctccaaaattctgtgcctttgtacagtagctccctctgttgtgacagcagtgtggctgtgatgatgggagtggctcagacaacaagaaaaggttttaagtatttcccaagccaccagcattagacagttggttcagctcaccagttgaaatatctggtatgtgtcagataccctccgaggctctgaagagattggtgtaacccagatacattttggggccccatgtggcttagtttaggtatggagacacatttaaaaacacacagtcccaaaataattaaacttaattaaaactaaattataatttttcttttgcatagtttttctttttttgaaggagtctaactctgtcacctaggctggagtgcagtggagcaattgcggctcactgcagcctcaacttcctgggctcaagcaatcctcccacctcagcctcatgagtagcttggactacaggcgattgtcagcactgttgcccgggtgctgttctgcccactgtttggagactttccaccctcgtgactgcctagagagagcccttctctgagctgagctgctgaacattctggaagacgtgtgctctgatgagtggagaaagtggagtagggcaaattgcattctaggtggagctgtcaaaaggcatccatccattcatatgtttattcatggtccctttgggttctcagatttttcagatcagctgcttggcagcttgcactttgatgttgcagtggaggctctgttcaggcttctgccccataagaaaaatcaaagcttcattccctgccgatgcattgactgggacatcatccaggtccctggggcaggaatgttattagacactcaataaatatttgttgaatcttgaatgaatttacctcctgaaacctgctcagagacagtgaatggacagagggacagctttcagtctggccaacaattaatacttatgcaaatgtatttagaactgctaatcaggaggttatggtcactcattcattcattcatttgttcactcagcaaatgtttattgagcatctactaggtactggttgctgctccaaacactgaaatgagtcagtggaaatgggaaaggccttcctgttggtgggagaacaatgaatgaaaatcaaacgaacagggcaattacttat

SEQ ID NO: 465866 - DNA, 911 bp, Homo sapiens
ctcgtacatcctgtgagttgaagcaaacgcagaatgagatgcgcccaccatgacagcatcgtacagggcagtttcaccgtcgtgcaaatcctctgggctccacctgctcctcccagtcctcggcatcatacagggcagtttcaccgtcctgcaagtcctctgggctccacctgctcctcccagtcctcggcatcgtacggggcggtttcaccgtcctgcaagtcctctgggctccacctgctcctcccagtccttggcatcgtacggggcggtttcactgtcctgcaagtcctctgggctccacctgctccttccagtcctcggcatcacaggctttctgagccggcctggaaatggaatcaccacacagaatattacgtctgtgggaagatgtgttcagagtcaatggagatctgacctgtggggctggaaggtgatttgtgggatgacgaggacctgcctgctgagatcctggtgcgcagctccattataaggtgtgtgaaaaccagagaccacgcagctctcaggaacacaaatgcgtggagaacaaatgcccagtgagagaccaccactatacaaacacgaacgagacccccagaaatggcacccaggaacccacgtctggcttcatagacttatgtgtttactggggaaccgaatggacccgcccacatgtgctgcacccaggcggcctcttctggcatctctcagtgggatgtgctgcacccaggcggcctcttccggcatctctcggtgggatgtgctgcacccaggcggcctcttcccgcatctctcggtgggatgtgctgcacccaggcggcctcttcccgcatctctcggtgggatgtgctgcacccaggcggcctcttcccgcatctctcggtgggatgtgctgcacccaggcggcctct

SEQ ID NO: 465867 - DNA, 863 bp, Homo sapiens
ggaaaactgcctactcaagcctcagtaatggtggacacccctccccacaccaagcttggtagtcccacattgacttcagactgctgtgctggcaatgagaatttcaagccagtagttcttaacttgctgggctccgtaggagtgccacccactgagcgagaccacttggctccctggcttcagccccctctccaggggagtgaatgcttctgtctcactgggattccaggcaccactgggctggccaccccagcccgcagcggcaaccctcttgggtccacttcaatgctgtggaagctttgttcttttgctcttcacaataaatcttgctgctgctcactctttgggtccatgccatctttaagagctgtaacactcaccgcgaaggtccggggctccattcttgaagtcagcaagaccatgaacccaccagaaggaaccaactctggacatatcttggcaacccagatgggactatctccaagcacatgaattacatgcataaatactggacctccagcgatcatcttgagggtgtgaaaagagcttgcagatgcaaactacataataagaaaacacaacagaaagatgtaaggagccatggtcaattaggtcatcgtgataccacattacaatgctgggctgcttatcactgcaattttattatgaagaggagaaaaaaataaattttattgaagttgtttcattgtatctctgttattgtatcagccaaattgattttctagcagatacaagatatgtagtgtataccagttgttgtctttctataacagtaattttcctttggtggaaaagtttgcttccactatgcatgattttaataaatataatctttctttgga

SEQ ID NO: 465868 - DNA, 508 bp, Homo sapiens
taatttttcctggaattggtgccaatttactcatgaaaggataactatacgaatccttcctacccatcccctgtagtggaatgcattcgctctaaatcatgatgttcctgccaaaaaatatatttttctgagcatgaattacatgcataaatactggacctccagcgatcatcttgagggtgtgaaaagagcttgcagatgcaaactacataataagaaaacacaacagaaagatgtaaggagccatggtcaattaggtcatcgtgataccacattacaatgctgggctgcttatcactgcaattttattatgaagaggagaaaaaaataaattttattgaagttgtttcattgtatctctgttattgtatcagccaaattgattttctagcagatacaagatatgtagtgtataccagttgttgtctttctataacagtaattttcctttggtggaaaagtttgcttccactatgcatgattttaataaatataatctttctttgga

SEQ ID NO: 465869 - DNA, 1335 bp, Homo sapiens
ggctccctgaccctctcaacgaatgccctccaaaaagcccaggaagcaaaatccattattcatcgaaagtataagtgaacaggcagaagtctccaaaaacaatgccttacagctgagggaaaaactgggaaatataagaaaccaaagtgactctgaagaagaaaacatcaatcttttcatcaaaaaagtgaaaaactttttgttagaggaaaacgtgcctccagaagacatcgagaaggttgcgaatggtgtgcttgacattcacctaccaattccatcccaaaatctaaccgatgaacttgtcaaaatacagaaacatatgcaactctgtgaggattacaggacagatgaaaacaggttaaatgaagaagcagatggagcccaaaagcttttggtgaaggccaaagcagctgagaaagcagcaaatattctattaaatcttgacaaaacattgaaccagttacaacaagctcaaatcactcaaggacgggcaaactctaccattacacagctgactgccaatataacaaaaataaaaaagaatgtgctgcaggaatttgttgagctgaaaaaacaatatgctattctccaacgtaagacaagcactacaggactaacaaaggagacattaggaaaagttaaacagctaaaagatgcggcagaaaaattggctggagatacagaggccaagataagaagaataacagatttagaaaggaaaatccaagatttgaatctaagtagacaagcaaaagctgatcaactgagaatattggaagatcaagttgttgccattaaaaatgaaattgttgaacaagaaaaaaaatatgctaggtgctatagctaggcagagttaaagagcaaaagcttgtgcctttgtttctggtttctgatgtacaagcccctggggctctgttgaacctgtgaaatactgacaatgtcttctaccttccttccccacaccctgtccttattagacacctgctcagtgtggctggaggttgaaatgccaccaggaaaatgccacttcataattgaaaggggaaagtaatgaaattgtctctggtttcagaaacttttcctcttaccttcctttctctttcctaacttaaaaataacagtttccatataacaagtagaaatttaagtaagtactctactaactaataatcatttcagtcagataaacctaaacattaaataaatatctccaatattaggatggaatacatatgtatggcatgtactagattgtcctatattttatgtttatttggatttgcttttatttgtaaaattattcttttctgaataaactgcatacaattcaaaatg

SEQ ID NO: 465870 - DNA, 757 bp, Homo sapiens
gtggggagtgaacattgagcacgcatagacataaacatgggaacaacagacactgtggaccacttcagaggggagggagggggaacacgggctgaaaaaccatctttcaggaatctccacactgtcttccacaatggtcgaactaatttacactctccaacagtgttaaagcacgtggaaattgagctgaagccaaacagatctggccttatttcccatgggcctgtgcaccaccaatttggatctgagatcagacataaccttgccataagcagcaaagggcttggtgaaccctcaaaaaggctgtcaaacacccagaggccttggggatcaggaaggagctatcatgtggtctttcataaaaaactggttcacccataccaagcctacacatttcagcccatgaggatggagaaaaagaagaaattgatgacagattctatcatcacaaaaggatgtgatttggaaactatggttctaaaaggagaggtaaaggaggtccaaagttatgagaacagaagtaaatacatggaggtagaatgtggtgcgtgaaggtgacagaggaatcaggtcttcaactctcagagaacagggatattctaatttgctgatttttttgacattatgataagccaggtttgaggaggtaaacctgctacctgtgtatgctagccatcactgagcacgaatgacctgattcattcaatgtgagtgtatctggtgacactcactcactgtcctgataaacactgttctc

SEQ ID NO: 465871 - DNA, 1489 bp, Homo sapiens
tctgcggtgagggtgacacagctgaataggcacaatgggccggaccagtgccgggcacgcggtgcatgcgaagtcagtagttataactgctccgctgtcagcattcccaaacgcagactgtcagctgtctccaagacattcctctatggatggagcatggatctcctgctccacaaaaagctgtcctgctctgctgtgggtaaatgggcccagaaatgaaattactggcatcccagacttgatcctgaaaatgattcatagtttgaaatccacttctcctatttatgttgacaaaaatttccacgctgagtacaacttggaaaagggcctgtggagaagaaataatagattctgtgctatttcttgtgtttcgacacgaagcctgtcctggaatcacctggaggacgtacacaaacacacagtgcctgggcttcaaccgggaccaagcaaacctgaagccaaagaatgtgtatctaatttgcatcataaagtgattgatgccatcagctgtgtttatgccatcagttagtctgtattgatccagggcgtattttgtgcagatggggaccctgggaagttagcagcaatggagaaaagcgtggaatgctctccaggtaatcccatagtggcagcagtaacaacaatggcaacagcagcctggagagcaccgaaatacttaaagctctgagggaagcgagtcttccctccactagagaagctgtggtcccaagagggtgggacaaaataccattcccttttctctctctctgttcatacactgcctggtgggacagactcaagtatagccatgagatgtatgcagcaaggtaggaaaactaaagacctagctttctaaccagaggacaaaaaaaatggggcttcagtgggccaaaaatgccagaataatctcagaaaggagactgctcaagagagcagttccatattaactccgaggcttacttctaagctgcacatggtgtgagaactgaactgtgcatgagactatgatccaggccaccaaatggccactgggcaacatacacacaacagattcccatagcactgcaaaggctttgaaaactgaactgatattagaaccacagtccacaggagaactcgagtctggagcctaattagactgattgcttgcaaaaacaaaacaaaacaaaattcaaaattcgctttaggatttaaacaagacatggatcctcataatgtaatattcaaaatgttcaggacacaatccaaaactacttgacatatgaaagacaagaaaaacttcaacttatagggaaaagaacaatcaacagatgccacctgcaagatgacacaaatgttgaaattattaaagatgcaaaggcgactattataaacatattccaagaagtaagggaaaattctcttgaaacaaaaaagtctcaataaagactatagaagatacaaagaaggacaaaagagaaactttttggaactgaaaattacaatgacc

SEQ ID NO: 465872 - DNA, 968 bp, Homo sapiens
tgtttgacctacttttccccaaccacagccgtcggaggttggagaagtcattagtggattgaatacaaatatttatagtataaattatctacagtataatcatctttcatgcagcctgtactaactttgacaaatttaggttgttactcaggctgaacctttggctcccagaggagatgcagcttcactctcaaggcatagactttgcatcctcctgagcaccaccagatatctctactgaagtccacagaacaagactattggactacatgttctgtatgttctctaacaaatatttagacctaaggattttgtttcaatgttttccttagagagataagattcatttatgtcatatggaatgatgaataaacctggctttggggatttgatggaccttgtatttttctctacaaggccttctggaaaacatcgcttaatttatctgtttcttaatttcccatctgtaaaaaaaagtggcaataatgcttatcttttcaaagttttatgagttagataaaataagacatgtataatatctgatcaagtaagtactcaatggatagtaatttcctcctctaattgtcttcaataggtctagattcaatttttttaaaacaatgataagacttcatttgagggctattggacaaggtttgaggtggcaatgatgttaggtgtttgcaaattccatcatagtggctagaattaaggcttatgaatgtcaggttataaatggatgcctgagtgagtccaatggctctgtggcccaaacctatactggattttttatatttattcaaagagatcaacaaaaatgctgccactcttgtgtctgatattgctctaactatacaatctcttccatttcttttagtaaagagagctagaagtatttcattttatattaaatgtaaattagtagtttacattcactgtctttccccaggtctaagttaattctaata

SEQ ID NO: 465873 - DNA, 1401 bp, Homo sapiens
aaggactcagatgaacaaccaaagccatcctgaatcccctggacccctggaggttgggattgggcacaaggcacaactgctggagaaagcctgtacattctcctatgagcttttgcttttggaaaaatgcatccagatagagttccaggctacttttgcttcacaccttccccgaccccagacagaagtaagtcaagggagccagccacttggaaaaggcagaaggaagaaagaagaaaagattaagggtactgtctcccactcagcagtgtgcaaatgcaaaaagccaaagataaaagaaagattaaaatataacgacagaaaattaaaaacaagagcaaataagacagaaaggctcaaccaacatcatctcttctgcgagtgacgctataaagcccccacagccagtagagtatagagatgttactctttactgctttagaaacaccaaccttggtgattgtaaagaggttggagaagtcattagtggattgaatacaaatatttatagtataaattatctacagtataatcatctttcatgcagcctgtactaactttgacaaatttaggttgttactcaggctgaacctttggctcccagaggagatgcagcttcactctcaaggcatagactttgcatcctcctgagcaccaccagatatctctactgaagtccacagaacaagactattggactacatgttctgtatgttctctaacaaatatttagacctaaggattttgtttcaatgttttccttagagagataagattcatttatgtcatatggaatgatgaataaacctggctttggggatttgatggaccttgtatttttctctacaaggccttctggaaaacatcgcttaatttatctgtttcttaatttcccatctgtaaaaaaaagtggcaataatgcttatcttttcaaagttttatgagttagataaaataagacatgtataatatctgatcaagtaagtactcaatggatagtaatttcctcctctaattgtcttcaataggtctagattcaatttttttaaaacaatgataagacttcatttgagggctattggacaaggtttgaggtggcaatgatgttaggtgtttgcaaattccatcatagtggctagaattaaggcttatgaatgtcaggttataaatggatgcctgagtgagtccaatggctctgtggcccaaacctatactggattttttatatttattcaaagagatcaacaaaaatgctgccactcttgtgtctgatattgctctaactatacaatctcttccatttcttttagtaaagagagctagaagtatttcattttatattaaatgtaaattagtagtttacattcactgtctttccccaggtctaagttaattctaata

SEQ ID NO: 465874 - DNA, 322 bp, Homo sapiens
agcggccgcctactactactaaattcgcggccgcgtcgacagagaacctcactctgtaataacaatgaggaatagccacggcgatctccagcaccaatctctccatgttttccacagctcctccagccaacccaaatagcgcctgctatagtgtagacatcctgcggcttctagccttgtccctctcttagtgttctttaatcagataactgcctggaagcctttcattttacacgccctgaagcagtcttctttgctagttgaattatgtggtgtgtttttccgtaataagcaaaataaatttaaaaaaatgaaaagttga

SEQ ID NO: 465875 - DNA, 1806 bp, Homo sapiens
tgtgcagggcaataggccagccatgacggcaatgattgtcattctgaagtgcatggcccaaatggccccatggatgtataatctcctgaaagcacaggcccatggattgtcatcctgcagcagggggaagcaaaatgaaccaggactggaaccctggtcttttgagaatcccagaccaccagaatttgaagaactcagggaaactgaattagagtttttgatatggactgaatcactgtggaattattataagaaactctttggcagtggaacaacacttgttgtcacagataaacaacttgatgcagatgtttcccccaagcccactatttttcttccttcaattgctgaaacaaagctccagaaggctggaacatacctttgtcttcttgagaaatttttccctgatgttattaagatacattggcaagaaaagaagagcaacacgattctgggatcccaggaggggaacaccatgaagactaacgacacatacatgaaatttagctggttaacggtgccagaaaagtcactggacaaagaacacagatgtatcgtcagacatgagaataataaaaacggagttgatcaagaaattatctttcctccaataaagacagatgtcatcacaatggatcccaaagacaattgttcaaaagatgcaaatgatacactactgctgcagctcacaaacacctctgcatattacatgtacctcctcctgctcctcaagagtgtggtctattttgccatcatcacctgctgtctgcttagaagaacggctttctgctgcaatggagagaaatcataacagacggtggcacaaggaggccatcttttcctcatcggttattgtccctagaagcgtcttctgaggatctagttgggctttctttctgggtttgggccatttcagttctcatgtgtgtactattctatcattattgtataacggttttcaaaccagtgggcacacagagaacctcactctgtaataacaatgaggaatagccacggcgatctccagcaccaatctctccatgttttccacagctcctccagccaacccaaatagcgcctgctatagtgtagacatcctgcggcttctagccttgtccctctcttagtgttctttaatcagataactgcctggaagcctttcattttacacgccctgaagcagtcttctttgctagttgaattatgtggtgtgtttttccgtaataagcaaaataaatttaaaaaaatgaaaagttgacttttgtccatggtattttaattggatgacatcaaattgaacatccaagacactgtgtttcctgatcctcacgatacccccatgagagctgccctaaaagcagagaggcagcgtgatggagaggttcagcacatgctctctgatcccaggaatcctgggtatggtgtttcgtatctgtgtgacctcaggctggagtgcaatggcacgatctcggctcactgcaacctctgcctccctggttcaagcaattctcctgcctcagcctcccgagtagctgtgactacaggcacacgccaccacgcccggataatatttttttgtatgttagtagagacggggtttcactgtgttgccaaagctggtcttgaactcctgagttcaggcaatccacctgactcagcctctgaaagtgctaggattacaggcgtgacccactgcgcccggcctttctttttttgttgttgttggttttttatcttaacatttcttttttctgttgatgcttttcaagaattactgccttagaagaaagcaggcaatttatgagg

SEQ ID NO: 465876 - DNA, 1296 bp, Homo sapiens
tgtgcagggcaataggccagccatgacggcaatgattgtcattctgaagtgcatggcccaaatggccccatggatgtataatctcctgaaagcacaggcccatggattgtcatcctgcagcagggggaagcaaaatgaaccaggactggaaccctggtcttttgagaatcccagaccaccagaatttgaagaactcagggaaactgaattagagtttttgatatggactgaatcactgtggaattattataagaaactctttggcagtggaacaacacttgttgtcacagataaacaacttgatgcagatgtttcccccaagcccactatttttcttccttcaattgctgaaacaaagctccagaaggctggaacatacctttgtcttcttgagaaatttttccctgatgttattaagatacattggcaagaaaagaagagcaacacgattctgggatcccaggaggggaacaccatgaagactaacgacacatacatgaaatttagctggttaacggtgccagaaaagtcactggacaaagaacacagatgtatcgtcagacatgagaataataaaaacggagttgatcaagaaattatctttcctccaataaagacagatgtcatcacaatggatcccaaagacaattgttcaaaagatgcaaatgatacactactgctgcagctcacaaacacctctgcatattacatgtacctcctcctgctcctcaagagtgtggtctattttgccatcatcacctgctgtctgcttagaagaacggctttctgctgcaatggagagaaatcataacagacggtggcacaaggaggccatcttttcctcatcggttattgtccctagaagcgtcttctgaggatctagttgggctttctttctgggtttgggccatttcagttctcatgtgtgtactattctatcattattgtataacggttttcaaaccagtgggcacacagagaacctcactctgtaataacaatgaggaatagccacggcgatctccagcaccaatctctccatgttttccacagctcctccagccaacccaaatagcgcctgctatagtgtagacatcctgcggcttctagccttgtccctctcttagtgttctttaatcagataactgcctggaagcctttcattttacacgccctgaagcagtcttctttgctagttgaattatgtggtgtgtttttccgtaataagcaaaataaatttaaaaaaatgaaaagttgaaaaaaagtcgacgggccgcgaatttagtagtagtagcg

SEQ ID NO: 465877 - DNA, 1258 bp, Homo sapiens
tgtgcagggcaataggccagccatgacggcaatgattgtcattctgaagtgcatggcccaaatggccccatggatgtataatctcctgaaagcacaggcccatggattgtcatcctgcagcagggggaagcaaaatgaaccaggactggaaccctggtcttttgagaatcccagaccaccagaatttgaagaactcagggaaactgaattagagtttttgatatggactgaatcactgtggaattattataagaaactctttggcagtggaacaacacttgttgtcacagataaacaacttgatgcagatgtttcccccaagcccactatttttcttccttcaattgctgaaacaaagctccagaaggctggaacatacctttgtcttcttgagaaatttttccctgatgttattaagatacattggcaagaaaagaagagcaacacgattctgggatcccaggaggggaacaccatgaagactaacgacacatacatgaaatttagctggttaacggtgccagaaaagtcactggacaaagaacacagatgtatcgtcagacatgagaataataaaaacggagttgatcaagaaattatctttcctccaataaagacagatgtcatcacaatggatcccaaagacaattgttcaaaagatgcaaatgatacactactgctgcagctcacaaacacctctgcatattacatgtacctcctcctgctcctcaagagtgtggtctattttgccatcatcacctgctgtctgcttagaagaacggctttctgctgcaatggagagaaatcataacagacggtggcacaaggaggccatcttttcctcatcggttattgtccctagaagcgtcttctgaggatctagttgggctttctttctgggtttgggccatttcagttctcatgtgtgtactattctatcattattgtataacggttttcaaaccagtgggcacacagagaacctcactctgtaataacaatgaggaatagccacggcgatctccagcaccaatctctccatgttttccacagctcctccagccaacccaaatagcgcctgctatagtgtagacatcctgcggcttctagccttgtccctctcttagtgttctttaatcagataactgcctggaagcctttcattttacacgccctgaagcagtcttctttgctagttgaattatgtggtgtgtttttccgtaataagcaaaataaatttaaaaaaatgaaaagttga

SEQ ID NO: 465878 - DNA, 1244 bp, Homo sapiens
tgtgcagggcaataggccagccatgacggcaatgattgtcattctgaagtgcatggcccaaatggccccatggatgtataatctcctgaaagcacaggcccatggattgtcatcctgcagcagggggaagcaaaatgaaccaggactggaaccctggtcttttgagaatcccagaccaccagaatttgaagaactcagggaaactgaattagagtttttgatatggactgaatcactgtggaattattataagaaactctttggcagtggaacaacacttgttgtcacagataaacaacttgatgcagatgtttcccccaagcccactatttttcttccttcaattgctgaaacaaagctccagaaggctggaacatacctttgtcttcttgagaaatttttccctgatgttattaagatacattggcaagaaaagaagagcaacacgattctgggatcccaggaggggaacaccatgaagactaacgacacatacatgaaatttagctggttaacggtgccagaaaagtcactggacaaagaacacagatgtatcgtcagacatgagaataataaaaacggagttgatcaagaaattatctttcctccaataaagacagatgtcatcacaatggatcccaaagacaattgttcaaaagatgcaaatgatacactactgctgcagctcacaaacacctctgcatattacatgtacctcctcctgctcctcaagagtgtggtctattttgccatcatcacctgctgtctgcttagaagaacggctttctgctgcaatggagagaaatcataacagacggtggcacaaggaggccatcttttcctcatcggttattgtccctagaagcgtcttctgaggatctagttgggctttctttctgggtttgggccatttcagttctcatgtgtgtactattctatcattattgtataacggttttcaaaccagtgggcacacagagaacctcactctgtaataacaatgaggaatagccacggcgatctccagcaccaatctctccatgttttccacagctcctccagccaacccaaatagcgcctgctatagtgtagacatcctgcggcttctagccttgtccctctcttagtgttctttaatcagataactgcctggaagcctttcattttacacgccctgaagcagtcttctttgctagttgaattattttgcttattacggaaaaacacaccacataatgtcgacc

SEQ ID NO: 465879 - DNA, 836 bp, Homo sapiens
gtgtcctgaattctttttctggccgtggacagagcgatgaggtcggggcggctgctgggcgcacggcgctggcctattccctgcttccaggcagtgaccctggggacgcatccagagcttgggaattgcgccaaggctcaagccccgcctccgccggagggtgcagaggctcaggggtgtgcagaggctcaggtggatgcaaaggctcacgtgggtgcaggggctcaggagggtgtagaggctcagatgggtgaagaaggtcggggggtgcagaggctcggggggtacaggggctcagttgggtgccaaggcacaggagggtgtagaggctcaggtggatgcagggactcagatgcgtgcagaggctcatctaggtgcagaggctcagagtgggtgcagaggctcaggtgggtgcagaggctcagttgggtgcagaggctcaggagggtgcagaggctcatttgggtgcaggggctcaggtggatgcagtagctcagattctttctctatattgttgttatatgtgaaccctggcactatttttccagcttttagaaggagtcctcattttccagaactgtgagcaggaaagacagtctcctggattcactttttcctaataaaactgatgtgtttttttttcttagtcaaaagtcacataagatggatatatgctatgcaaaaaataacaagcatatagactgacagagtaattgattccttatgccagtagaagaacaatacctggaggtcctgaaaggtgaagataacagaatcacagggatggtttcccccacactgtccttgtggtagtgaagaagtctcatgagagctga

SEQ ID NO: 465880 - DNA, 4520 bp, Homo sapiens
gacaaatccataccaactgggaaacggagaccatgctgtgtctgtcaaactgcctgactctgttgtggcactcgagcagccatcgacaatgcttaaacaagcagcatggctgtgttccaggacatggatggagctggaagccattgtgctcagcaaactaatgcaggaacagaaaaccaaacaccgcatgttctcacttacaagtgggagctgaacggctctagtgctctagcactcagttgtgttagagtggagaggaaggagagcgaaagggaaatgtctctctacttcgctggctgttgtcgtggtcctctcttggatggttgcttctctctggcatccttggagatgtttgatcgtctgaagccttcttctctcaactcatcaaagtcattctccatccagctttgttccattgctggacttcaatcctggggcagcaagaataaagtaaatttggccgtggaggaagaagagcaaataccaggaccgttcgttattccttcatggcaatgggagcaggatcccgccctcaggactgtagggaagcgggagagagctccagaagaagataggaacatgtgggaaagtttggaacttcctagagacttgttgaatggctttgaccaaaatgctgatagtgatatggacaatgaagtccaggatgagatggtctcagatggagataagaaatttattgggaactggagcaaagatgactcttgctatgctttagtggagagactggggacattttgcccctgccctagagatctgtggaactttgaacttgagagagatgatttagggtatctggtggaagaaatatctaagtggcaaggctttcaagaagaagcagagcaaaagagtttggaaaatttgcatcctaatgatgtgatagaaaagaaaagccccttttctggggagaaattcaagctggctgcaaaaattttcataagtaacaaggagctgaatgttaatcaccaagacaatagagaaaatgtcttcagggcatgtcagagaccttcatggcagcctctcccatcacaggcctggaggcctaggaggaaaaaatggttttcctggctgggcccagggtccccctgctctgtgcagcctcaggacatggttccctgtgtcccagctgcttcagctccagccatggttaaaaggggccaaggtacagcttgggccattgcttcagagggtgcaagtcccaaaccttggtggtttccacagagcgttgagccggtgggtactcagaaatcaacaatcgaggtttgggaacctccccctagatttcagaggatgtatggaaatgcctggatgtccaggcagaagtttgctgtaggggtggagctctcatggaaaacctctgctagggcagtgtggatgggaaatgtggggtcagaaccctcacacagagtccccactaaggtactgcctagtggagctgtgagaagagggccactgtcctccggactccagaatggtagatccactgacagcttacacagtgcacatggaaaagccacagacactcagtgccagcccgtgaaagcagccagaagggggactgtatcctgcaaagccacaggggtgaagattcccaaggcagtgggagcccacttcttgcatcagcatgacctgcctaggatgcaggtgcaaggctgcttggctggcccatgggcccatgggaagtggcccatggggttgttcttaggcctgatatgtgggagcatggctgctcagctggtcttggatatgtctgctaaggtggctcatggggctgtttctcagttctggaatgtgggctcttggctgcttgaaggagtgggtgggggtgaggagtgcacaccttgtgctccttacctgggtgtagtacagctgcatgaattcctggtagctctctaaactgagcttagggcttgcaaggtatgggattctccagttgtaaggactgtaggttgagttttatacttttgtgtttctcatgatagtagttattgtccttttgctgccagatgtagaactcccttaagcatctggaagccctgaaaaactatctttctattaagaattctttcctaagtaatgatgaagattgacttttagtatgtattggtccatattcactttttacctctgttgggaaaataatattcctacatttttccctaatgcatagatacataagatgaaaattactcctcttacgctttgtccatcctcatgacacttggcagaaaatgctaatgattctgcatgtctactcagggtattcagcacacttgtgtactctttttaaaatttatacatattgcttacttcaatcactcctcttgatagtctattcccttttcaaattactgtcatggaaaataaatgccttaacattaattttaaccttcttcattagcaaaatcagagtgcagtaaataattcccttttggaatttaaacagacttttgctattatactgttgacctttttatatgctttcatgctgtggtccatataccacccatattcccatctcttggatttatttatcagttggctttattacctgatgctacagagagaatcattaatatcaatatgaagtgaaattattttgtaatttaaaaaaataacgtgagtgtgataataattttcctgttactttttccatgttttgcagcatttttaccaaactgtttagctgtgtgttctgattactctttcttgaaatagtgagggatttatttacacatgttgttaccaatacacagggtaagtgaattgtccttggactctctgttcattgtgtcatggacaaatacccttcacaagtaaacattgaaatgataggtctatgtgtgtaactgtcaggcctgttgcattttctgaaagacattcattcagcacgacccttctggactgtgattttctttcaagttgctgtttgtcttctctgatgtgttctattttgaaatatcaaattaatcatcagaaaatgcttgtcaatgaatgaattgcatttgctcaatatacacatatttattttcaggtagctttgaacacatggtaaggaaatacattcatcttttcactgagaactgctcacctaattgcttggtacagtcatgttcaatgatatgtagttgattaaaaaatgacaaatactgtgaccagctgcccttttgatgtcaaataatgtggaagattgaacaccatgctgatccattagccatttccaggaaacattgcagcgttataagagaaattatagactatttgttgaagctcagcatgtccatctccctgctttgaagaaggcaagcttcattaaaaccaacatcttacttggcctaaaacatctttggagtaggagatttatggcctttctgggaaagtagttctaatttttataaaccttagaattaagaagttcttttgtaaatacaattataattctttcttctcgattttgagtcatttattcttattcaatatccataaaagtaaataattgaaatacatatttcctcaccaaaattttattaattacctacataatttatctatttaggaaatggaattagaaacctgtaccttataaaattgatggtgaacatgaaatgagggaagttaaatcaaaaatctgctattactactattacttctggatgcccaggaagctggagagtggataatgtaaagtttctgcagggaagttccatgtttccatgactgtgctagccagcagcaacagccaagagtcataggaagatggtctttgcctcaattttctcttccacatatcacctgagcatattaacaaggtagaacctgatttgcacataataccctagttgcaagggaatctgggaaatataaattttagatttccagcttctcaactagaaagaggagaaaatggaggttgagtaagccattccagaaaagataatattattattagttaaaaatgtaataattattgccatctgaatattctaacttagggcaccacaaaatgaaaacctgatacactttacaatggttactcatctttcaatctttttgctgctcttggtgtctgtaggacactcctaactgagtaggacctttgctttagacacagctgttcctttttatcagtgtggtaagcagtttatgtctaacagcagttttatggtccactgactgtactgaaaggcagcgctttaccaaccatgaactttgacatatttatatccggtttttaatctgaaaacatgcaaaaaagagtcttctaaatataatttattatcagaacaactctcatgtaggtgttgaacagcatataaaatttatatttaggccttagattttgtcctccttcaagagacatagtgacatcagtaggtgaactgaaggttgaaatcccaattgctttgaggggacatcaagccttatgaatttgtattagtactaaaaacagcaggggaatagtataattaacatgtataagattccatttttaaatacaaagc

SEQ ID NO: 465881 - DNA, 1398 bp, Homo sapiens
tgcccgtgctttcaccgtgcaatgtgcctgctcctgctttgccttctgtcatgattggaagcttcctgagacctccccagaagcatatgccaccatgcttcctgtacagactgcagaactgaaacattgcagcgttataagagaaattatagactatttgttgaagctcagcatgtccatctccctgctttgaagaaggcaagcttcattaaaaccaacatcttacttggcctaaaacatctttggagtaggagatttatggcctttctgggaaagtagttctaatttttataaaccttagaattaagaagttcttttgtaaatacaattataattctttcttctcgattttgagtcatttattcttattcaatatccataaaagtaaataattgaaatacatatttcctcaccaaaattttattaattacctacataatttatctatttaggaaatggaattagaaacctgtaccttataaaattgatggtgaacatgaaatgagggaagttaaatcaaaaatctgctattactactattacttctggatgcccaggaagctggagagtggataatgtaaagtttctgcagggaagttccatgtttccatgactgtgctagccagcagcaacagccaagagtcataggaagatggtctttgcctcaattttctcttccacatatcacctgagcatattaacaaggtagaacctgatttgcacataataccctagttgcaagggaatctgggaaatataaattttagatttccagcttctcaactagaaagaggagaaaatggaggttgagtaagccattccagaaaagataatattattattagttaaaaatgtaataattattgccatctgaatattctaacttagggcaccacaaaatgaaaacctgatacactttacaatggttactcatctttcaatctttttgctgctcttggtgtctgtaggacactcctaactgagtaggacctttgctttagacacagctgttcctttttatcagtgtggtaagcagtttatgtctaacagcagttttatggtccactgactgtactgaaaggcagcgctttaccaaccatgaactttgacatatttatatccggtttttaatctgaaaacatgcaaaaaagagtcttctaaatataatttattatcagaacaactctcatgtaggtgttgaacagcatataaaatttatatttaggccttagattttgtcctccttcaagagacatagtgacatcagtaggtgaactgaaggttgaaatcccaattgctttgaggggacatcaagccttatgaatttgtattagtactaaaaacagcaggggaatagtataattaacatgtataagattccatttttaaatacaaagc

SEQ ID NO: 465882 - DNA, 4156 bp, Homo sapiens
gacaaatccataccaactgggaaacggagaccatgctgtgtctgtcaaactgcctgactctgttgtggcactcgagcagccatcgacaatgcttaaacaagcagcatggctgtgttccaggacatggatggagctggaagccattgtgctcagcaaactaatgcaggaacagaaaaccaaacaccgcatgttctcacttacaagtgggagctgaacggctctagtgctctagcactcagttgtgttagagtggagaggaaggagagcgaaagggaaatgtctctctacttcgctggctgttgtcgtggtcctctcttggatggttgcttctctctggcatccttggagatgtttgatcgtctgaagccttcttctctcaactcatcaaagtcattctccatccagctttgttccattgctggacttcaatcctggggcagcaagaataaagtaaatttggccgtggaggaagaagagcaaataccaggaccgttcgttattccttcatggcaatgggagcaggatcccgccctcaggactgtagggaagcgggagagagctccagaagaagataggaacatgtgggaaagtttggaacttcctagagacttgttgaatggctttgaccaaaatgctgatagtgatatggacaatgaagtccaggatgagatggtctcagatggagataagaaatttattgggaactggagcaaagatgactcttgctatgctttagtggagagactggggacattttgcccctgccctagagatctgtggaactttgaacttgagagagatgatttagggtatctggtggaagaaatatctaagtggcaaggctttcaagaagaagcagagcaaaagagtttggaaaatttgcatcctaatgatgtgatagaaaagaaaagccccttttctggggagaaattcaagctggctgcaaaaattttcataagtaacaaggagctgaatgttaatcaccaagacaatagagaaaatgtcttcagggcatgtcagagaccttcatggcagcctctcccatcacaggcctggaggcctaggaggaaaaaatggttttcctggctgggcccagggtccccctgctctgtgcagcctcaggacatggttccctgtgtcccagctgcttcagctccagccatggttaaaaggggccaaggtacagcttgggccattgcttcagagggtgcaagtcccaaaccttggtggtttccacagagcgttgagccggtgggtactcagaaatcaacaatcgaggtttgggaacctccccctagatttcagaggatgtatggaaatgcctggatgtccaggcagaagtttgctgtaggggtggagctctcatggaaaacctctgctagggcagtgtggatgggaaatgtggggtcagaaccctcacacagagtccccactaaggtactgcctagtggagctgtgagaagagggccactgtcctccggactccagaatggtagatccactgacagcttacacagtgcacatggaaaagccacagacactcagtgccagcccgtgaaagcagccagaagggggactgtatcctgcaaagccacaggggtgaagattcccaaggcagtgggagcccacttcttgcatcagcatgacctgcctaggatgcaggtgcaaggctgcttggctggcccatgggcccatgggaagtggcccatggggttgttcttaggcctgatatgtgggagcatggctgctcagctggtcttggatatgtctgctaaggtggctcatggggctgtttctcagttctggaatgtgggctcttggctgcttgaaggagtgggtgggggtgaggagtgcacaccttgtgctccttacctgggtgtagtacagctgcatgaattcctggtagctctctaaactgagcttagggcttgcaaggtatgggattctccagttgtaaggactgtaggttgagttttatacttttgtgtttctcatgatagtagttattgtccttttgctgccagatgtagaactcccttaagcatctggaagccctgaaaaactatctttctattaagaattctttcctaagtaatgatgaagattgacttttagtatgtattggtccatattcactttttacctctgttgggaaaataatattcctacatttttccctaatgcatagatacataagatgaaaattactcctcttacgctttgtccatcctcatgacacttggcagaaaatgctaatgattctgcatgtctactcagggtattcagcacacttgtgtactctttttaaaatttatacatattgcttacttcaatcactcctcttgatagtctattcccttttcaaattactgtcatggaaaataaatgccttaacattaattttaaccttcttcattagcaaaatcagagtgcagtaaataattcccttttggaatttaaacagacttttgctattatactgttgacctttttatatgctttcatgctgtggtccatataccacccatattcccatctcttggatttatttatcagttggctttattacctgatgctacagagagaatcattaatatcaatatgaagtgaaattattttgtaatttaaaaaaataacgtgagtgtgataataattttcctgttactttttccatgttttgcagcatttttaccaaactgtttagctgtgtgttctgattactctttcttgaaatagtgagggatttatttacacatgttgttaccaatacacagggtaagtgaattgtccttggactctctgttcattgtgtcatggacaaatacccttcacaagtaaacattgaaatgataggtctatgtgtgtaactgtcaggcctgttgcattttctgaaagacattcattcagcacgacccttctggactgtgattttctttcaagttgctgtttgtcttctctgatgtgttctattttgaaatatcaaattaatcatcagaaaatgcttgtcaatgaatgaattgcatttgctcaatatacacatatttattttcaggtagctttgaacacatggtaaggaaatacattcatcttttcactgagaactgctcacctaattgcttggtacagtcatgttcaatgatatgtagttgattaaaaaatgacaaatactgtgaccagctgcccttttgatgtcaaataatgtggaagattgaacaccatgctgatccattagccatttccaggaaacattgcagcgttataagagaaattatagactatttgttgaagctcagcatgtccatctccctgctttgaagaaggatgttgggaactgactgtaaggaagacaggattggagaaccaggtttagaagagaaaaggcagtgccagaagtttttgattggagaaaactacagggcaatgttgcacaagaaccattgctggactgcatcattgcttacccaacatgactcagcctcggtattgccactgactcacggagctcctaatagaggagaattagtgtcacagatcgactggaaaaccaatccacatgaagccaggaagagaaatgaagctgctgttgctgaatccatagctggccttaatgatgctggctaggaaagacggcccattctgggggagataagtcaattttgcagtgtctgttattatcatagtgactattgtcttcctgttttatatttatttacctaaattgttttggaaagactcagaggtatagagacatgcctactttttgcaaaaatcatcacactgtcatggaggtagtccaggctatggggctcttatttgttggtgtcttgggcaagttgcttgacctctgatcattgtttgcttattcttatatggcccctgtatttcagactcactctgtgtcaggcatttgtttacctttgtagcaagctcaggaggaaaataccattgcccttgttttacaggtgatgaaactgtacgttttccaaggacacagtgctagtaagtaatgaatgtgaaattttaactgtttcaatctcttctcagagccagtgctaactactctcctaaacttcctctcatctgtaaaatatggatgataataacacctcttacagagttgttgtacatattaaataatagaactgtgaaatgtgta

SEQ ID NO: 465883 - DNA, 824 bp, Homo sapiens
ttgcgcttaccaggtgaggagacaccccagcatgctttggctcaccctccatgggctgcacccactctccaaccagtcccaatgagaagaatcagggagattctatacaagcaggtgaggaatcaccattctcagattctgtgaccttggaacaaactacaagtaatattggaggaaccagtggacgtgttagtttatggatgcagtgggtgcttcccaaaattactataaagctctttgctccagatcctgaaaataaaggcacagaggtttgtatggtcagtgaactagaagatctcagtgcttccatagatgtccaggatgtatataccaaagtgaaatgtaaaatagagagtttcaatattgatcactatagaagcaggccaggggaaggttggcagtcaggacattttgaaggagtatttctacaatgcaaagaaaaatctgtgacaactacaaaacttctagatggcactcatcagcagcatggattcctctctctgacatacacaaaagctgtaacaaaaaatgtccgccacaagttaacatcaagaaatgagcgaagaagttttcataagttatctgaaggcctaatggatggttctcctcattttcttcatgaaattcttctttcagcacaagcttttgatattgttctttattttcctttacttaatgccattgcaagtatatttcaagcaaaactaccaaagacccaaaaagagaaaagaaaatctcctggtcagcccatgaggacccatacactgacatcccgcaatttacctttgatttatgtcaacacaagtgtaatcagaatttttatt

SEQ ID NO: 465884 - DNA, 899 bp, Homo sapiens
ttgcgcttaccaggtgaggagacaccccagcatgctttggctcaccctccatgggctgcacccactctccaaccagtcccaatgagaagaatcagggagattctatacaagcaggtgaggaatcaccattctcagattctgtgaccttggaacaaactacaagtaatattggaggaaccagtggacgtgttagtttatggatgcagtgggtgcttcccaaaattactataaagctctttgctccagatcctgaaaataaaggcacagaggtttgtatggtcagtgaactagaagatctcagtgcttccatagatgtccaggatgtatataccaaagtgaaatgtaaaatagagagtttcaatattgatcactatagaagcagccttggggaagagtgttggtctttggggcaatgtggaggtgtcttcctttcctgtactgacaagctgaacagacgcaccttgttggttcgacccatcagcaagcaggaccctttcagtaattgctctggcttctttccttctacaactacaaaacttctagatggcactcatcagcagcatggattcctctctctgacatacacaaaagctgtaacaaaaaatgtccgccacaagttaacatcaagaaatgagcgaagaagttttcataagttatctgaaggcctaatggatggttctcctcattttcttcatgaaattcttctttcagcacaagcttttgatattgttctttattttcctttacttaatgccattgcaagtatatttcaagcaaaactaccaaagacccaaaaagagaaaagaaaatctcctggtcagcccatgaggacccatacactgacatcccgcaatttacctttgatttatgtcaacacaagtgtaatcagaatttttatt

SEQ ID NO: 465885 - DNA, 341 bp, Homo sapiens
tgtaaagtattctattgattgcattgtcagatttatgttttagttcagtgcagtgttgtgaactttagacttatttgaaatagttatgtatgttcaatttcttaactcagaaaaattgaagagaacagataaggtgaacttatgttttccaggccaggggaaggttggcagtcaggacattttgaaggagtatttctacaatgcaaagaaaaatctgtggtgagacccatttagttactatgatttttgaaaatgtactttaaactgtttatcttgttatttcataaaataggactaatggttacaagaatttgagttcagaataaattcttattagcctg

SEQ ID NO: 465886 - DNA, 966 bp, Homo sapiens
ttgcgcttaccaggtgaggagacaccccagcatgctttggctcaccctccatgggctgcacccactctccaaccagtcccaatgagaagaatcagggagattctatacaagcaggtgaggaatcaccattctcagattctgtgaccttggaacaaactacaagtaatattggaggaaccagtggacgtgttagtttatggatgcagtgggtgcttcccaaaattactataaagctctttgctccagatcctgaaaataaaggcacagaggtttgtatggtcagtgaactagaagatctcagtgcttccatagatgtccaggatgtatataccaaagtgaaatgtaaaatagagagtttcaatattgatcactatagaagcaggccaggggaaggttggcagtcaggacattttgaaggagtatttctacaatgcaaagaaaaatctgtgccttggggaagagtgttggtctttggggcaatgtggaggtgtcttcctttcctgtactgacaagctgaacagacgcaccttgttggttcgacccatcagcaagcaggaccctttcagtaattgctctggcttctttccttctacaactacaaaacttctagatggcactcatcagcagcatggattcctctctctgacatacacaaaagctgtaacaaaaaatgtccgccacaagttaacatcaagaaatgagcgaagaagttttcataagttatctgaaggcctaatggatggttctcctcattttcttcatgaaattcttctttcagcacaagcttttgatattgttctttattttcctttacttaatgccattgcaagtatatttcaagcaaaactaccaaagacccaaaaagagaaaagaaaatctcctggtcagcccatgaggacccatacactgacatcccgcaatttacctttgatttatgtcaacacaagtgtaatcagaatttttatt

SEQ ID NO: 465887 - DNA, 1092 bp, Homo sapiens
gattttccaggtgctgtctgttatggcttcccttggctatgaaagggaattccctgactgcttgcactttccagaaaataattgtgtggctgcatatggtgaagagaacagtaagcgctttaatacgcggatgcatatgctgatctctgacagatgttggtctttgggaacaacagaaaggggagtgactcagaatgtggtactatcggggctttctgagacctcagttcggctcctcccctcgccctgcaggctggttctgactctccacaccagctctgctccatgctgtggctgcctcgcccctgtcccttgtcttggttctaggtctggatggtcccggactctaacccacattcagctcagactcaccctggtgccaatcgcccacactatcctggaagacagggattcacttttcaagaacatggatcaagtagccactcagtggaaagcactgctctcagtgcctgggacacagcggtgaacaaaacaaaatctctgtgttcatggagatcacatgctagaaaatatttgcaatacctgccacgtccaaggttcagctgaggccaatgtaaagccagtattataggacacttctcagactgagagcccaatgtcgttggaaaccactgggccacaggaaaggcaggctctctcagtcctgctcctgccatggaagaagcctgctcccaccatgccttctgccacgagtaaaagttccctgaggcctccccagaagcagatgctgtcgtgcttcctgtatagctgcagaactacttatagatggggtcacacaccattctacaaagaggggagtctctccgtgaaatgacttgaacttataaagcgcattctgctatgtggttgcctcaccaactcccttcctgcctggactattacagtaacctgtggattggtctccttgccttgagacgatgacatttctggcacctaaacccatcagcatcaagttgttcttttgaaaacataaatatgaccatgttacatgtttttaaacctttcaatggaatactttcacctacaggataatgtttagattttttaacatggcatgcatgacgcttcact

SEQ ID NO: 465888 - DNA, 859 bp, Homo sapiens
gagcccgtggacatcccgttgtcccccttgcccacacgcgtcctctttcctcccccctggccagtctcgctgtctccgccttccgctccctggcggaggcggaggccagagagcgctccaaggaagactaaaaacccaggccgggaagcgcggggtgagaaagcgaggtgggtggcgagagcgtgagcgcgccctctgctgaccccggggagcgtggactacgagttggcgcccaagtccagaatccgcgcgcaccgcggaaaatatttgcaatacctgccacgtccaaggttcagctgaggccaatgtaaagccagtattataggacacttctcagactgagagcccaatgtcgttggaaaccactgggccacaggaaaggcaggctctctcagtcctgctcctgccatggaagaagcctgctcccaccatgccttctgccacgagtaaaagttccctgaggcctccccagaagcagatgctgtcgtgcttcctgtatagctgcagaactacttcaaatcatcccaacaccagagaacactaaatgacagtggacaggaagacagtgtaccttttgctcctgatgatcaagctgaactactttatcatgtccattctttgctgccagatggagaggagtcattccatgaaggtcaccttcattcagaagcctcgtatcacttatgtcttgtaggagcctctgacaggttataaattggcactgggattttgtgagctacccacgtgattctaatgtgcaacagtttgagaatttctggtctagagaaaatacaggcctttgcagtatcttggaggggagcttgttgccacccaaaactcagacattgaaggaaaaagg

SEQ ID NO: 465889 - DNA, 1108 bp, Homo sapiens
agaggtcctggtcggggacacaattacggtggcagtgtaacgccgggaaactttattgcatgaagtccctctcactccctctacctccctcttttacctgggacatcaatcttctcctgactttacatgtggactcgagttggaactatatcattggctgtcctgggtctccagcttgctggctgcagactccaggactccttagcttccataaccaggatgcaaacttcggagccatctgcatcagagggattgatgaagatcaacaaagtttgggaacacaggaaaggagcggggaggtatcattcagcagcccttgggcagttgcgaggcaagtcgtcaatggggtatggagattttccaggtgggtgtggttgaaggaagggaagaaagagtttaggagcacattacaagaagaaggtgactgtaaggtccaggctgagcaggaaggtaaagcaagaaggaaacatgaggttgtgaagagaattttaaaaagttccttcttacccaaaagaaaaaaaagatagcaaccttatgttggttctcaaattaaaaaaaatatttttactcgttcataaaatagaaaaatctgagaatctgtagcttagagaactacagtgtgggatgtctataaagaccaggttattttatcagctcctaacaccccttaatagaagcttagccaagacttgcactatttcagtctttcccattccacattccatggactcttgaagagacattgatgaaacggtgcagccatgaaccaccctcactcaatcctagtggcagaatcccccttttactgcagaatgagcttcttgctacagtgatacttgaaccccttagatatatcctgtactaattatattaaaacacgaccaatgcttttgctttgttgtcccccaaattaaacaccttaatcatgagaacccagagaattggatttagtgtaactgattccaaactgtcagtaagaacataatttatatttttctccaattcaattaaaagaaaattgacaataaaaagctgatcaatacgtgtagctcaggaggtagagcctgctttgagatgcagaagtgttttttttttttttagatctata

SEQ ID NO: 465890 - DNA, 1109 bp, Homo sapiens
gggtcagtgccagacttctctacttcctgacaaactgtttgaggagaagcatgaaagaagaggacagctgagcggggaacataggagaagtgcttgctagatgctacaaatagcaagtgtggaatggctgaaaaatgaagagcccattgactctgaacaagacgagaacattgacaccagggctgaccataacctgatcatcaggcaggcacggctctcggactcaggaaattacacctgcatggcagccaacatcgtggctaagaggagaagcctgtcggccactgttgtggtctacgtgaatggaggctggtcttcctggacagagtggtcagcctgcaatgttcgctgtggtagaggatggcagaaacgttcccggacctgcaccaacccagctcctctcaatggtggggcctttttggatgggagctgggaagtgtggagcgaatggtccgtctgcagtccagagtgtgaacatttgcggatccgggagtgcacagcaccacccccgagaaatgggggcaaattctgtgaaggtctaagccaggaatctgaaaactgcacagatggtctttgcatcctagtatgactgaatacccttgaaggcaggcacctgctacctgttgtattttcagactaattctgtatggttcatacattggttaaaatgattagtacattgaaatgagcacttcctgatagcctatagtgcctttatttgctagtacaagcactgattaccctgcatgcatcagatacaatgcagggagctgtaatggaagaccacctacccaccagttgtagtttgggttgaaattgtgtcattagctatcgattgttacatttattgatgacaaacatgtgctagctctatgctgcatggatttccagttatcatgcttaatcaacagtagcaacttttaatgggaatttgtattcccattttactataaaaaacctcttcatgaaataaaaccccaaattttcaacttagatttcatgtctgcaaggccttcaacctaccaccctaagtgtgagttagttgctcttgtaagttgcctccgtatcaaactatcccgtttttgttctatattttcattgcctttatt

SEQ ID NO: 465891 - DNA, 1676 bp, Homo sapiens
tccttctacctcgccagagtcctttccaaaggactagaaaccaaccatctggtgtgttttccattagtcggcatgaatcctgccatatcgcggggcgtggtgtttgccgggaaacttgtcctgtggcacagctcatggagaggacattggctgcacatagctgcagacgaagagcaagcatcacttttctcttgtacattcagggatgtgatgtccttggaacttggtgactctctgggtgtaaagtcccagtcccatgtgggtcccagcatcggtggtctggttgctgatgaagatcagactccaagtctaaattttctggagatctacacctcccaaaggaggctggcttctgatcagaagagcaccgacttggttgtcagggaccctggacatgccctcctgcctgccctcactggggcctccgtagctgctggggaaaactgcttcctatcatcactcagtgactggacagcgcactgggctcaggagaatgttacctcaatttaaggtattggtgatattaagataggaaaataatctttactttttattaagaaaatgtggtaaatatggaacatatctaatagtatatggaagctttgaaatttactgatgaaataaagccctgtggagagcccgttcctcttaatctatggaaacccccccggactctgaagctgctgcggctccttcccggccctgcgttcctgcttccctgggagatgtggccactctccagcattaaaaaaagtgttccttcatttaaaaaatagtttccatatctgtacaatacatattttagcatttctgagatctattacaatgttattattgtgttctctggggcttgctttgttcttctttctacctttctaagattccaccatgttgcttgtttagttcaaccagtgctgatagggacacgtttgcacttgtctctcagtgaacattcgcaagagattttctaggcctccaggcagaagccgctgctgacggggagagtctgctggaggaagtcacatggcagatgccagaggaccagcctgggagaggctttctagcaaccaggacacctgccgcagtgccacgctttctccaggaaacaaggacagctgcacgggtgcccacacgagagtcggcgaccagcctcggcggtggggttcctgcaacgcgtgttcctgctggggttctcctttctgctgttccgagctacagtgcggatcatgctccccatacgtggagtccagggacagcacagcccggggactgcccagccagccaggaagtctggctttcagagaactgggaagaccatcttccactttatcccatctgggagactgtaaacatggattccactgtctcggacagtgagacgattcccagtcttttcctgttcctcctctagatgctgtcttggacgcagtgaagtctgccgatggctgtttcagagccgttaggatggtgaagtgagacaatgtgaatggagtgttttgtgaggctcagtgctgcataaatgctagccattatctaatagcaagaattccttgaaatgtttctttctctcaaatttatgaaaagattagaaaatagttctaaaaattaaaaatgcttctggtcggagcggcttacatgatggcagtgaaagtgtgcagcttcatgggtcccactgc

SEQ ID NO: 465892 - DNA, 1180 bp, Homo sapiens
cagtccaggtggaagggaatctagtatggccccttgcagcacgggcctctgcctttcacacaacctgcacacaacccagagggagccaggtacagccgagtttgtaggtgtgaacacaatgtcagcaagaagcccagccagcttcacctcttactggcactggcagcgggactttgtggcacctagcctgggcactaaggcagcccagagggagctcgtcccagacaatcaagaggaaaagaggggaaacgagaaagagacggagaccggctgtcgtggccaacaatcccgcgaagagggaacggcggtccacgcacgggattcagcctccgatcaagcccagcaatgcggggcttgccaagcccgcgctcacctggaacccgtggcccgccagcgccgcttccgcccgcgcctctctcttcacacttccctgcgagcagagggagccggctccggcctcgccagccccagagaggggccctcacagcgcagccgccggctgaagggctccttgagcgcggccagagcggacgccgaggcggagccgagagcagacactgacagcacagaagacaagcagcagcactgaggtgacagaagccagagggcacccctgcagtccaggacggcatgggacacggaccacataagcctcgatggcccccaaaaagacagatatgggataactctatggatgcttcaaaagcacttaaaggataaaccctcaactatagagacacttatgcttccagaatagattataacctaaaggatgctagagtcaggattcaccctggctccctttctctgaggattctggcactttgagttcccactgcgtttattaaatgacatagtatagtccatgagacacagcaatatgtaacagacaatgaatgctatatgatggatccattcattcactgtatggataaaatatctaaggttatgcagtatgcacgaggcactcctgggtgctagggacacactgatgagcaaaagcagcctctgcccctagacatctgagtctaatggaggaaccagtcacgggacccagtttttctctcagagtataatcaccatttgcaggatttggaagaaaactaaagatcatgaaagttgttaatgatgcctggactagttttgttttataatataatacttccacaccctcctctgc

SEQ ID NO: 465893 - DNA, 1496 bp, Homo sapiens
ttactaccgagtcacatgcagcaccaaagtatattaccggtggaacatttccgagtcacagggcaccgaaatatgttagcggcagtggttctgtccaggtctgaagcaaactcaattcttgcctccgcagaagaaacgattcagctgaggggcattaagatagagacgcttcccccttcactcagctctcattcttctccttgcagccaccatgtgaagaaggacatgtttgtttcccctggggcctctccatccttgctgaactattacacagaatgtatgaaaatgcccggatgtccatggaagaagtttactgcaggggcagagccctcatggagaacctctgctaggacagtgcagaaggaaaatgttgggtcagagcccacacacagactccccactggggcactgcctagtggagctgcgagaagagggctgtggtccttcagaccacagaatggtggatccaccaacagcttaaactatgcacctgggaaagccacagacactcaatggcagcctgtgaaagcagttgagagggggctgttactctgcaaagccacaggggcagagctgcccaaggctgtgggagcccaccctttgtatcaccatgacctggatgttagacatggagtcaaaggagattatttaggaactttaagatttaatgactgcctcactgtatttcagacttgcatggggccttttgttttggacaatttctcccatttggaacaggtgtatttatacaatgcttgtacctcccttgtatctataaatgagtcagttctcacaagatctgatgaatttataaggggcttcccctttgctgagctctcactcctctccttgctcccaacatatgaagaaggatgtgtttgcttccccttccaccatgatggtgcatttcctgaggcctccccatccttgctgaatttagatggtacgtctctccttcatgtgctgcctggggttgaggagaagtggcatagagatacaagcctcctgggtgatgagaaagacagagaagcatttttcatagagagttgccaggattgctcagcatccagatcaaccatgaaaggcaccaggagaatgaacatctgcatttttcttgtccatgattcttctacataatgctactgaagcgaagataatctttaattgtagaaacaagaagagaagcaaatatattactagtatccagaagctccttcacagttttcagataatgctaatgagctagttcctggtttgtatcacaaacttctcccaaattcttcccctaaacattccttcatggtggagctaattagactattgcagctccaccgttcattactgcttgtattttgtaaaaattagtgcatatgtcatgggcctagggatacatccattgcagggaaatgggagtagggcattcccagttttagctataattgaaaattattcttagggacgaaaatgccattgaataattctgccttttctcctcc

SEQ ID NO: 465894 - DNA, 1055 bp, Homo sapiens
caaacagtctcccacatcctccttcccagacttccccatctccacgcctctctgaccacttttgcagcagaaccactattttctaggttagcagttctcaactgtgggtgagtttgccccttggagacatttgttgatgtctggagacattttttttttttgtcatcacaactaggtgcatgctgttgacatccagtggccctgctggaattcattaacctagtttcaggctctgtatgttgggactgatgaagcaatcctgaagatggttcctctggcatctcagcttcacaaattatgcacactcatttgagatactgattcctgaggcctgcccaggctccccggtgccacggtgtgtcttcctgtggaggaaatgaggctgacacaacaggcagaaggctccaacacaaagggttgatgatttatttgcatttctgcaaaaataaaagtgaagtgcagttaataacagatctgtctgatgacattcccacaaaaagggacaagcactcggtggtctttttctctgccctaattcagctgtgctgtaaattcttgttctctgaggaaactccaaggagcatgaccgagattttctttccttttcccttctgtgatgtgcacctgagcattttggatgcctgtaccccagaactaactagccacagtgaacatgcccagcatcataccctacccagctcccccgccaggactgtccactccagctcctgcgtgcacccatggctctcctttctcttcagaacagccttccaggctccatggacactgaccttgacctcatatgcacagaaaaggctctgggagacagaagtaactataagtggcttcagaatggcctttttctgcagtagaaaggaacctgctgtgccccaagttctattcctggtgccatactcttctgctcctttaagaattaaggaagtaggaactgtctcatctctgtatagctacataatagaaagcaattatttttgcaacttactttcttcatcagggtattacatgaatgagcactcggtaccatttatttagga

SEQ ID NO: 465895 - DNA, 873 bp, Homo sapiens
cgccatcttggttttggtgggttttggacagcttctttacgcatgctgttttatcagcaaggtctttgtgacctgtatcttgtgccgacctcctatctcatcctgtgactaggaatgccttaacctcctggaatgcagctcacatgccagaaactatacaatccaccccctctgaaggagtttgttcatttaaaaaaaaaaaaagggaaatttgggtgcagacaggcacacagggagaacaccatgtcaacacgaaggcagaagttggagtgatgagtctacaagccaaggattgccagcaattcatcagaggccaggacagcagcctggggcagccccctacatggtaccaactccatcaacaccttgatctcagacttccaacctccagaactgccagccctccatgaatgaggaacttcctggggccactagtgcatgctgcagctcacacagtcaactccatccacacctccacaaacagctgccctttggccactactcaggcgtaaggacacacccagcagggtatgccctctggaggtcagaccagggaagaagcccttgcacagtcaggagccagctcagcacctgtgatgctgaattctatgtggcaacttgactggacgcaggtgctcggattaaacctgatttctgggtatgtctgtgagggtatttccagaggagattagaatttgaatccgtggattggcaaagttggtgtctgccccagtgtgggtggtcaccatctactctcctgagggcctgaagagaacaaaaggcaaaggaaggaggaattcgcccttaacttgcttgccgcctgcctgcttgagcagagacatttcatcacatcttctctggccctcgactgag

SEQ ID NO: 465896 - DNA, 1443 bp, Homo sapiens
cgccatcttggttttggtgggttttggacagcttctttacgcatgctgttttatcagcaaggtctttgtgacctgtatcttgtgccgacctcctatctcatcctgtgactaggaatgccttaacctcctggaatgcagctcacatgccagaaactatacaatccaccccctctgaaggagtttgttcatttaaaaaaaaaaaaagggaaatttgggtgcagacaggcacacagggagaacaccatgtcaacacgaaggcagaagttggagtgatgagtctacaagccaaggattgccagcaattcatcagaggccaggacagcagcctggggcagccccctacatggtaccaactccatcaacaccttgatctcagacttccaacctccagaactgatcacagtctggaagtctgctcacagtctcaaggttggcatatcccctagagcccccagactcctcatcccatggagaccaacatggccaggggagggccagagcagggccttctaaatcacagaccccagggcaggagcccctccggtctggatctaaggatggtattttcaacaattcctaaatttttatcctaggctctccaaatgggagtctaaaggtctcaaaacatggtccagaagaagtatgcaaaaatgtaaattcctaggccccaacccagacctatgaatcagatgatctgtatgggggttcaaggaatctatattattaaacaatcttcctaaatgacttatgctctcgttcatgtgccccctttctctctctctctctctcgctggttcactctctctctctctcctcctgccccccattagtgaagacaggaggaaaatgccatcacttctcctgcctaattccatgatactcctgaagtccaaacaccccgacatggaaaatttgagtggaaaatccctcttgatcaagtcagcaaatctcctgccaaacaaattcttcccagtctttgaaagatccaatccccctattctggacacctttggcaggaatgaagaggggactctgtatgctcctgactggagcccaacctaccaatccccagccttcacactccacaccactatcctccttgagaccaccaagatcaacctcagcatgctccctaaccttgtttatgtcaacacaagaagcccaggactcccagatggcctcacagttccggccaactgggtgaatccagggttaaaaatggccacctacttttcatggggcccactcgacagctcagttgtttggaggtatagtgcttgcagaaccaaggtcacagatgatcagagttggactggggggcctcagaaggccccatctggctctcagatttcttgtcaattcagcgggaattcctggagcatctcggggctgcaggaggactcagcactgttggaagagttcgttgctggtaactagcacagt

SEQ ID NO: 465897 - DNA, 1253 bp, Homo sapiens
cgccatcttggttttggtgggttttggacagcttctttacgcatgctgttttatcagcaaggtctttgtgacctgtatcttgtgccgacctcctatctcatcctgtgactaggaatgccttaacctcctggaatgcagctcacatgccagaaactatacaatccaccccctctgaaggagtttgttcatttaaaaaaaaaaaaaggatcacagtctggaagtctgctcacagtctcaaggttggcatatcccctagagcccccagactcctcatcccatggagaccaacatggccaggggagggccagagcagggccttctaaatcacagaccccagggcaggagcccctccggtctggatctaaggatggtattttcaacaattcctaaatttttatcctaggctctccaaatgggagtctaaaggtctcaaaacatggtccagaagaagtatgcaaaaatgtaaattcctaggccccaacccagacctatgaatcagatgatctgtatgggggttcaaggaatctatattattaaacaatcttcctaaatgacttatgctctcgttcatgtgccccctttctctctctctctctctcgctggttcactctctctctctctcctcctgccccccattagtgaagacaggaggaaaatgccatcacttctcctgcctaattccatgatactcctgaagtccaaacaccccgacatggaaaatttgagtggaaaatccctcttgatcaagtcagcaaatctcctgccaaacaaattcttcccagtctttgaaagatccaatccccctattctggacacctttggcaggaatgaagaggggactctgtatgctcctgactggagcccaacctaccaatccccagccttcacactccacaccactatcctccttgagaccaccaagatcaacctcagcatgctccctaaccttgtttatgtcaacacaagaagcccaggactcccagatggcctcacagttccggccaactgggtgaatccagggttaaaaatggccacctacttttcatggggcccactcgacagctcagttgtttggaggtatagtgcttgcagaaccaaggtcacagatgatcagagttggactggggggcctcagaaggccccatctggctctcagatttcttgtcaattcagcgggaattcctggagcatctcggggctgcaggaggactcagcactgttggaagagttcgttgctggtaactagcacagt

SEQ ID NO: 465898 - DNA, 2642 bp, Homo sapiens
ccaggggtgcaaactccagtggccccggggcaagcagactcttctgcaccatggagccagagccagtccagcccggcatgcttatcgatgtctgcaagtacctgggctccctgcagtaccgcgtctggaagaagatgcttgcatctgtggaatctgctgatccctctgccagtccctcgcaggcaggttcctgtaccctggtcttttccactctgcccaacacctccaaccctcctggacacaggtcatattggattggggaccctcctccagtcttcatcttaactaatatgtgtacaaccaccccattcccaaataaggtcacactcggaggtaccaggggttgggactgccgcatatcttctgggggatacagcccaacccctgccaccactccagccctgggccactccttgcatggacttggggccagctttgaccccaacaccgcagctggctggctctccgtgtctgacgacctcaccagcgtcaccaaccatggctaccgcgtgcaggtggagaacccggaacgcttctcctcggcgccctgcctgctgggctcccgtgtcttctcacagggctcgcacgcctgggaggtggcccttggggggctgcagagctggagggtgggcgtggtacgtgtgcgccaggactcgggcgctgagggccactcacacagctgctaccacgacacacgctcgggcttctggtatgtctgccgcacgcagggcgtggagggggaccactgcgtgacctcggacccagccacgtcgcccctggtcctggccatcccacgccgcctgcgtgtggagctggagtgtgaggagggcgagctgtctttctatgacgcggagcgccactgccacctgtacaccttccacgcccgctttggggaggttcgcccctacttctacctggggggtgcacggggcgccgggcctccagagcctttgcgcatctgccccttgcacatcagtgtcaaggaagaactggatggctgagctggcccggggctgccccggtcttctcatcatgtcccaggaagtggcatcataaaaggaaatatttttttttcctaggagcagtgttaaaatttgggtcacattcctgaccaaggacagcatcctgccttttggccatccccttcagttcacaaaagctgacattttaaacaaatcatgactcacacgtattaattggttataaatatgttgtgtacactggttagataaaacttaaggccacaaggagggcccagaacgaagatgacaatatctacctcaggcacttgtggggattcgatgaggaaaatgacggtaaaaatgccaagtattgtgttctaaacctaggataggattaatacacattggtgaattcttcagaaatgggagattctgaatatataaattgtgattcccaataatgacaaatcccaaagaaaagtgagagattgagaaatagaagttacctgttttgggagtcttccgatttcttcagatttttaacaagaacgtttgcataaaactcatgttcatgaaaaactttcagtagcatgagaaaatggttatgttgtaagaaccaaaaaaataggattcaaagcagtaagtacaggcatgcagcgtactcacaacaagacaagcaggagcctgtctttaatttgtgttgtttgattagataatctgtttacatggctgtgaattccaaaggtacaaaatgtactagaacagtctgtctcctttttctgcccaaacactcagcaacccccctggtaggcaatatatattactagtttttttcaaacttcccagagatattttatgcatagcacatatcctgttgatgggtatattctgttcaccccaatacattataatttagagcagacaactctagctctcatccctaagcaacccaaccaaagaggcaaaaaccccaaagatgttactaaaatccttttctctcaagggggaggtttgtacgatgttttcattcagtccattcagtggatagattttactttttgttcgtgtttaaatatttcaccttaaggttttaaaacaaagagaaaaagccaagcagaaaccttaaagctgagacctcaatatacatgtcgcccaggctgaagtgcaatggtgtgatctcagctcactgcaacccccgcctcccaggttcgagcaattctcctgtctcagcctcctgagtagctgggatgcatgtgccaccacacttggctactttttgtatttttagtagagatggggtttcgccaggctgatctcaaatccctgacctcaggtgatccgcctgccttggcttcccaaagtgctgggattacaggcatgagccactgtgcccggcctcaatgtgcatttttaaaatctcaattcattagaacccttacaaaggtttctagtggttaagaggctgggataccagattggacaacctggacctaaaaccctgactgaaccactgtctgaccttgggggagttacttaacctctctgtgccttagtttcatcgtgaggaaaatgaagatagtaagagttcctacctcacagggtggatatgaggttaaatgagcaaatgtgtgaaacacttagaagaggatctggcacagttgagagtttactgttgtctta

SEQ ID NO: 465899 - DNA, 1498 bp, Homo sapiens
agcggagttactcattttgactcgtttggacaagtgagttactacagcgctgatttggaaaaatgactagaaagctacctccaatttctcggcctcaaccccagcctcattttctttctgttccttcccgctctcgtcttccagccctccttccccccgttactcctcaaacttcctgccgtcagcctcctctccagagccgtccaagttgttcgattttctgccctacccgtttgcccaagctgactaatgtcgccccttcccagtaccctacctcaaggaacttcctgcccggcccttcctctgttactaccagggcgtccgtgtgccgccgccctgttcgtcaggcacccctttcccggtgtccccctatctttccccctcaccctcctcatagcccttctttctagtcccctgtactctagtccccactccctatccagccacccccaaccagacctgacggcttgcaaatctcaccctggagaaatggtttccctcctactggggcagttcccaggcggtccagaattgccaggacttgtggattcccagcagcgacctggcagacacggggaatccaagaccatggcaagcgaacattcggcctggcctgcgcctttcctctcctgcctgggcagccagactgcacaagcctctgcatttgaactggcttctccgtggaacttggtttgtaaccacggagcaaactgcaggaccaggggcagagaagttgatggcgagcctttttcctggcagtatccagaggcggttctagtaaagaggctggattccgagaggccagagcggtatcatacgaacgccgttgcctggagacggagtggggtgccattgcctagagactgcagaaggcccgcagccaagcgagtgagagccccggacccacggagcagccccaaggctatggcgggacacccgaaagagagggtggtcacagatgaggtccatcagaaccagatcttgcgggagctgtacctcaaagagttacgaacccagaaactccacacgcagtaccatgtgaatcccctgcgcaaggttcacaggattacgaggaagcctatgtcttggcatgataacctggaggaacccgcagacgccaggtttctgaatctcattcaccatgctgcccaggggccaacgaagaagtacccggaggcacagactgaaaaccaggaaattgggtgggactcagaagccttggtcgacccagaacgccgtgaccacaggatgaaccacttcagggtctacagtgacatcactctgtacaaagctaaaatgtggagcttgggagaagatgatcgccacaatgactaatgttagcattttaaaccatttgtttttaaaattaataataaattgcatatatttattgtgtacaatgtgatgttttgaaatacgtatacattgtggaatggttaaatcgagtatctcacatacttattttgtggtgagaggacttaaaatctattctcttagc

SEQ ID NO: 465900 - DNA, 747 bp, Homo sapiens
ccaaagccccagttgatagtggaaaagagaagttgattcccttgcttcagggtccttctgacactaaagaccttcatagcaccaagtggctcaatgagagtagaaagccagagtctctcttagctccagatttgatggccttcacaatccaagttccacaatatattgactactgccacaattccggtgctgtacttctttgcagtatacaaggactagcagttaatattgacccaatcttatatacgtggctcatctatcagcctcagaaacgaacaagtagacatatgcaacagcagcctgtggtagctgttcctcttgttatgccagtttgtagaaggaaagaggatgaggtgtctattggaagtgcccccttggcaaagcagcaatcatatcaggcctctgaatatgccagcagccctgtaaaaacaaaaacggtaacagaatcccgcccattgtcagttcctgttaaagccatgttgaatatatctgaaagctgtagaagtcctgaagaaagaatgaaggaatttattggaattgtttggaatgcagtgaagcatctcacactacagcttgaagtacaatcttgttgtgtgtttattccaaatgatagcctgccttccccaagtacaattgtatctggtgacattcctggaacagtaagaagttggtaccatggacaaaccagcatgccgggaacacttgtcctctgtttgcctcaaataaagattattagtgctgggcaca

SEQ ID NO: 465901 - DNA, 750 bp, Homo sapiens
ccaaagccccagttgatagtggaaaagagaagttgattcccttgcttcagggtccttctgacactaaagaccttcatagcaccaagtggctcaatgagagtagaaagccagagtctctcttagctccagatttgatggccttcacaatccaagttccacaatatattgactactgccacaattccggtgctgtacttctttgcagtatacaaggactagcagttaatattgacccaatcttatatacgtggctcatctatcagcctcagaaacgaacaagtagacatatgcaacagcagcctgtggtagctgttcctcttgttatgccagtttgtagaaggaaagaggatgaggtgtctattggaagtgcccccttggcaaagcagcaatcatatcaggcctctgaatatgccagcagccctgtaaaaacaaaaacggtaacagaatcccgcccattgttcgttccatttcaatggaacgaacaggctcctctagagggatatgaagcaccgccaggtcctttgagttttaagctgtggctcgtagtgttctggcgagcagttttgttgatttaactgttgaggtttagggctaagcatagtggggtatctaatcccagtttgggtcttagctattgtgtgttcagatatgttaaagccactttcgtagtctattttgtgtccactggagttttttactactcaggtgagttttagctttattggggagggtgatctaacactcttacgc

SEQ ID NO: 465902 - DNA, 1154 bp, Homo sapiens
cctggccgagaagctccaccgctgtagccaacgaggccaggctttatttcagtgaataaagatgaaacagctgctttattgtccagctcagccctcatgcattcaatagaggatcataatattttccagctttctctaactagttatttttctgtgctttctgaatatgctatggatatcttttgtcagacaaaacgtagagattttcagtattcttcaaaaaagttggactatccatattaacatgtacataatcagtttgtaaaagtatgtttctaaaaacataaggattttttttataaggatccattttataaggataactttataaggatacttttccattttttgaaaacataattttcaaagtgaattttaattttaacttgctctttccatattattttaatacttcttactaaaacttacattttctgggtacttacaggctctttggttttcactcagaattttaatttaaaatttaagtggataagcattgctctgtgtgtgcatgtgtgtctgtgtctgtgtgtgtgtgagagagagagaaaaaaaaaagcggggctgtggggacagatgagggagggagagattgattgatttacaataatgaagtctcagccccaacttgtgaaggactgtcctcagtattgccatgtttaacctttgctgcttaagaaatagtgaaaaactaaaaactaaaaaggttttcattttgtctctttccagcagcctgtggtagctgttcctcttgttatgccagtttgtagaaggaaagaggatgaggtgtctattggaagtgcccccttggcaaagcagcaatcatatcaggcctctgaatatgccagcagccctgtaaaaacaaaaacggtaacagatcttcctccatccctttattttgagcctatgtatgtctctgcacgtgagatgggtttcctgaatacagcacactgatgggtcttgactgtttatccaatttgccagccagtcaaactagaacccaggattaagaaactcactcaaaaccactcaactacatggaaactgaacaacctgctcctgaatgattactgggtagataatgaaatgaaggcagaaataaagatgttctttgaaattaacgagaacaaagacacaacataccagaatct

SEQ ID NO: 465903 - DNA, 562 bp, Homo sapiens
accataaggaagacaaaatactatataggacgaaagtagatcattcttgaaggtcttcatgttgaatagtagactgaggaggaggaagaggaggggttcgtcttgtctcagaagtggcagaggtggaagaaaatccacatcagcctgtggtagctgttcctcttgttatgccagtttgtagaaggaaagaggatgaggtgtctattggaagtgcccccttggcaaagcagcaatcatatcaggcctctgaatatgccagcagccctgtaaaaacaaaaacggtaacagatcttcctccatccctttattttgagcctatgtatgtctctgcacgtgagatgggtttcctgaatacagcacactgatgggtcttgactgtttatccaatttgccagccagtcaaactagaacccaggattaagaaactcactcaaaaccactcaactacatggaaactgaacaacctgctcctgaatgattactgggtagataatgaaatgaaggcagaaataaagatgttctttgaaattaacgagaacaaagacacaacataccagaatct

SEQ ID NO: 465904 - DNA, 650 bp, Homo sapiens
gaaaaagctgtgttgatagcaaaatgcttctcgtaggactccaaaatcattatgatgttggtctagctaaggtcctcaacctctgggccgtggaccagttccattccatggcttgttatgaactgggccacacaaaaggaggtgctgtacttctttgcagtatacaaggactagcagttaatattgacccaatcttatatacgtggctcatctatcagcctcagaaacgaacaagtagacatatgcaacagcagcctgtggtagctgttcctcttgttatgccagtttgtagaaggaaagaggatgaggtgtctattggaagtgcccccttggcaaagcagcaatcatatcaggcctctgaatatgccagcagccctgtaaaaacaaaaacggtaacagaaattaccactgatgctgaatatcttttataaattgtttgcatgcaccctcacaacttttactatttccatagcatattcttagaaatcggattattttatagaaaaaagcatacctattttccccatatataaaacattctcacaagaggcttcaacaatgacaaatttcataggtatacaacttaactctttaacatgtttccagtataacagatgaaaagtatgtctggtttgattgcactgtggtct

SEQ ID NO: 465905 - DNA, 718 bp, Homo sapiens
ccaaagccccagttgatagtggaaaagagaagttgattcccttgcttcagggtccttctgacactaaagaccttcatagcaccaagtggctcaatgagagtagaaagccagagtctctcttagctccagatttgatggccttcacaatccaagttccacaatatattgactactgccacaattccggtgctgtacttctttgcagtatacaaggactagcagttaatattgacccaatcttatatacgtggctcatctatcagcctcagaaacgaacaagtagacatatgcaacagcagcctgtggtagctgttcctcttgttatgccagtttgtagaaggaaagaggatgaggtgtctattggaagtgcccccttggcaaagcagcaatcatatcaggcctctgaatatgccagcagccctgtaaaaacaaaaacggtaacagatcttcctccatccctttattttgagcctatgtatgtctctgcacgtgagatgggtttcctgaatacagcacactgatgggtcttgactgtttatccaatttgccagccagtcaaactagaacccaggattaagaaactcactcaaaaccactcaactacatggaaactgaacaacctgctcctgaatgattactgggtagataatgaaatgaaggcagaaataaagatgttctttgaaattaacgagaacaaagacacaacataccagaatct

SEQ ID NO: 465906 - DNA, 1404 bp, Homo sapiens
aagaaagggaggaggagccgcgctcgcccggacagtggagacgcgccttctcggctctggtccgcgccctggggccctggcctccctggaggggctggggaactggaagctgggccgagagagttcccgctgcagctatcgcgcagtccctcctgcgcccgggcgcccccagcgggttccgggaggcgcccggtgagcccacgtctgttgcggcggagcgagcgcgctccgggagggccgagagccggcggggctggcaggagctctcgggcgcccgcctccctccttcgcggacggtctcccgacacgccggctgagagcccttttcgactgtgagctgcggcagctgagcagaggcggcggcgcgggacctgcagtcgccagggattccctccaggtgacgatgctctggttctccggcgtcggggctctggctgagcgttactgccgccgctcgcctgggattacgtgctgcgtcttgctgctactcaattgctcgggggtccccatgtctctggcttcctccttcttgacaggttctgttgcaaaatgtgaaaatgaaggtgaagtcctccagattccatttatcacagacaacccttgcataatgtgtgtctgcttgcatgagccaactagatggagcaatctgacacaaaacccagggttttatgactgacctagtgcgccagctgcatctggaggaaccagacgcaaacaacgcagagttgagggccaggtgaagcgggatccagctccccacttcaccccaaccccttcgactcctcaaaacctctgcaagaagctatttccttcggctggcaacttacagccagcaggtcccttcctcgtgcagaataaagccattctgggaaattttaatccattgcctaaaaccactggtatgctgatagtttccacatctatgttcccacacccccacctgcagtccagctgcatctgtccacgtgtctacctggtgtctccaccaaaatcttcccgtggcttctcctctcacccggaatccagcttgaagaataaccactacctacatggccctgcgcgctgcggctccggacgccatcttggcctcagctcccaaagcaccttcccctctcaccgtgctccagctgcgcgctgtgctcctccttactcctacgggatacccaaccccctctccactggagctttgctctttccagtgcctggagcacacatatccaatatattgacagggaggactgcaggatccagctctaaagctgatcggcttttcatcccggggggacctttgaaaggctctgtgattgctggtggtcagggtcaattgtgcagatgtctttaagagtgtctcactggtgaccagaaagttactttgtcaaaatgacagatgggctgtgagcggct

SEQ ID NO: 465907 - DNA, 1303 bp, Homo sapiens
aagaaagggaggaggagccgcgctcgcccggacagtggagacgcgccttctcggctctggtccgcgccctggggccctggcctccctggaggggctggggaactggaagctgggccgagagagttcccgctgcagctatcgcgcagtccctcctgcgcccgggcgcccccagcgggttccgggaggcgcccggtgagcccacgtctgttgcggcggagcgagcgcgctccgggagggccgagagccggcggggctggcaggagctctcgggcgcccgcctccctccttcgcggacggtctcccgacacgccggctgagagcccttttcgactgtgagctgcggcagctgagcagaggcggcggcgcgggacctgcagtcgccagggattccctccaggtgacgatgctctggttctccggcgtcggggctctggctgagcgttactgccgccgctcgcctgggattacgtgctgcgtcttgctgctactcaattgctcgggggtccccatgtctctggcttcctccttcttgacaggttctgttgcaaaatgtgaaaatgaaggtgaagtcctccagattccatttatcacagacaacccttgcataatgtgtgtctgcttgaacaaggaagtgacatgtaagagagagaagtgccccgtgctgtcccgagactgtgccctggccatcaagcagaggggagcctgttgtgaacagtgcaaaggtgattgatgtcttggccgtcttctcttctggctgctgcttcaggcatttttatttctctttctctcaccttccttttcactcagcttttggctggggtgcacatgggtggggaggagaagtagggtgtgtgtgtgtgtgtgtgtgtgtatgtgtgtgtttgtgtgtatgtgtgtatctggggctggaaggaagggggctctcctggaggagggatgaaagtatgtgagcatcttcatatttggtttgttttctaaggcaggttgttaaaatgtcgtagagaagagtcaaccaccatgcctctgcatatttgtacacacacacatgagcatattttgtcaacaagtttcaacactcagtttttccaggctccacactcaccctgcccacctctgccagagaagtctttaagcctgtattttatcattttcgtcctcattaaaattttcctttccttccaaattagatctaagtccctccgcctgtctttgaagcatctctaacatctccttactccagcctcattttccatcaccctccagccacatgctccttctggaatgtgctgttcctagtctcacc

SEQ ID NO: 465908 - DNA, 1708 bp, Homo sapiens
gatgaatgtgagaacacttgtattacccccaagacaccccgtgctctttagacctcaccatgcacccagaccccgtaccctcagccccagcaacccctaatcttcttcctgtctctgtagatttgtccacttctgtggacgtgtcctgtagacaggcacgacactacctggcctcctttgctgtccttgttgcaatcacttttctgcagtgccagtgcctcctgggaatcctgcttgcgtctttgggcagattccaaagggaggcggcccttgctacagctgcacctgcctcctccatcaccacctgcctcctccatcaccacctgcctgtcacctgggagtcaggcccgctgccctggaggtggggtcaaaccagtgccaaagtcacccaggagccagccagggcctgggagttctccctcatgacacgccggcagcaggtgaacattctaaggctgacacttctgggcattcgctgagatcttgggaaagaactagccccccggccctgctttcacttagagatgggaacaacgattgccctgagttcctgggagctacaggagaaatatgcgccctgagttcctgggagttacaggagaaatatgcacggtgtgcttggcctgtggcaccagagctttagggcactggtctttcatcgctggccatgaaacagcaaggctttgaaaggaaggtagatggagtgtgcaaaccttgtgggaatctttgcttcttggcaaaagaatgaataagtgaatttggtcatggagaaaattgcatgctaggggcatgtttgtaactaccgtctgtgtttgtagtaaagcactcgataagtatttgccaaaagaatgaccaataaatcaatacagctcttaaatttttcaagccaatttgactttatgcaacttttgaagctctttcacagataatgaaacaaaggcacaaagaaattaagtcatacaagggccttggagagcttattgagcaaatattttgtgttttatttatcagttctgactaggattttataatttactcctataacttccatatattttccttttctaatgtattttctagattgagtctcatgaatattgaattttcattttgaaaaatttggatctgtctacacatatgaaattcaacccattaggcattcttataatttaaacaaatgttcttacataagaagagtaatacatttaagatatacctttgtcacaatttctgaactctacctaatgaaaattctctttcatgtttggaatattttccacttcaagtgcattttatccacataatgaggttcataattcattctttaatatttttattttgtacattctatgtatattatgcatgcatatgcacaaatactttattggtctccagattttattcactggcatgtcattttaaataaaaattggaaagtaaatgaaaataaatctatttacttagctaaattaacattaatacaagatacaacaaatctgcaaagattttcttcatccacggaaacgaggccctgagcattttcaaatgttgaggcttttcaaactctgctagttactgtgttagacagttgattcatgttcaagtaccttataccctcaggacttgccctgatatcttaaatgcaggcattgcaatgcattgctttgttactctacattgtaattgtctttgagccctccagtaggac

SEQ ID NO: 465909 - DNA, 809 bp, Homo sapiens
ccaacattagaacaatgaccttcaaaggaaatcagtctataagttcagatgtggataggtttgtaaatttagtattgaatgtaaatactgtcttcataatgtttttacttcagcgaagtaagaagcagggtcaccagctgatattaaggaaaggtgagatgttgaaggttgaggagaaaggaatgtccctgtgtccccagctcattaagcagagaagaaagtccaagacaaacagtgtaaaggaaaatgtcaacaataaagtcatcactggtgggacctcaaggcagcagagtggaatcacaactagatcctgcaatgtaactaatcaaaatcttatgaatttttttttacaaagcagaaattccatacgttttgacccacgaaggggagagcttcagcacatgaaacagattcgtctggagtaataggaagtatgtccaaatgagggaggaggcatccaaaaggacaagacctgctaagcactctgagagcatcgtctacacctgctgcttccagatcatcatctcccagttgttcccagcagcccagcagtctgacttccatccctaccatcccaacagaactgccctcgccaacctcctccacatgcaccatggtccgaagataatgaacactgctcaggactcgcctaactgggacaaaattgattcctatctggacgtgcagccatgcatgtccacgtaattatggataacagtgcagtgtcaccttagcaacaagtgatcagtctttcatttagaagccacagtttggctagggtaaatgttaatgagaggcttctaatggag

SEQ ID NO: 465910 - DNA, 1735 bp, Homo sapiens
tgtaagacgtgcgtttcactttccaccgtgtgatgcctccctagccacgtggaactgaagatgagtgcacctgcactgtgccggagtcccagcctcaagctcaacacagaagctgcaaagagaggctggtcctaaaatatgacattgtgaaaggaaaatatcttgaggccccaaaatcactaagctaaagggaaaagccaagctgggaactgcttaaggcaaacctgcctcccattctattcaaagctacccctctgctcactgagataaatgcatatctgattacctcctttggagaggctcatcagaaactcaaaagaatacaaccatctgtctcttatctatccattacctgaaagccccctccccgcttagaattgtcccgtctttccacactgaaccagagttcatcttatgtatcttgattgatgtctcatgtctccctaaaatgcataaaaccaagctgtgctctgaccaccttgggtacatgtcgtcaggacctcctgaggctgtgtcacgggtgcatgtcctcaacctcagcaaaataaactttctaaattaactaagacctatctcaggtttttgggattcacaacataaatatggataaccaatggattagaggaaccacacgttcggacaatcttagaaagatcttctgcaaccatgtcttgttgctgtttgactccagggcactgacgtgagaggtggtgagaaaggagtgggcagagaagccccagaaagactgaggttgattttccagctgatattgcaggatggaggcgcagagagggaatgaatttatttatttatttaattgatttttttttttttttgagacggaggcagtccacgtatctgtcctcaaagatcaccggcagggtgttccaatcgccgtcgatgtccaggcactctgcaggcagcgggggcatgctagtgaggtactccgagttccggatatccagggacagctggctgtgcgtctgtatcctggggagcacatggcaggggagctctgcaagagtggttcagacggctgaggctgcagcaggaaggtcccgagcactttttgagtctggactctatgtgggcaatgaggaagcagtgaagaccaatgggccaagaagggccacagcctcatctatctttggtgcagcattcaggctgtgtctggcctcagggcctttgccctggctgttacctccacctgtaatgcactgtcctcctgggctgcttcccaccctcagacctcagtttacctgagtccgggcttatgctgtcggactgtaaccctgactccaggaatacagaacgaaagcataagaacacttctgttttagaggttcaaaaatctgcatttcactttatttcttatcatgtgttctttaagatgatggctcaacagtgcacagagaagccaaagcaaggaggttatgagtgtggcctctgggctccaacagatccatgcttgtgtcgcttgctggctgtgtggtctaagataagttacttaacctctctgagcccaggtttccctagtttcttcttctttaaagtggggagaataatagtacctacctcatagagttcatgtgaacattaaacgagccaaagcatgtaacgcactcagtttctgatcagagtagtttcaatagactaagcaccatgaataaatgcctatttattggcaccaggtaaaatgcctattgtggtcaaccctacggacatagcatctctt

SEQ ID NO: 465911 - DNA, 3880 bp, Homo sapiens
gaagaaaaaagaaaaggaaaagttgggtgaatatcgtaatttaccctctgctgagactctaattgataatgcacccattgtctggcatggcaaatctctaatcaggaaactgtcctgcctttctaggaagccgctctgtgacccacctctgaatcccacaaaactgcaccagagagccgggcgcaagatgaaccagcaccctgtcggctcaagatgcaccagaccctctgcctgaaccccgagagcctgaaaatgtctgcgtgcagtgactttgtggagcacatctggaaacccgggtcctgcaagaactgcttctgcctgcggagcgaccaccagctggtggccggccctccccagcccagagcgggcagcctgccccctccaccgcgcctgcctcccaggcctgagaactgccgcctggaagatgaaggtgtgaacagctcaccttactccaagcccacaattgccgtgaagcccaccatgatgagctccgaggcctctgatgtgtggacagaggccaacctgagtgccgaagtctcgcaggtcatctggagacgagcccctggcaagctccccctcccgaagcaggaggatgcccccgtcgtctacctgggcagcttccgaggtgtacagaagcctgctggtccctctacctcccctgatggcaattctcgctgtcccccagcttacaccatggtcggcctgcacaaccttgagccccgcggcgagaggaacattgccttccacccggtgagcttcccggaggagaaggctgtgcacaaagaaaaaccctcatttccttaccaagaccggccctccacccaggagagcttccgccagaaactggctgcctttgctgggaccacatctggctgtcaccagggccctgggcccctgcgggaatccctgccctcggaggatgacagtgatcaaaggtgctcgccctccggggacagcgagggtggagagtactgctccatcctggactgctgccctgggagccctgttgccaaggctgcctcccagactgcaggttcccggggcaggcatggtggcagggactgctcacccacgtgctgggagcaggggaagtgttccgggcccgcagagcaggagaagcggggcccgagcttccccaaggagtgctgtagccagggccccactgcccacccatcctgcctgggccccaagaaactgtccctcacctcggaggctgccatttcttccgacggcctctcttgtggcagcggcagcggcagcggcagcggcgccagtagccccttcgtcccccacctcgagagtgattactgctccctcatgaaggaacctgccccagagaagcagcaggaccctggctgcccaggggtgacccctagcagatgccttgggctgacgggggagccccagcccccggcccacccccgggaggctacacagcctgaacccatctatgctgagagcaccaagaggaagaaggcagctccggtgccttccaagtcacaggccaagatagaacatgcagctgctgcccagggccaaggccaggtatgcacaggtaatgcctgggcccagaaagcagcatctggctggggccgggacagcccagacccaactccccaggtgtcagccaccatcacagtcatggcggcccacccggaagaggaccatcggacgatctacctgagcagccctgactctgcagtgggggtgcagtggccacgagggcctgtgagccagaactccgaggtaggtgaagaggagacttcggctgggcaggggctgagctccagggaaagccatgctcacagtgccagcgagagcaagcccaaggagaggcccgccattccccccaagttgtccaagagtagccctgtagggtccccggtgtcaccgtctgctggagggcccccagtgtcaccgctggctgaccttagtgatgggagctctggcggcagcagcattgggccccagcctccatcccaaggtcctgctgaccccgctccttcctgccggaccaacggtgttgctatcagtgacccatccaggtgtccccagcctgccgcctcgtcagcctcggaacagaggcggcccaggttccaggcaggcacctggagtcgtcagtgccggatagaggaagaagaggaggtggagcaggaattgctgagtcacagctggggaagagagaccaaaaatggccccacggaccattcaaactccacgacctggcaccgtctccaccccacagatggctcctctgggcagaacagcaaagttgggaccgggatgagcaaatccgcctcttttgcctttgagttccccaaggacagaagtgggattgagacattctcacctcctcctccgcctccaaagtcgcgggtctgagattccatcttgacattcatttgatcgctaaatattgaagacttcttttaggtggagccgtgaccatacattggtaggaaaagtacagattgcttacgagatgattttggcacacttgttgactgtatggagaaaacaaaaaaaaaaacaacattgaaatcctgccatatagtgtcatatagtgtatgtaaaagtggactgcagatggaataatgatccaaatgagaaaaataagaccaaaaagcaaatttaaaaacattcacagcatttttaagaccctagaagaataagccataaaatgatggctttgacttcatcaaattaaggatttctgttgaactgaggatgccatcagcagttaatagatgggtgagaaattaaagcagtgtatcaaagactgacaaggcattaacatgtaaggtgctcttgtaattcaagcagaacaatatgtggaaaccagtagaaaaacaggcaaaaacatggataggcagttaacaggagggaaaagctaaatgcagggcaagaatttgaagagctacttaacttcattaataatcagagaagcataaaacagtaaaatagcacattatgtccatcagattgatgacaattacaaagtgggataattccaaatttcagcaaaaatacaggaaaatggctattaaacagctgttaaattaagtatgagactacatcttgtccccacaaccttcattcctgagtatatattcacacaggtcagtaaggggacataaacaaggaagtttgtcataacattatagtagcagggagttagagcaagtccaggtattcatctctagagaaataggtaagtaaaatgttatgattatgaaataaactatttaatagcagtcagaagcaatgaactagaaatatgtccagaaacatgggtgaacctcatactggtattgactgaaataactaagagaatgaaatctatagcacaatatacttaatataaattaaatataaacagtttcataaaataacactatgtctgtttttaaggaaagctgcattcttaaccttttatgtagtttttaaaaaatagacatacacataaaatatgtatatatgttacatataacataaaattcaccatcgtaaccattttaaagtataaagtttaatagtagtttccatttgttgtatattaaatcagtctccagggaagtcttttcattttacaaaactgaaactctccacctttaaacaacttcctgtttctcccttcccttagcctctgggaaccaccattactttctgtctctgaatttgactactctaggtacctcatataaatggaatcatccagtacttgtctttttgtcatttgcttgtttcacttagcataatgttctcaagtttcatccatcttgtagcatgtgtcagaatttccttccttttaaaagttgagtgatagtccattgcatgtatataccgttgtactattgtgaaatacatatttggtcttttt

SEQ ID NO: 465912 - DNA, 2338 bp, Homo sapiens
cctccagtgcatctgttatcccatttgtccaattcaattgaacagccagtcaactcagtgcaaggaaaatttgtcgaagcagttgtttggtttatgcttggtttaggaggtccctcgtctgagctggctcactcgcccaccaacagcgggaagaagctctttgctcccgttccgtttccttcaggctccactgaggacgtgtcccccagtggcccccagcagccccctccactcccccagaaaaagatagtgagccgggcagcctcttcaccggatggcttcttctggacccaaggctcccccaagcccggaacagcaagccccaagctgaacctaagccactcggaaaccaacctttcaaaggcagtggccactggcttccggcagcagggctggcgggcaacagaggcggctgcgggagccctggcctccagtgcaaaggggcccccttccgcctcatcctcccagctgagcgtgtccagtcaagcctccaccgggagcacccagcttcagctgcacggtctcctgagcaacatcagcagcaaggagggcacctatgccaagctggggggactctacacccagtccctggcccgccttgtagccaaatgtgaggacctcttcatgggcggccagaaaaaggagctccacttcaatgagaataactggtcgctcttcaagctgacttgtaacaagccctgctgtgactcgggggatgccatttattactgtgccacctgctctgaggaccccggcagcacctatgctgtgaaaatctgcaaagcccctgagcccaaaacagtctcctactgcagcccgtccgtgcccgtgcactttaacatccagcaggactgcggccacttcgtcgcctcggtgccgtccagcatgctcagctcccccgacgcgcccaaggaccctgtgcctgccctgcccacacacccccctgcccaggagcaggactgcgtggtggtcatcacccgagaggtgccacatcagaccgcctccgacttcgtgcgggactcggcggccagccaccaggcggagcccgaggcgtacgagtcggcgcgtgtgcttcctgcttctgcaactctgcaacgggctggagcacctgaaggagcacggtgatcatccatccgggacctgtgcctggagaacctgctgctggtgcactgcaccctccaggccggccccgggcccgcccccgccccggctcccgcccccgccgccgccgcgcctccctgctcctctgccgccccgcctgctggtggcactctcagccccgcagccggccccgcctccccggaagggccccgggagaagcagctgccccggctcatcatcagcaactttttgaaggccaagcagaagccgggcggcaccccaaacctgcagcagaagaagagccaggcccggctggcccccgagatcgtgtctgcttcccagtaccgcaagttcgatgagttccagacaggcatcctcatctacgagctgctgcaccaacccaacccgttcgaggtgcgcgcccagctgcgggagagagactaccggcaggaggacctgccgccgctgcccgcgctgtccctctactcacccggcctgcagcagctggcacatctgctactggaggccgaccccatcaagcgtatccgcatcggcgaggccaagcgcgtgctgcagtgcctgctgtgggggcctcggcgcgagctggtgcagcagccgggcacctcggaggaggcgctgtgcggcacgctgcacaactggatcgacatgaagcgggccctgatgatgatgaagtttgcggagaaggcggtggatcgcaggcggggcgtggagctggaggactggctttgctgccagtacctggcgtctgcggagcccggggccctcttacagtcgctgaagctcctgcagcttctgtgagccaagccccagcctgcaccgtcgctgccccttccctgcctaaccctttcctgtctcgccttggaagcacccatgtctccctgggaaatggtacagatgactgggatacctggatgtaaaatatataaatatatatatagaaaatacatataccatatataaatatgaaagactaaggatgctgttgcccgtccacactcgtctcctctctgcactaagtcctccctgttttcttctgtaattatacacatttccagttccatgcaacgtcctgaggacagttctgtgaactgaatgcagcctggacactggcctcaataccttgtttaggatttcttcacccttttgtcaaattgttatttaaagaaaaaaaaaaaagaagaaaattccattaaaattttttttggttgagtcatga

SEQ ID NO: 465913 - DNA, 1032 bp, Homo sapiens
  misc_feature (4)..(6): n is a, c, g, or t
  misc_feature (8)..(9): n is a, c, g, or t
  misc_feature (11)..(11): n is a, c, g, or t
  misc_feature (14)..(15): n is a, c, g, or t
  misc_feature (17)..(17): n is a, c, g, or t
gctnnngnncngtnnantgaccagtaactacttccatgacgcataaacacatgcatgcgagcttagccactgctccggccatctgcagtggcagacttcttagcccctgttccaacagcacagctctcaatgtccccatcatcaacccctatgccagcagcagctccaccagtctgacaagaaaaatgtctccagatgttaccaatgtttcctgggggcaaaatcacccacatgagaactactcactagaaagaacatgtacattaggaaaggaagtcccgtatactccagtgatgattgaagagaaagaaggaagctgggtgacgaaggatgcactacactattctcaaggaaataataactctctccaatacaagctatggaaaagtacagaaaaggcccagaaacacgcaagttgggctttcagttgctgtgaggctcaaatgagaaaagtgtttatgaaaaggctttgtaaatttaagtgctatataaaaatttagtacacaaggctcattaagcatgtatttatagactatttttgttataagtgctatctatttttggttaggttgtttccttaagttcctgcaaaaggaaaacagcacatgccaacgtcaacacatctttgaaaagttgccaccaacgcttcgcataagaggactactggaagggaagctgaattcagggtcctattagggtgatatttgcgaggcactgtctaacccgagagagtcccgaagcgtcctgcaacaggaagatgccctggacccagtggatggtcaggagatgcgaagtgactgccagggtggcctgggcactcccaacagaccacaaatgttgatttcagaatctttggcactttccaaaatgtggctgagcagtaatttggaagcctaaatcctgactttagaaattcataagaacaaccaatgttttataaactcaacagaaagtaaaataaacaaacccagggttttacgctccttcgtgttatttttatggcaatctttcaaactagttcaaaatgttcaa

SEQ ID NO: 465914 - DNA, 523 bp, Homo sapiens
tgactgaacagttctttgctcagctgatggacttttaaaaatgtatggggtaacttcttttccatacccagatacagtaaaaagacacactcattattttttctagaaggaaaacagcacatgccaacgtcaacacatctttgaaaagttgccaccaacgcttcgcataagaggactactggaagggaagctgaattcaggtggctcttgtgacactccttaacccctgttaaaaaattcactgtaaaatctatactgaattttcctttaaattttggttgctgaatcaaaacttctcaaaagatttgtaaatttcagcaagaagtcagaaattccaactctaaaatgaattttctgactcaatattgaaaataaattcttaagtttagatgcttaggggaaaaacagctggagaattcaggagcctcccatattttaatacaaagtgacgtcattaccatcaaggcttccaagaactccttaaattgtgtggttaagcaacatctcaaagcacggtgatgac

SEQ ID NO: 465915 - DNA, 485 bp, Homo sapiens
gcaggtattaaatgactaatccagatctccagcaccacatcaagaaggaaaacagcacatgccaacgtcaacacatctttgaaaagttgccaccaacgcttcgcataagaggactactggaagggaagctgaattcagggtcctattagggtgatatttgcgaggcactgtctaacccgagagagtcccgaagcgtcctgcaacaggaagatgccctggacccagtggatggtcaggagatgcgaagtgactgccagggtggcctgggcactcccaacagaccacaaatgttgatttcagaatctttggcactttccaaaatgtggctgagcagtaatttggaagcctaaatcctgactttagaaattcataagaacaaccaatgttttataaactcaacagaaagtaaaataaacaaacccagggttttacgctccttcgtgttatttttatggcaatctttcaaactagttcaaaatgttcaa

SEQ ID NO: 465916 - DNA, 999 bp, Homo sapiens
tcaatttccccttttatggcattaaactctcttgaaaaacatagctatgccactcgacagtttctagtcaagaatgagacggaatgtgggagagggatattaaaagccctaatcccctcttctgatgttcgaagaaaggcaagaccagattcttgggagatccagagattaggggcatctgcacagaaagctcataaggacagggaccatatcggtctcaaccccataagtgaccgaggttctcaacatgcttgttggatgagtgaaccagcagactcagacaatgttaaccacacacttgaatctcaaagagtctttggtgcatttaccaaatggcaagaagtccagagtggctgttgggcactgaatgtgagagtgtttagatttgaaactttaagaattaggtggggactatgtcctaaaagactgttctcaatgccaaagactttagacttcatacactgatctatactgcagatcttagaagaagaaaatcaattctacataaatggcaaaagcagtgttccccaagctggggctgacagacccctgagaaaaaagcattacgtgctagtggaggagctggaagttgtggatctccaacactgatttccaatatttggttctcctctgctcctgatcacatgcgaaaattacactttcccatgttgtttcagcaaaacatcatccatcactgtaaattaatgttgttaatattgaacttactgattttgtggttttgatggtttttactttgtgaattatttttattaaaacaagcatatataaaagcatatgaatcgaatcttaaattttagctttgtgcaaattttaatataattccaaataatttacaaataatttaagaaacaccacagccttttaaaggtttaaaattttttttcttaattctaaattcttaatttggaaatatattactcaaatttgaggatcactgaactgtgagaataggaaaagggaggaaaagtcttagtaatc

SEQ ID NO: 465917 - DNA, 1509 bp, Homo sapiens
gaatatttcaaacggattaatgaaagcgcaaaagcagatgtgtgtgtctgtgtgtgtgtgtgtggtgccagcctgtcagtgaggatgcctgatccattgctgtggcctctgtcccaagcttgtgctgtcaatgcaccagtgctcaccaccagctcggcccagaggccccaggagcatgggagtaggaaggcaacaactatcctcatgtcccaaggcaaagccaccctcagtgattccaagataaacacctcttctgagggagacccactgagtcattctaaagggcacagccctaaactggagggcaccctcaggaagcaggaccttatgcagaagtccacacaagccctgaatgcaggtttggggacaatttgtgcagaagatccttgcatcctggtccttggaacatgggagtgtggtatagactccagatatccatcagctgtgcaccttgagctcctcatcctaggaaaatgctatgcacaggcgattgtgtgctcctttgccatgatgtatcttcaaaatgaagatgaattttggggacctgaacatcaatcttggtgtgatgaaagagagaagtagcaattttcctgatttgatgaaaacatctcagattcgctacatgtttagagacataaggtacaaatggtaatgaactcactaatcagaatttggttaagatgcagggggagaagaaagcaacaagataaaaattcaaaagaattaagtacatccttggttaagtgattcaccagggtagagaaatggccttatcaataactatcaagaagatttaagctcagggaaatagagctaatttccactagaataagtgagtatattcagcatcaatgcagggaatataaaaagtcaaagaaatatttaatctagtccaagcagatggcaacagaatgaaatagattccctaaaatagcactgaaagaatgaatattacagcatcttttaatcacccaatggctcacagcacaatgctgggcacagtgaaggtgttcaataaattactgttgattgcctaataccatgtgaaatgtttaaaatattctgaatgttatttttaagaaattttagccagaataattagccatttctgatacttacatattcagaatgactctcttatctccctacagctggcatcaagacttttatattggaggagccaagatggccgaataggaacagctccggtctacagctcccagcgtgagcgacgcagaagagggtgatttctgcatttccatctgagttgtttttcagaaaccccaattcccaccaacttcagatctccattcctaccaacttcagctctgctggtatgtggacatcagagaagggggaactggaaactgaactctgaccatatcattctgtgttctaaatgtcttcctgaggggcctggaggaagttacactcacaagccagagctaacattcttttctgctgaccccaaattttaaaataaagcttctcttccttaaccaattgcaa

SEQ ID NO: 465918 - DNA, 1151 bp, Homo sapiens
ttgagggttaattaagtgttgcttggctccatgcatgggaaatgcccagcttcgtgcaggacttcctcatggaaacttttatcatgttcaaggacctgattggaaagaatgtctatgccaaagattggatggtgatgaatatgactcaaaacagggtttttctccgtgctataaatcagtttgctgaagttctcacaagattcttcatggatcaggcaagctttgaacttcagctctggaacaattacttccatttggcagttgcatttctcacccatgagtcccttcagcttgaaaccttctcacaagccaagcgcaacaaaattgttaaaaaatatggggacatgagaaaggaaatcggctttagaatccgggacatgtggtataacctgggtccccacaaaatcaaattcatcccatccatggtgggtcccattctggaggtcactctgacccctgaagtagagctccggaaagccacaatccccattttctttgatatgatgcagtgtgagttcaatttcagtggaaatggcaatttccatatgtttgagaatgagctgatcacaaagctggaccaggaggtagaagggggcagaggagacgaacaatacaaggttcttctggaaaaactgctcctagaacattgccggaaacacaaatacctctccagctctggggaggtcttcgccctcctggtcagcagcctcttagagaacctgctggactatagaaccatcatcatgcaagatgagagcaaggagaaccgtatgagctgcactgtgaacgtgctgaacttttataaagaaaagaagagagaggacatatacataagatatctgtacaagcttcgagatttgcaccgagactgtgagaactacacagaagctgcctacacgcttctcttgcacgctgagcttctgcagtggtctgacaagccctgtgtgcctcatttgcttcagaaggacagttactatgtttatacccagcaagagcttaaagagaagctgtatcaagaaatcatatcatatttcgacaaaggcaaagcaggattgaatgaatcgttaactacacaatgaacttgatctttagccttccttttgtccctgaagattgggctgatatcgcatggctcacagccctaaccttct

SEQ ID NO: 465919 - DNA, 306 bp, Homo sapiens
ttgagggttaattaagtgttgcttggctccatgcatgggaaatgcccagcttcgtgcaggacttcctcatggaaacttttatcatgttcaaggacctgattggaaagaatgtctatgccaaagattggatggtgatgaatatgactcaaaacagggtttttctccgtgctataaatcagtttgctgaagttctcacaagattcttcatggatcaggcaagctttgaacttcaggtaggcatgtgactcacctacctgcttctagaattcttggccatggcaagagaactatatgaatttggaaaat

SEQ ID NO: 465920 - DNA, 269 bp, Homo sapiens
gttttcccccaaccactcctctgttctccgcaggacttcctcatggaaacttttatcatgttcaaggacctgattggaaagaatgtctatgccaaagattggatggtgatgaatatgactcaaaacaggtgagacagcccatggctggccctgaggcatttgtctgaatacctaaggctgctgtgtgaactttgggaaatgtctttaaatccctttgcctcaaacccatcatctgtaaagtgaggatcttcctgctccagaggtcctaa

SEQ ID NO: 465921 - DNA, 1784 bp, Homo sapiens
tctcaagatttcatgacttgcagtatggagatgagcaaggagctctcaacatctctttcttccctgcccgcctgctctgagcccctgaacctaaagttggcaatgactataaagagatttcatgcgaagtcattctttctagcaataaaagaacaaatataccaaagtaaaggtcagaggaaagtgtttgacctcccttttgggagctgcctctttcgaagtgatgtttatgacaatggatcctcatttctgtacgataactgcacagcttgtacctgcagggactctactgtggtttgcaagaggaagtgctcccaccctggtggctgtgaccaaggccaggagggctgttgtgaagagtgcctcctacgagtgcccccagaagacatcaaagtatgcaaatttggcaacaagattttccaggatggagagatgtggtcctctatcaattgtaccatctgtgcttgtgtgaaaggcaggacggagtgtcgcaataagcagtgcattcccatcagtagctgcccacagggcaaaattctcaacagaaaaggatgctgtcctatttgcactgaaaagcccggcgtttgcacggtgtttggagatccccactacaacacttttgacggtcggacatttaactttcaggggacgtgtcagtacgttttgacaaaagactgctcctcccctgcctcgcccttccaggtgctggtgaagaacgacgcccgccggacacgctccttctcgtggaccaagtcggtggagctggtgctgggcgagagcagggtcagcctgcagcagcacctcaccgtgcgctggaacggctcgcgcatcgcgctcccctgccgcgcgccacacttccacatcgacctggatggctacctcttgaaagtgaccaccaaagcaggtttggaaatatcttgggatggagacagttttgtagaagtcatggctgcgccgcatctcaagggcaagctctgtggtctttgtggcaactacaatggacataaacgtgatgacttaattggtggagatggaaacttcaagtttgatgtggatgactttgctgaatcttggagggtggagtccaatgagttctgcaacagacctcagagaaagccagtgcctgaactgtgtcaagggacagtcaaggtaaagctccgggcccatcgagaatgccaaaagctcaaatcctgggagtttcagacctgccactcgactgtggactacgccactttctaccgcagccagtatcaaacctaccttcccgctgtggacttaggccacaggataggacaagccctgggcagcctggggcacaacgagaggccaggagatgagctatgcctttgtgggtcaaactggggaaagttttttattccttgtgcctatgaaataccagcaatgggctttttccctaactcgactcacatcttggaagaaattgttgcaactgacttaaatcctttctggaacaagttggagaataatatcttcacccaacaggttctcatgaggctggatgaggtttcccttgtaaatcccagatggaatgaccaaggtgtctctttctcctcgtcacatcaccagcaaggcctagtggctcttgtgcgaacaggcctgagtgctgtggtatcaggtcgccctttgaaaaatcaggatatccacctgggtgccagaactccttgcaagcaagaggacctggggtgggtgtcctcagaggtggccctgtgtgggctggtttccatcaggccacatacagattggttggagctttgatgcattat

SEQ ID NO: 465922 - DNA, 1645 bp, Homo sapiens
  misc_feature (12)..(12): n is a, c, g, or t
  misc_feature (25)..(25): n is a, c, g, or t
cttgcccacgantcgatgctgcccnaatgttgggtcagaggaaagtgtttgacctcccttttgggagctgcctctttcgaagtgatgtttatgacaatggatcctcatttctgtacgataactgcacagcttgtacctgcagggactctactgtggtttgcaagaggaagtgctcccaccctggtggctgtgaccaaggccaggagggctgttgtgaagagtgcctcctacgagtgcccccagaagacatcaaagtatgcaaatttggcaacaagattttccaggatggagagatgtggtcctctatcaattgtaccatctgtgcttgtgtgaaaggcaggacggagtgtcgcaataagcagtgcattcccatcagtagctgcccacagggcaaaattctcaacagaaaaggatgctgtcctatttgcactgaaaagcccggcgtttgcacggtgtttggagatccccactacaacacttttgacggtcggacatttaactttcaggggacgtgtcagtacgttttgacaaaagactgctcctcccctgcctcgcccttccaggtgctggtgaagaacgacgcccgccggacacgctccttctcgtggaccaagtcggtggagctggtgctgggcgagagcagggtcagcctgcagcagcacctcaccgtgcgctggaacggctcgcgcatcgcgctcccctgccgcgcgccacacttccacatcgacctggatggctacctcttgaaagtgaccaccaaagcaggtttggaaatatcttgggatggagacagttttgtagaagtcatggctgcgccgcatctcaagggcaagctctgtggtctttgtggcaactacaatggacataaacgtgatgacttaattggtggagatggaaacttcaagtttgatgtggatgactttgctgaatcttggagggtggagtccaatgagttctgcaacagacctcagagaaagccagtgcctgaactgtgtcaagggacagtcaaggtaaagctccgggcccatcgagaatgccaaaagctcaaatcctgggagtttcagacctgccactcgactgtggactacgccactttctaccgcagccagtatcaaacctaccttcccgctgtggacttaggccacaggataggacaagccctgggcagcctggggcacaacgagaggccaggagatgagctatgcctttgtgggtcaaactggggaaagttttttattccttgtgcctatgaaataccagcaatgggctttttccctaactcgactcacatcttggaagaaattgttgcaactgacttaaatcctttctggaacaagttggagaataatatcttcacccaacaggttctcatgaggctggatgaggtttcccttgtaaatcccagatggaatgaccaaggtgtctctttctcctcgtcacatcaccagcaaggcctagtggctcttgtgcgaacaggcctgagtgctgtggtatcaggtcgccctttgaaaaatcaggatatccacctgggtgccagaactccttgcaagcaagaggacctggggtgggtgtcctcagaggtggccctgtgtgggctggtttccatcaggccacatacagattggttggagctttgatgcattat

SEQ ID NO: 465923 - DNA, 1531 bp, Homo sapiens
gcctctcctatatgaactgtagtaatgagtcaccgaagagtagatgagggaagcatctcgtgagaatgaaatgtttagagcatcaccattttacactcccaagaaattactacgtctggatgatgatcgtcaagggttaatatctcaagagaagaacactgacggacactgcttgcctcctgatggaaagacacatcaaaacttacggtcttgcccaaggctcaagcctgagtctcgtcaagcctctgtctccagctgtcaatgtataggaaataccaaagacgtactgaagagtaccaggaccaaattcctgaccaagagagccttcatggagaaaatgggccagcttttccaactgctaaactctaaggaaaaaaaaagaatgaaggaaaaacctatagaagaaaaacaactagaagacatggaagaaaaatggggaaaattaagctatgatgtttccatctgtacagttggatgataaagccattaagaaatgtacggaatgataactataaaatcaggagaataattatagtttggagggaggaaggtggttatgattggtacatggaacaaggaggaagctctggggtaactgacagagctctattggggattaaaaggataaggtgtatatatgtttgtgcagtttcctgatttgtaattattttacaataaagagattaacacagtttatctttcaaattagtgcatcattcaaatttgtatatagataatcagtaataacatgaattagtgatacatgcaacaaaatggatggttctcaaaatcatgttgagcaaaagaagccaacacaaagataaaagggtgcataatgtgtttccaatcatatggagagcaaaaacagtcaaagtccatttatagtggtagaaatcaaaatagtggttaactcttggtgagaaaggatacaggtttgactagaatgaagcagaagagaaattcctggaatgtgaaaatgttctattctgattggggtgttagctatatggatgcatacctttatcaaagatcataaaactatatatacatataatatatgtgcatgtgatatgtatatgtatgcatatgtataatatatgtatacacaaaactgtatacccatgtaatacaggtatacattacagaatacacacacacacactcacacacacacacacgaaaaacaacacgacagcatttatcaaaatgactgattccaggtttgggttaggaaatgtacaagatgagccaagagtatcttgtcatgaaatgaaagcaaggatgctatctaagactactagggtttttgtgaagtgaactgtgtccccctaaaattccatgttaaagacctaacccccaaggtaactgtctttggagataaggccttttaggagacaatttaggttaaatgagcttatgctgccaaattttataaatcttattattgattcttatctcctttagagctttctccagttgtgtgctaagaaggaatttcattttgattatgaaacctttgtgtttcacattt

SEQ ID NO: 465924 - DNA, 1875 bp, Homo sapiens
  misc_feature (10)..(10): n is a, c, g, or t
  misc_feature (12)..(12): n is a, c, g, or t
  misc_feature (14)..(15): n is a, c, g, or t
aattttcttngntnntccaaaatggtgctaattcagctctacagcccccaatctttacttcaaagtctctttgtttccatgaatctaaagtgtaaagaaagtgttcctggaccaaacggagagttgggctgctatttctcacagcccaataacaagatgcaaataaactcgggaggaagagagtttttatttctgcaaccagttatagggagaagtcctggaaattatcgccagaccaacttaaaattacaaagttttccagagcttatataccttccaagctatatgtttatgtatcctctgtctgcagcagagaaagttcagcctgcaatttccatcgggcttctcattctccaagcactccttcctgcattttccccgaccaagcttgcacgactcacagacagcaaactcacctgtgccaagaaagagctgctgagggagctttccaggaaatgtctagaaatggggaacatgtcaaagaccaccaaaaaaaaagggacagttccctcactgatcaagatgttacttggtctggagaaatgtataaatgtgggtgtttgcggctctttcctcatggacacggtgctgatctctcaagacccacccagtcatgaggactttcctctttctctttgccgtgctcttctttctgaccccagccaagaatgcattttttgatgagaaatgcaacaaacttaaagggacatgcaagaacaattgcgggaaaaatgaagaacttattgctctctgccagaagtctctgaaatgctgtcggaccatccagccatgtgggagcattatagattaatgcagaagatttaggtttccagagaagcatacataacctagcttctttttactcttgcctctgctgtaggcagacactttaataaaaataaatgactgtctttgctcagtttgtcaagtgtttcatttagaaaggagaacaacactgcctgaccttgatgctccctccatcccggtttatttttctatcattctggagtagataaattgtcccaaagccatctgaaatttttcttaaaagaggactagaagagactagaaatcaacaaatctctagcttgtgctcagtctacctgtgtgtccctgcactgtgactgtcacaagaactttttttttttttttaaatctctgtcaccaggctggagtacagcggcatgatcttggctcacttcaacctcctcctcccaggttcagtgactcttctgcctcagcctcccaagtagctgggactacagggcaatgagggcttccattctggctcttcaccatgataaccttgggggcttcctggatttaaaacccaggaaagcaggggttgagaagggagagcctttgaccatggtctctagcagtttttcactctcctaaatgtccacgttcagcctccagcaagttgtcgaagtcaccgtaagtgttcctgctagtttatggtttcagagcttccattccaggagtaaagtagttactttcagtctttttacttgtagcgaccgaaaccagaactctgaaatacttcataaggactcagcaaataaagcttttattatttttttctcctaagaagatataggatttcttttgaagtttggttattcagtccctgtatatgaattaccttttttttttgaagaattgctgaatatttattatcatcagaatttttcagttttcttcagaatcctggtcacatagatgaccttgaatattggctgatgtttttcccttgaagctcatcatcaaaaattactaaagcctgacatgtggcaggctaggagggtcccatggatcctgcacatttgtgcttgctgtgtgtctgctgtgaggagagtatccgacggcctctac

SEQ ID NO: 465925 - DNA, 276 bp, Homo sapiens
tcccaagtagctgggactacaggtgtgtaccaccacacctggctaatttttgtactttttaagtagagatggggtttcaccatattgggcaggctggtcttgaacttctgaccttgtgatctgcccaccttggcctcccagagtgctggggttacaagcatgagccaccgtgcccggctctcaagaaattcttagctacccccatccctcaagtgagacaggaaggtcagatggggctggaatagggaaacgtcttcccctccaggtgggatatgg

SEQ ID NO: 465926 - DNA, 1221 bp, Homo sapiens
acaaccctcttcaacctacccaacagccagtacgccaaagagattgcaggcactggcaccatgtgggtgatcaatcaatgctttctgacagttgggagtcatggtcataatagctgtagcagtgaaagaagtggcatcaataattcagacagcagaaaaggagtgagaaagaaaacttcaggtggagagaacattgctggaaggcagataatttgtataaaagagcatgatgccttccagaagtgtcaggtgattaaatacctctggaatgtggtgtcctacagagtggatcctgcatcctacagagtggatgaatataaggctggagaaggaagcaggagccagtatcttggacatgtgaccaacatctcctgcttctatgctcccatctcagactttctactgaaactttttcattcatactactgtccccaaggccttacagagctagtcgtctcaaacaaattatttatgattgttatgaagcaggaatcactctgattggttgtgagagaggaccaatcagaggtattttcatttttcaactgccacacagaaaatggaggggttgccgctgccacacagcaattaccatgcagaaaaaggagttgagaagggagtagcctctgatatgtagtcagcatgaatcagccttaggttccctgcctccatacccaattcttctgcctcattatgattccactatgaggcatccagagtagtcaaacttataaagacagaaagtagagctgtggctgccaggtgggtggaaggagagagaagtagttattgcttaatgagtaggaaatttcagtttgggaagacgaaaaatgttctgaagatggatggtggtgatggtcgtgcaacaatgtgaatgtacttgatgccacataaaaagtggctaacatgaccacatggaaggagagaaaacacctgaacagctccaactgtggcagccataccagcccagatgccagacagtgaatgaagacgggcatcccattcccagtagaaatgacgtgaagaaccgaaaaaaactcaccgacagccctagatatacacctccaggtgaccaacccagacaccaccaacagttagcgctactccagctgaatactccccaacaaaaatctatccttgctatgtgttgcctgaattcatgaccaacaacggtatgaacataataaaatgattgttattttatgccacttaattttagag

SEQ ID NO: 465927 - DNA, 783 bp, Homo sapiens
ataaggtggaaggctggatgtcctccccagactcagctcctggtgaagctcccagccatcagccatgagggtcttgtatctcctcttctcgttcctcttcatattcctgatgcctcttccaggtgtttttggtggtataggcgatcctgttacctgccttaagagtggagccatatgtcatccagtcttttgccctagaaggtataaacaaattggcacctgtggtctccctggaacaaaatgctgcaaaaagccatgaggaggccaagaagctgctgtggctgatgcggattcagaaagggttccctcatcagagacgtgcgacatgtaaaccaaattaaactatggtgtccaaagatacggaatctttatcctatggatctgccaagggaggggatgcccagtcctctgttcttcacaaggactcccttcttctggctaaggtttcttatgcaattatgcctcctacagaggaagaagggacaaaaactgaaaaagttgagcctgttcctcagtttccatccaaatggactcactgctatgggaattgccctcctacagtagacaagatggaactagtcagcaggaaaggaagttatttggctcactatttttggctgtgtgagaagcatggtgcctgcatccgctccttgttaggactccataagccttcagtcatagtggaaagtcaagtgggagcaggaatatcacgtggtaagagtggagcgagagggtgcaaggaggtcccagactcttttaaacaactacatgttgtatgagctc

SEQ ID NO: 465928 - DNA, 1495 bp, Homo sapiens
ggccattaccttccgaggtgccagtgcgcgctggggcccaatggctctgctccgtatatttcttctccgagagtttggagacgtccctctcagagaagctggagggtccctgtctgagaccccagatgaggatctggaatatccacaaagctgcgtccaggggaacgcgtggaagctgcagcggagcctcctgctcaagagaaaaggccagtctgaaacctacaagaagaacatgtgtcgggaactgcgggctgtgggctgggggctactggaggaggtgggcaggtggggagaagcacccccttcagagctgggggcttggggagtgggggcgaggggaggcttggaaagaatggagtgtgtggggcgggccgtcctggtccccagggcgctgggctttcttccctggcagactccgcagcgcctgagatgtggacgccttggaggcggagggcccaagtcatctttatgagcagcaaaagaaacccaaaactttagctggtttctccacccacagttcctcttacagagcacttcagagagaattttaaagcggtataacaaaattaagtatatactgtgttttatttttaatgtacacattttaaaagataatattagatacattatagaaaggaacgtaatgaaagaaataattcccataatatatcaccttctgggctaaaaattctttggctaaaatccaatatttattttatattaatgaatgcctacataaatatgttctttactgagggagcttagaaggacactttgaagtgggaagatggttcatgttcttgaataagaagactcatttttctcaagatgtgagctctttatcaattttacataaaccaaataaagctatcaaaatttttaacgtttttgaattacacatgctttcactattgtgatgacattaagaaaatttttgttttggtatcaggatgatgagttaaggaggatttttctcctcctcaattgtttggaatactttcagtaggtatgatgccagctcttctttgtacaactgatagaattcagctgtgaattcatctattcctgggctttttttacttagtaggctatttattacttcctcaattttagagcttgtttttggtccattaaaggatttaatttctttctgttcagccttggaagggtgtatatgtccaggaatgtatccatttcttttagattttttagttcatgtgcaaagaggtgttcataatattctctgatcattgtttgcattttttggggagattagcattgcaactcctgctttttttttgctttccttgtgcttgataaatattcctccgtccttttattttgagcgtatgtgtgtctttgtatgtaagatggatctcctgaatacagcacactgatgggtcttgactctatccaatttgccagtctttgtcttttaatttgggcatttatcccatttacatttaaggttaatattgttatgtgtgaattttat

SEQ ID NO: 465929 - DNA, 3817 bp, Homo sapiens
gtgatggctgtgtgtccttgggtccctctttgtcctccacccacacccaacaggatgttatttttgccttcagtgaacatgcataacactttgcatctctttcctggcaaatatcaattccatcttgtgtttgaagatgcaagaataaatgtgatggcagttcatgaggaaagaactggagaatatgagctgaccgcaaagtcaacagtgatttcccactgtgattccgttgttgaaaacgctaataccatctcaggctgcacttacaagagtgcaagtccagaacgaagaggacattgcctcatggttctttcagatgcatcttctgtgggagatctgatcaatgtggtcactgtgtttttcagacctggacctcaccttctgctcattaacatcctaaatcacacattcaccagtgccataacagtttcaggaacaaccatatttggtgtaaaaatgggcagcaccacaattccgagaaatctccatgtttttctaggaattttcatgaatcttctaccccttggttaaagaaaactataaaggcaacagccccaaacccccttggtggatctctctcttgagtacacctgcatcccctttttatgagtgtgtgctattctctttgcaataaatctctgtactttcactaatatttcccaattcatctttgaattcattcttaaaatggtgtcaagatcctggacactggttggggttgaggttccaacagcatttggggacctcccccagactactagtgtcacttttatcctctgaaagatagataaaaaagcatttgtccctggcgtagaccatcctatttttcctatggaaataataaacaattcatcctagttagtatagataatatattgtttctacgccaactcgccatttgtctttctcttccagaactgaatacttcaatagagtgctggactaggaaaggacttttgaatttctggcccagattcacatccctctgttaaattaagtttagcctaaagctgcctccttacatattttaacgtcagcctaaaggtttctccacacattgtgaactattacctaactggacgtgtgaccagtcagcattgttgctgttttgtagttgttctaacaggtgtgtcgggatatctcattgtaattgtagtttgcattttcctaatagttaatgattacaaatatctttgcatgttcttatttcatctgtatctcctctttggtgaaatgtctgctcatgtttttgcccatttgataactggatttgggggttgttttaattgttgagttttgaagccagtatgtatagggcaatttctgtatacaaggtacagggttggatattgagaaaatgggcagaacctctgtcctctatgaactggtttatttttattcatttccatacatatactatttgtttacacaacacccttggaactgtgttttgtgcaaatattactgaaataccaaggatttggtctagattctgcagcttgctacacagaaagccagagaccgagagccaatgactgagactatgagtattgccaaggaagaaggctttaatcgggtgctgcagctgaaaagatgagagctcagcctcaaatccatctccctgaccaactaaagctaaggatttatatagcagggaagaagacaggaactaggaaggggcaaggaagcgatcctgatgaatgaagggtcaggcatttcattgtctggatgtggcgatctgctcacactggtcacacctgggacttccaacatgaatgcttttgtcacggatgctgcgctgctgctgtttctggttcttactctgcttacaccaaggagactgatgtccctgctataaccccacttccgatgcagacagcaattccaatgcattgcagctttcaggattttctcactgtgtttttgcctctccttttctttaagacatgagcatttgtctacggggatggcctgaagtgtagtctccattacccagagtcatctcactctctgaccttgactcatgatctgagaacaagtgctcccctgcttgtcttcctgaggggcatctgtccctcttgcaaacagatttcctttgggctctgtcatttagaaatgcccttatttatctgaattatagttccagttcagaacatttacaaaggaacagattgctcccaattttaaagcaggtaaattctaaaagttggcaagccagtcatttagaatttgagcctcatattccataggtatgaaattatacataatgaaaaagttcccagggcagcccacaaaaagcctacttatccaaaataaagctaacctgagttaattcagctctatggcctagccacattcagcaatgtgtttccattagaatgcatgtcttatatcaactgggaagccaagaaggcagttcagaactgaactgaaatctatcctgtgttggaattttatagccagatatcagttaaccaggccccagtgagtggagaaatcttggatttagattctcatgaaattctttatcaaatcctgggatcttccaaaagactgtgtaaaattataatttaattctgcagaagtagaacctcaattggatatcatccacaaaagcactgcaatgtctatctttttgggatcatgtcaaagatcctaaatccatgcttactttggcagaaagtattagtgtttagttcattagtaattggcacattggaatgatatagagaagattagcacggccctgcacaaagatgccgtgcaaatttgtgaagctttccatatttttattgcatttactccatcatatgtgggagctaaaagaagaaagagctaccctgaattgagatgtgctgaattttgaagactcaacatggaaaaaataatgcaaaacatcttatcagcatgttcttacattaattatgttggaataatattttggttaagggaaacatattattaaaagtaatttcttcagtttccgtttactttttttaatgtggctactcaaaaatttaaaactccatacgaggcatgaatcttctgatagccagttaggaaagaaattactcagaggcccggccgcccatcgtctgagatgtggggagcgcctctgccccgccgccccatctgggatgtgaggagcgcctctgcccggccgcgaccccgtctgggagtgtttctaacattcagctagatccaaagaccatgatcaaaactcagttttctcatggtgcccttttgtatttttgaaatctttaaattatttttcttttataatagagctacctttactctctggtcaaggagctgttagagtgtgtgtcacttgcaaaaaaaaaaaaaaagaaagaaaaaaatggtaattacagtgtcaatattttaaaaaatattttggcactaggcttattcctaaaagtcgtctactgttttgtgagtcctgtgtgtgcactgtccagttttggcattactgttatgttggctttataaacaacattagacatgttgattttccttagaaaagttttaaaagtactagaataatctctttcttaaaatttttaaatttaaaatttcatttgtgaaatgacctgtgtctggcatttggataaattattcacttcatgtatattcattccttaggttttctaatttatttgcatagttaaaaagtgttttctctgtctttctgttatttcccaccctcctttctaattgtatgcgtttgtattttgcccctcttttttttaggatattaatggtttatctgttttatttaaaagcaccaggacttggattcatttatttttctgcc

SEQ ID NO: 465930 - DNA, 2360 bp, Homo sapiens
gaattgtggggcaagcttggccactgatgcagattctgcagcttgctacacagaaagccagagaccgagagccaatgactgagactatgagtattgccaaggaagaaggctttaatcgggtgctgcagctgaaaagatgagagctcagcctcaaatccatctccctgaccaactaaagctaaggatttatatagcagggaagaagacaggaactaggaaggggcaaggaagcgatcctgatgaatgaagggtcaggcatttcattgtctggatgtggcgatctgctcacactggtcacacctgggacttccaacatgaatgcttttgtcacggatgctgcgctgctgctgtttctggttcttactctgcttacaccaaggagactgatgtccctgctataaccccacttccgatgcagacagcaattccaatgcattgcagctttcaggattttctcactgtgtttttgcctctccttttctttaagacatgagcatttgtctacggggatggcctgaagtgtagtctccattacccagagtcatctcactctctgaccttgactcatgatctgagaacaagtgctcccctgcttgtcttcctgaggggcatctgtccctcttgcaaacagatttcctttgggctctgtcatttagaaatgcccttatttatctgaattatagttccagttcagaacatttacaaaggaacagattgctcccaattttaaagcaggtaaattctaaaagttggcaagccagtcatttagaatttgagcctcatattccataggtatgaaattatacataatgaaaaagttcccagggcagcccacaaaaagcctacttatccaaaataaagctaacctgagttaattcagctctatggcctagccacattcagcaatgtgtttccattagaatgcatgtcttatatcaactgggaagccaagaaggcagttcagaactgaactgaaatctatcctgtgttggaattttatagccagatatcagttaaccaggccccagtgagtggagaaatcttggatttagattctcatgaaattctttatcaaatcctgggatcttccaaaagactgtgtaaaattataatttaattctgcagaagtagaacctcaattggatatcatccacaaaagcactgcaatgtctatctttttgggatcatgtcaaagatcctaaatccatgcttactttggcagaaagtattagtgtttagttcattagtaattggcacattggaatgatatagagaagattagcacggccctgcacaaagatgccgtgcaaatttgtgaagctttccatatttttattgcatttactccatcatatgtgggagctaaaagaagaaagagctaccctgaattgagatgtgctgaattttgaagactcaacatggaaaaaataatgcaaaacatcttatcagcatgttcttacattaattatgttggaataatattttggttaagggaaacatattattaaaagtaatttcttcagtttccgtttactttttttaatgtggctactcaaaaatttaaaactccatacgaggcatgaatcttctgatagccagttaggaaagaaattactcagaggcccggccgcccatcgtctgagatgtggggagcgcctctgccccgccgccccatctgggatgtgaggagcgcctctgcccggccgcgaccccgtctgggagtgtttctaacattcagctagatccaaagaccatgatcaaaactcagttttctcatggtgcccttttgtatttttgaaatctttaaattatttttcttttataatagagctacctttactctctggtcaaggagctgttagagtgtgtgtcacttgcaaaaaaaaaaaaaaagaaagaaaaaaatggtaattacagtgtcaatattttaaaaaatattttggcactaggcttattcctaaaagtcgtctactgttttgtgagtcctgtgtgtgcactgtccagttttggcattactgttatgttggctttataaacaacattagacatgttgattttccttagaaaagttttaaaagtactagaataatctctttcttaaaatttttaaatttaaaatttcatttgtgaaatgacctgtgtctggcatttggataaattattcacttcatgtatattcattccttaggttttctaatttatttgcatagttaaaaagtgttttctctgtctttctgttatttcccaccctcctttctaattgtatgcgtttgtattttgcccctcttttttttaggatattaatggtttatctgttttatttaaaagcaccaggacttggattcatttatttttctgcc

SEQ ID NO: 465931 - DNA, 472 bp, Homo sapiens
gtcattcttttttcaaaggacaactttatgaaaggagctgagaatgtcccgggggcctgaagggcttgaaagaaaatgcagtctgtgtttacacctcaaagatgtgcaagactgtgtgagtgggggtaatattttgggaagagaaagcgcaatgaagatatataggtgaaatatctaagtagcatcaacaaataactgttgttaatgttgtttaaaaaacaattccctggcttcttgtatttggaatggattgtctccgtggaagcagaaactacctctctcttaccttctttcaggttttcctgggatcagctgcactccttagcaaaagtatattggagaatcaactgagaaagtaactgagacatttcaatcatttctaggtgtaaagaaagaccagatcccaggaaaatattacggtcagttcaatgcctaagtataacaccagcatcactggctgggaccctcagaa

SEQ ID NO: 465932 - DNA, 1750 bp, Homo sapiens
gtcattcttttttcaaaggacaactttatgaaaggagctgagaatgtcccgggggcctgaagggcttgaaagaaaatgcagtctgtgtttacacctcaaagatgtgcaagactgtgtgagtgggggtaatattttgggaagagaaagcgcaatgaagatatataggtgaaatatctaagtagcatcaacaaataactgttgttaatgttgtttaaaaaacaattccctggcttcttgtatttggaatggattgtctccgtggaagcagaaactacctctctcttaccttctttcaggttttcctgggatcagctgcactccttagcaaaagtatattggagaatcaactgagaaagtaactgagacatttcaatcatttctaggtgtaaagaaagaccagatcccaggaaaatattacggtgacttcccaagtatgcctggccacaatacctccaggaattcctcttgcgatcctatagtgacaccccacttaatcagcctctacttcatagtgcttattggcgggctggtgggtgtcatttccattcttttcctcctggtgaaaatgaacacccggtcagtgaccaccatggcggtcattaacttggtggtggtccacagcgtttttctgctgacagtgccatttcgcttgacctacctcatcaagaagacttggatgtttgggctgcccttctgcaaatttgtgagtgccatgctgcacatccacatgtacctcacgttcctattctatgtggtgatcctggtcaccagatacctcatcttcttcaagtgcaaagacaaagtggaattctacagaaaactgcatgctgtggctgccagtgctggcatgtggacgctggtgattgtcattgtggtacccctggttgtctcccggtatggaatccatgaggaatacaatgaggagcactgttttaaatttcacaaagagcttgcttacacatatgtgaaaatcatcaactatatgatagtcatttttgtcatagccgttgctgtgattctgttggtcttccaggtcttcatcattatgttgatggtgcagaagctacgccactctttactatcccaccaggagttctgggctcagctgaaaaacctattttttataggggtcatccttgtttgtttccttccctaccagttctttaggatctattacttgaatgttgtgacgcattccaatgcctgtaacagcaaggttgcattttataacgaaatcttcttgagtgaaagggtgggtcccctggatgatggagaagttcacaaaggtgctttgctgatggaacttgctgaaaagccactcataggggtattagaaaaagctgtccaaggggagaaactgcatctcaggccatgctgggcatctgcccaaggaaccgaatgcctttggaagctgctctctgaagggcagggatggctgtccacgaggaggccacatgcattgcgtgcattaggcaggagcctgctacgagaaagcaggtaccagagccagggagaaaagcctattcttccccaagtgctgcttcagcgccttgtaatgatgaagattagtttagcatcccacccattgtgtgaagaaactaatcctcgctggaggctgactttgacagaaaatcactgcgagtgcctggaacgtgggttctgagtaggagtccatgagggctagttactaaggaagaaacagtggagagaggcaagtgtcaggatcaggagggcaaaggttgagatgggc

SEQ ID NO: 465933 - DNA, 2800 bp, Homo sapiens
atcgggccgcagctccgcctcccgcagccagggccgtagtaacccattcatggggcccgcgcgcggctgcagccgggctccgtggcgctcgcagccaccgcctcctctcggctccaggtcttccccttctttttacaactgatcctgttggggattttttttttttctaaattggaacggtggggaggagcagggaggggggacctggaggaaggggagagattaggcagccatcaatttcctccagtttctcccagaacaggtgatgcttctaaattgtgatcactttcaggaggcagcactgcagctggaaggatgcgagcgacctagggtggagtggctgaggcggcagatctgaacttgcggaggataagaacccaaatttttctaagactcaaacttgggcacttgatcccttttcttggattgctttggaggagacgatttgctggcaacgttgggaacagtcaggactgtgttgtaactcttacttttaaagcgacagtagaggatcagactttttaaatgtttggaattcaagatactttaggaagaggaccaactctgaaagagaaatcgctgggcgcggagatggattcggtcaggtcctgggtccggaatgtcggagtggtggacgctaatgtcgccgcgcagagcggggtcgccctgtcccgggcccactttgagaaacagcctccttccaacttgaggaaatccaacttctttcacttcgtcctggcgctctatgacaggcagggccagccggtggagatcgagcggacggccttcgtggactttgtggagaatgacaaagaacaaggcaacgagaagaccaacaacggcactcactacaagttacagctcctctacagcaacggtgtccgcacggaacaggacctctatgtcaggctcatcgactcggtcaccaagcagcccatcgcttacgagggacagaataagaatccggaaatgtgccgagttctcctgacgcacgaagtgatgtgtagtcgatgctgcgaaaagaaaagctgtggaaaccgaaatgagactccatcggacccagtcataattgacaggtagggggaaaaagtgatttttcaatcatttttggttccttttcttcatgaacctcaactctgagtactgatccatggagctttgctgtcaagttggtttcatgttatttcaagtcactaagctcatccaacaaaggcctcctcatgctggcctttcttggaagaagccagaatcttcctttggaacacgtgtctctaaatctgtggtggagtcttttccaggtgcaccagcttcagcctaataagtagtatgtgtggtgcaggatataagcgatggcacctctcctttcgggcagggtatggtctcaatcagttttctagaagaagcaatgtgccccaagttaagtggcacccactttattattctcggtgattgctgcttggctggaagattatcaattcagattacggtttaggggattatggcaagctctctgctgtgttcagggagattcctttctaccatggaggattgcattctgtgttctatgttatattcagaatgggaaagattctttgggacaagacactaattcactgaaatgtgatttaggcatcctcagctgtctgttttttgtgattggaaacagaacttacaaaccaatgaagaaataccaaattaacttccagaaatcatgtaatttttaagaaaccccatattcccatccctaatttttttctctttcgttaaaaaacggaataattccctattgcttctttctttgggttttcacatttctagccaggtcctgaaatggattggagagaccacagtctccaaagttgttattccaatattccaacgaattctcagttgggagaatggaacctctggcattcttcccagaaagccagcttggtttcttcgtggaaagtatagcatagcctaggaactgaggaggctggaattctgatcttgtcctagcttctgaccttggacaaagcactcagcatctttgttcttcaataatataatgatgggttaggaggtgcagtcacttctgtaggcttcaagaggctactgaaatatcaatggcagctttgcagtgttctctgagatgcttgaagaggatgatgggcaaatataaaatgtttgttggatgtgtatagtgtctttgccattttagaaggttccagtgagctgcgttttagggagctattggggttgctctggtcttttttgaaagtacagagaagcttaaatatatagagttgcaaggactctttggagtcagtcattttcctcatctagctgaaaaatctgaacgctgagcggtggcatgacttgcccgtggttgtgcagctggttgggcagagctggcattagaacacagctgtccttacttccaggctgggtgccgtaactcacgcctgtaatcccagcacttaggaagaccgaggtgggcagatcacttgaggtcgggggtttgcgaccagcctggtcaacatagtggaccccagactttactaaaaatacaaaaattagtcaggcatggtggcacatgcctgtaatcccagctacttgggaggctgaggcaggaaaatcgcttgaacccaggaggcacagattgcagtgagccaagatcacgccactgcactccagcctgggtgacagagacagtgagactctgtctcaaaaaaaaaaaaaaaaaaaaaaagaaaaagaaaaaaaggaatacagcagaactgtccttacttccagactgtgcttctctccatggcca

SEQ ID NO: 465934 - DNA, 2858 bp, Homo sapiens
atcgggccgcagctccgcctcccgcagccagggccgtagtaacccattcatggggcccgcgcgcggctgcagccgggctccgtggcgctcgcagccaccgcctcctctcggctccaggtcttccccttctttttacaactgatcctgttggggattttttttttttctaaattggaacggtggggaggagcagggaggggggacctggaggaaggggagagattaggcagccatcaatttcctccagtttctcccagaacaggtgatgcttctaaattgtgatcactttcaggaggcagcactgcagctggaaggatgcgagcgacctagggtggagtggctgaggcggcagatctgaacttgcggaggataagaacccaaactttgactacatcagtccgcacctcgccagtgaagcaaaggacgggttatcttttttttttttctaagactcaaacttgggcacttgatcccttttcttggattgctttggaggagacgatttgctggcaacgttgggaacagtcaggactgtgttgtaactcttacttttaaagcgacagtagaggatcagactttttaaatgtttggaattcaagatactttaggaagaggaccaactctgaaagagaaatcgctgggcgcggagatggattcggtcaggtcctgggtccggaatgtcggagtggtggacgctaatgtcgccgcgcagagcggggtcgccctgtcccgggcccactttgagaaacagcctccttccaacttgaggaaatccaacttctttcacttcgtcctggcgctctatgacaggcagggccagccggtggagatcgagcggacggccttcgtggactttgtggagaatgacaaagaacaaggcaacgagaagaccaacaacggcactcactacaagttacagctcctctacagcaacggtgtccgcacggaacaggacctctatgtcaggctcatcgactcggtcaccaagcagcccatcgcttacgagggacagaataagaatccggaaatgtgccgagttctcctgacgcacgaagtgatgtgtagtcgatgctgcgaaaagaaaagctgtggaaaccgaaatgagactccatcggacccagtcataattgacaggtagggggaaaaagtgatttttcaatcatttttggttccttttcttcatgaacctcaactctgagtactgatccatggagctttgctgtcaagttggtttcatgttatttcaagtcactaagctcatccaacaaaggcctcctcatgctggcctttcttggaagaagccagaatcttcctttggaacacgtgtctctaaatctgtggtggagtcttttccaggtgcaccagcttcagcctaataagtagtatgtgtggtgcaggatataagcgatggcacctctcctttcgggcagggtatggtctcaatcagttttctagaagaagcaatgtgccccaagttaagtggcacccactttattattctcggtgattgctgcttggctggaagattatcaattcagattacggtttaggggattatggcaagctctctgctgtgttcagggagattcctttctaccatggaggattgcattctgtgttctatgttatattcagaatgggaaagattctttgggacaagacactaattcactgaaatgtgatttaggcatcctcagctgtctgttttttgtgattggaaacagaacttacaaaccaatgaagaaataccaaattaacttccagaaatcatgtaatttttaagaaaccccatattcccatccctaatttttttctctttcgttaaaaaacggaataattccctattgcttctttctttgggttttcacatttctagccaggtcctgaaatggattggagagaccacagtctccaaagttgttattccaatattccaacgaattctcagttgggagaatggaacctctggcattcttcccagaaagccagcttggtttcttcgtggaaagtatagcatagcctaggaactgaggaggctggaattctgatcttgtcctagcttctgaccttggacaaagcactcagcatctttgttcttcaataatataatgatgggttaggaggtgcagtcacttctgtaggcttcaagaggctactgaaatatcaatggcagctttgcagtgttctctgagatgcttgaagaggatgatgggcaaatataaaatgtttgttggatgtgtatagtgtctttgccattttagaaggttccagtgagctgcgttttagggagctattggggttgctctggtcttttttgaaagtacagagaagcttaaatatatagagttgcaaggactctttggagtcagtcattttcctcatctagctgaaaaatctgaacgctgagcggtggcatgacttgcccgtggttgtgcagctggttgggcagagctggcattagaacacagctgtccttacttccaggctgggtgccgtaactcacgcctgtaatcccagcacttaggaagaccgaggtgggcagatcacttgaggtcgggggtttgcgaccagcctggtcaacatagtggaccccagactttactaaaaatacaaaaattagtcaggcatggtggcacatgcctgtaatcccagctacttgggaggctgaggcaggaaaatcgcttgaacccaggaggcacagattgcagtgagccaagatcacgccactgcactccagcctgggtgacagagacagtgagactctgtctcaaaaaaaaaaaaaaaaaaaaaaagaaaaagaaaaaaaggaatacagcagaactgtccttacttccagactgtgcttctctccatggcca

SEQ ID NO: 465935 - DNA, 1617 bp, Homo sapiens
acaaaaggactcctgtgggaacggacagccagatgcagttgctaagacaaattaaatatttttcattcttcttctcatcatggcggaccctagagataaggcgcttagggactaccgcaagaaggtgcttgagcacaaggagatcgatggccgtcttaaggagttaagggaacaattaaaagaacttaccaagcagtatgaaaagtctgaaaatgatctgaaggccctacgaagtgttgggcagattgtgggtgaagtgtttaaacagttaactgaagaaaaattcattgttaaagctaccaatggaccaagatatgttgtgggttgtcgtcaacagcttgacaaaagtaagctgaagccaggaacaagagttgctttggatatgactacactaactatcatgagatatttgccaagagaggtggatccactgatttataacatgtctcatgaggaccctgagaatgtttcttattctgagattggagggctatcagaacagatccgggaattaagagaggtgatagaattacctcttacaaacccagagttatttcagcgtgtaggaataatacctccaaaaggctgtttgttatatggaccaccaggtacgggaaaaacactcttggcacgagccattgctagccagctggactgcaatttcttaaaggttgtatctagttctattgtagacaagtacattggtgaaagtgctcatttgatcagagaaatgtttaattatgctagagatcatcaaccatgcatcatttttatggatgaaatagatgctattggtggtcgtcggttttctgagggtacttcagctgacagagagattcagagaacgttaacggagttactgaatcaaatggatggatttgatactctgcatagagttaaaatgatcatggctacaaacagaccagatacactggatcctgctttgctgtgtccaggaagattagatagaaaaatacatattgatttgccaaatgaacaaacaagattagacatactgaaaatccatgcaggtcccattacaaagcatggtgaaatagattatgaagcaattgtgaagctttcagatggctttaatggagcagacctgagaaatgtttgtactgaagcaggtatgttcgcaattcgtgctgatcatgattttgtagtacaggaagacttcatgaaagcagtcagaaaagtggctgattctaagaagctggaggctaaattggactacaaacctgtgtaatttactgtaagatttttgatggctgcatgacagatgttgacttagtgtaaaaataaagttaaagaaaataatgtatgtattggcaatgatgtcattaaaagtatatgaataaaataacatcataaaaattagtagttcaacttttaagatacagaagaaatttgtatgtttgttaaagttgcatttattgcagcaagttacaaagggagagtgttgaagcttttcatatttgctgtgtgagcattttgtaaaatattgaaagtggtttgagatagtggtataagaaagcatttcttatgacttattttgtatcatttgttttcctcatctaaaaagttgaataaaatctgtttgattaaaaaaaaatt

SEQ ID NO: 465936 - DNA, 1233 bp, Homo sapiens
gttatttgaagactctctcggaagagatagcgtttttctgcaacctacggtcccagcagaaaaaccttgtgatccttgttgcgggcgacatggaggaagactcactctacttgggaggtgagtggcagttcaaccacttttcaaaactcacatcttctcagccagatgcagcttttcctgaaatccagcggacttctctccctgagaagtcaccactctcatcggagacccgtgtcgacctctgtgacgatttggctcctgtgacaagacagcttgctcccagggagaagcttcctccgagtagcaggagacctgctgcggtgggagctggtctccagaatatgggaaatacctgccacttgaatgcttccctgcagtgcctgacatacacaccgccccttgccaactacatgctgtcctgggagctctctcaaatgtacaccttcgacccttacctggatatcgccctggatatccaggcagctcagagtgtcaagcaagctttggaacagttggtgaagcccgaagaactcaatggagagaatgcctatcattgtggtctttgtctccagaaggcgcctgccgccaagacgttaactttacccacttctgccaaggtcctcatccttgtcttgaagagattctccgatgtcacaggcaacaaacttgccaagaatctgcaatatcctgagtgcgttgacatgcagccatacatgtctcagcagaacacaggacctcttttctatgtcctctatgctgttctcgtcatcaccgggtggagttgtcacaacggacattacttctcttgtgtcaaactcaagaaggccagtggtataaaatggatgatgccgaggtcactgcctctggtatcacttctccttagagtcaacaggcctatgtcctcttttacatccagaagaatgaatttggaagacccagttacagggtgtccgcaggcagagaaccaagagctctttgtgctgaagacaattgaattgtggtgaaataatatgtcatgaataaatcttgcagcagatttatttgtctcactttgtaatcagtgaatgagctttaacgaatatcaatgcctagtgcctaccccccagagataagaacttccagtttctcatgtgtaatcatggcatctggattgctcatgattctgaagataattctcctgtcccccaaagtttcagaatcacttcaggtggtagaaacagataacacatcagt

SEQ ID NO: 465937 - DNA, 2639 bp, Homo sapiens
ggatctggtaacatggcaaaagatgccggtctaattgaagccaacggagaactcaaggtcttcatagaccagaaccttagttccggaaaaggcgtggtgtccctcgtggccgttcacccctccaccgtcaacccgctcgggaaacagctcttgccaaaaacctttggacagtccaatgtcagcattgcccagcaagtggtgattggtatgcctcagagacctgcagcgtcaaacaccctggtggtaggaagctcacacacccccagcactcactttgcctctcagaaccagccttctgactcctcacctcggtctgcagggaagcgcaacaggaaaggagagaattgcaagggcctgcggcatttctccatgaaggtctgcgagaaggtgcagaggaaagggaccacttcctacaacgaagtggcggacgagctggtagcagagttcagtgctgccgacaaccacatcttaccaaacgagtcagcttatgaccagaagaacataagacggcgcgtctatgatgccttaaacgtgctgatggccatgaacatcatctccaaggagaagaaggagattaagtggattggtctgcccaccaactcggctcaggaatgtcagaacttagaggtggaaagacagaggagacttgaaagaataaaacagaaacagtctcaacttcgagaacttattctacagcaaattgccttcaagaacctggtgcagagaaaccggcacgcagagcagcaggccagccggccgccaccacccaactcggtcatccacctgcccttcatcgtcgtcaacaccagcaagaagaccgtcatcgactgcagcatctccaacgacaaactcgagtatctgtttaattttgacaacacatttgaaatccaaggtgacatagaagtgctgaagcggatgggcatggcttgctggctggagtctgggagctgctctgctgaagaccttaaaatggccagaagtctagtcccaaaggcgctggagccgtatgtgacagaaatggctcagggaactgttggaggcgtgttcatcacggcggcaggttccacgtctaaaggcacgaggttctctgccagtgacctgaccaacggtgcagatgggatgctggccacaagctccaagaggtctcagtacagcggctccagggtggagaccccggtgtcctacgtcggggaggacgacgaggaggatgatgacttcaacgagaatgacaaggacgactgacgtcctccccacttcaaattcagcttcaggaaaacatttagggaaaagaaactttttttttaatgtaggttttctgtttccttttgtcctactcccaagaagatattggtaagctatttaatttagatatgcacctctgataagcaaggattgtttcctgtaggattaggacgtgctgtggatgtgtgttttgataccagtgtgctgatgcagagcgtttatttactttttagtattttgtgctttcattttttatttttcttttaagtgcagagttcatttttgcccctgaacagtttttgctgagtttgctgaagaaattgtatttcatccacatgcatgaaaataaaacgccctcttgttgtggatggtgagcacctgatgccgtttatttgccgtgagtttggacggcgcccccactggcagatagcgagactctgtggagttttccatttgttcagtggtacggtgtccagagccccaagcaaacagcagaattcgacattttaaacaataaacaccatcaaccttattaactttattttctcttaaattatattgactgtcgtgattccatcaagtttatacactcttttctctccctattttgcagcaacaaattgcaaagtgcttttgtttgtttgtttgtttttgtttggttaaagcttactgccacgctggtgtggctatggagactgtttggaaggcttggaatggtttattgcttatggtaaaatttgcctgatttcttacaggcagcgtttggaaaccttttattatatagttgtttacatacttatcagtctatcatttaaagacatatactgaaacaaatgtatttgtttcataagcatcttcctgtaatctattataaaattgaaattaaatataaagaatgttttaacaattttttaactcaaaatttgtcaatcatttttaatagttcttttttttttaataaaaagaacaaggaatttaaggacaggcagtagtctcttttaaaatttattcacaaaacccattaactgcacagttgctattagctgcctgttctaaagcgaaagtctttttattgaaacacaaataaacttttctgtaatattttatggaatataaagaaactttaattgtttgacttgtttaacttggcactgttagtttttattaataaaatacgcatgggcattttaaacaaaaacaaacaaacaaaaattaccctgttaggaactctgaaatatgcttttaactaataatattatgttggttggagagctaggctcactttcctgtgtgctgtactgtctttgagagccccatttccataggacgctgctgagctaggatttatctccttggccagggggaaggatttgattcacacagttttgttctagaag

SEQ ID NO: 465938 - DNA, 1396 bp, Homo sapiens
cgaaaaaccatggtgtgcttgggagcctttgctggtgtagggtgcctgagcacagggttttggggaactaggatggtgagtgggaccatcaaccaggacagaaaatctggaaggagggggagtgagcttgagggcaagagttcatttctagacttgttgaatgtgaatgcttgtgcagcattgaagaaacgtctagtgctggatatccagtgtccagctctggagaccagaggaaaagagaggtcctgcttggttaacccactctcagtcctggccacttcccaaaggcacctggcttaccagcctcagaggctcctagctccattctctcagcctgcccagagagagcctggtgtgactgaaggaagtgtggacctgggagataggaaccgactgacactgctccctgatgtttgtgcttcagggactgtgctggctgatgggaaccctgcatctgagagcgcgtgcgctgggcgggaggcagagccaaaaccgtaacagccagagctagagactccggcctggggttctggctctgtcccgtatcagctaggaaacccagggcaagctacttaaactctcagaggctcagctttttcatgagcaaacaggaaaacagggctaatgattagtccttggcttaaaatacataccgcgtgtgaaattgcaggtatataatagattcactaaatgagagggcgagttatcaacacttactctccaatgcgtcatcacccccaacactcctgtgtatttcctgcaaataaggatcttctcctacatggtcagtccgaacaaccttcagtcacaactgagaaggtcacatggtgcatcactgccgctcagtctccccaagcccagtgatttcttcacaattagggatctgagacccgcagtatggcagtgacaagatccaagtcttgggacacctagccaggagggaagaatttgagggagaggtggaaaatatgcgaggctgaactgaccttcaaggacaagaaggctgtgttcagatagacagagtttgtcttctgggagaggagtgggcttatccaggatgatcccaaaggcagattgaggaccagtgggaggacatcctgagaaagcagatccagctttaggcaaggaaggacttcgtaacaggcagagagcccatgttggaaacaagcagctctgcaaggtgtgggcccactgtctgactccctgcggggctgctgccttggaagagcctcctgcttagagaggttctcctgccgccagctgtctctcctgagtcctgagcaccacatctctggaccgtctggagcctcccctcccttggcttactgctcccaccaccctctctctccaccttgcaagagacactctccctcatcctgggtcatcaccctcttta

SEQ ID NO: 465939 - DNA, 1360 bp, Homo sapiens
accatcacactgctagcaggcctgctactctgggctcctccagctaatgtcattcacttctttctccaggaaaataagccattggggtgggctgctcacgatgttgaagtaacagatgatcaccttctgtcaaattcactctctcaccctccacattgcaggggctcatcagcttctctttgacgtccatcccagtggtgggaagcaggagccacatggagcaaattgcattgttggaaagcccacagaatctgctcagggaagcctttcttcaccagccctgcctgccactctcccatcctctcctcaccaatcaagcgaggtcaggtctggttttcctgaaagagaacctcacggcctcttgtgcttttcctccctgacttcctcattaccaccttgtttgtgctctccaccaccttgttctcttctcgccttagggcttcgtaccaatcgttcccccggtgaacaccgtgttgcagatctcctggtggtcagttgctggtgtctgtccatcaccagcttaaaaagcatctccctgtggagtgctagttcagaacatcaccccgcagtcaccccacgctaaatctctggactcatggctactctgtggaggggacggtattgctgcaggagccatgcttatcaccttctcacatatatttataatctaccacaatgtcttgctggaaaaaaaaaatgggacaacataatttccccaacttaacacaacccctgcctggaaaatgcaagccaaacttaacaggcaagttcggcagctgcttggcgtcattttgttttaacatcatgcatataaaaaaagaaatagtgcaatgctggggggaaggagaattttcaattgcttagatttgataaagaaaaactagtgatcaaaaattatttttaaaaataacaatgacttcttggtaacatattttcccctacggttgtttgatttctgaacagacaccttttattgacgtctggctgatttccacaaatggcatgtttctgcttttcccacattagggaagctggttctttggcccaaagtgcttttacagcctacctgtattttaccggccctcctagacggggggaactcccctgtcctctgcaggaatgtcaaaagccacccatctttaaccacctaatgctcccatcagcagagaggcacacagcacagtgaacgtcgagcatgcacaccaggaagcccaggttcgagttctgaccgtcacttactggtggtaatgatggtactagatgtcagagtcaagggagctgaggaaggcatccaagtaaggaggtggcgtgggcactccctgacaaggctacacgagtgcaggccaggtgaggacagtgt

SEQ ID NO: 465940 - DNA, 447 bp, Homo sapiens
gaccaaggcccccaggaacttcctgttctaggacacccccagcaagtcagggcccctcctgaccagggaccaaggcttcggagaagactctggagaaggctcggaggaaactgggaagctggttctttggcccaaagtgcttttacagcctacctgtattttaccggccctcctagacggggggaactcccctgtcctctgcaggaatgtcaaaagccacccatctttaaccacctaatgctcccatcagcagagaggcacacagcacagtgaacgtcgagcatgcacaccaggaagcccaggttcgagttctgaccgtcacttactggtggtaatgatggtactagatgtcagagtcaagggagctgaggaaggcatccaagtaaggaggtggcgtgggcactccctgacaaggctacacgagtgcaggccaggtgaggacagtgt

SEQ ID NO: 465941 - DNA, 554 bp, Homo sapiens
tgcaggcgaactttaaagaatccccttcgtggatcccaccagggggcatggaaaagacgtattcacctattgataaacaggggcatttgtgcaaatgctctggcggcctatgcactgggcgaagagacctgaaccatcctattaaaaccgtgtctgatctaggactcactcttgacgcaacttctgctaagctatacgacttccaccgtagcgcacaatatcaaacttgaccaggtccctgaacttgacgtagttggacaaggggatcttgttgacattgggtctcttctttacggtggtcatcccacggtctcatgtaatgatgacgctgaggtgctctgcaggctgtgcttctcagtggctcccaccagatacccgatggtcctgtcgatttgctgaatcatcaacttccttttctctgcctctggcccgaatcgatgtcccacgttatctggctctctgtagcacagagtcacaaaatcaaagtcttccttggtgaaccagttcatgacggtatcgatgttctccttccgctctgtctcgttgctgcttgg

SEQ ID NO: 465942 - DNA, 1869 bp, Homo sapiens
cggggctgggctcaggggccgagacctagctgggcttggggcggggccgagacggagcgaggggtccagggtgtgggaaacggggaggggtttgaggaggggatcggaatgtggctcaagttcgggaggcgttacctgcggagggtttgaggcaggcccaggagcgagcccatggtcttccgacgcggggccaggggcgggccccaggatccggagcttcgtgcggggccgagtccaggtttggggcccgggaggcggggccagttagggcgagggtccctgggatcgtcgggtcaggccttgggctaacgtaggcactctcgcagttcctccgccttcaggaaggtcttttcagcaggggccttacgggtgcatgcttcggtcctggaggccttatcctagcctcctctccatcagcgccacccgtctggggcccgaaaggagggagctttccctctgtcccccagcctttggactgtcagcaaacaagccattcgttcatcaaatactttttaagcgcctaccatgtgcctgacaagggagatgtaacggtgagaaaaactaggtgtggtccaggcccttcaggggctcaggtgctcgtggaagaagtggacattgaagtacttatcacacaaatgaggataaaagtacgatagcgatatctaccacgaagctgttgttccccaccagaaccaaatgagcgcaagatctgacaaagaaaaaaaaaggttcatcttttattcctccaaacactttcatttaaatcaagaggatgggatgtggttattgctgtgtttttagacagaatcaacggtttctgggtctgagatgttgcatacaccttctcagtccctgtatcctgagatggagtcacctgagaatccacagcaactctctgcctgaaggagacaagaaaaaccaacgggaacaggttagttatactgataaatcctgggcttattttattaactcacataatagctattgtctttcctccaaggagcaaaagggcatatacggtcaatgccatatctttgaaaatttaaactacaaggacactgctctctgtggtggtggagagaataccaaggatttaaaggtctttaagaaagagaatgtagaaagcgtacccattggaaacagcacgatgatgataatcttcttaaaggctgcgtgtccagagtttgttccttctgatgctcggatgtgttcagagtttcttccttctggtggttttgtggtctcgctggcttcaggagtgaagctgcagaccttcaaggtgagtgttacaactcttaaggtggggcgtctggagttgtttgttcctcccggtgggttcatagtctcgctggcttcaggagtgaagctgcagaccttcgagaacccggtcatgtttagcgatatggaagtgttctggaaactcctccttcttgtagacgtggaggtgacggtgcgcattcttcagtgcctggtaaagggcttcctcttgccccaacttgggcaggggcatcccaaagccaccgtagcgcacaatatcaaacttgaccaggtccctgaacttgacgtagttggacaaggggatcttgttgacattgggtctcttctttacggtggtcatcccacggtctcatgtaatgatgacgctgaggtgctctgcaggctgtgcttctcagtggctcccaccagatacccgatggtcctgtcgatttgctgaatcatcaacttccttttctctgcctctggcccgaatcgatgtcccacgttatctggctctctgtagcacagagtcacaaaatcaaagtcttccttggtgaaccagttcatgacggtatcgatgttctccttccgctctgtctcgttgctgcttgg

SEQ ID NO: 465943 - DNA, 996 bp, Homo sapiens
agtccactctataggatcccctagcgtatggaataaattataagtcgttggggaaggaacagattatttgatgaagggggttgtgaaattgggtattttaaaaaatctatttatatctttgctttggtgacacaccaaaatatctttcatacggattggatttaagtatatatatttaaagctctaagcgagaaaaaaaatgtggagaaaatttgatctctgagaaagaggattttttttaagcctaaaagccaaaaactctaagtgattgctcaacttaagtacataacagtattcattttactgaagaattacaaataactaataatgatcactagaacagaaaaatgtcaaaagaaaaaacacacggtattcattgtcctcttataaaattaagaaagatttagaaaatgcaaatactcagtgctcataagaatatggttagattttcaacactttctagaaggaaaaatgttaaaataaattccaaagaaaaaattttttaaatggtttggtttttacatatactggggaaacttactatttaaagactagagttaattatttcaaaataaaaatagtctttctaattttagtttcataatgttggtttttaatctttgtttgattttaaacaaccttttagtctttgggctgtccaaaattataaattatatgtctgtaattcactattgttaatcatacagttctccatataaaaaatggcagagagataaactggaaaaatatgccctgtgaaggggatttatgatccttaatatcccagaggaagaccataatgaggcatcttatgtaacagagaagtcatatagggcttcagtttctaaagtgctcaaattttaattcatagtgtgactttgaacaggctgctttacctctcttggtctcagtgtcttcatctgtgaaatgggagggttgggttagatcagtttcccagctgagatgcccccgcacagctgtgccaaaattctgatg

SEQ ID NO: 465944 - DNA, 2100 bp, Homo sapiens
tggtttaatccgttggtattagttatctcccagccagttaggatgaactttggctctttgtacaccaaaaggcagcagttctcttgtttatttcagatgagcgttgttgctcctcttgttggcaaggcccctgaagctgacccagtcacacagagccccaccagccctgtcattaaggtttatagcaagtccagtcaagccactgtgctgttggcatacctgctggtggggatccagttgtccttggccagcgtggaacttcctcaggagtgccaaccggccccagaatgccctggcccatgggaacctgcacttaaagatgcagcaccaacaggtgtttacccagctcctgacctgagctcagcactgcaaagaagtcggggcttaagtgaccagtgtgacaagaaccctgaaacacctaatgtacagaaggactctaggtccatggtccccaacctttctggcaccagggactggtttcatgggagacagtttttccacagagatgccacttcatctagctgctgtagctcggatttcttcctcacagataagaggatggaggttgctcttgatatgggaaatagaaggatggaggttgctcttgatatgggaaatagaagtcggagtaggagtggcaagtcccagggcctcttcgtgcaggctgttcaagggggtctcataacctaccagtccgagttagacttgttgagtcttaaaaccaagctgctttgagttgggtcttcagatgaactgggaatcaacatatttgggatggatctgtagggtgcatttaaaaggcactgaatgtttggaatggagtgcaagaattaatgttaagttaccagagaaaattgaggtattaagggatctgcgcatatagttttcaaaaatcaattaaacaaaaagcctgttttttaactgattctatagttcatttggaagactatgtatattacattatatcatatatctacatgtgtgatatatttataatagaaaaatgaagcagaaacttctactaccaaatattaaaacacattataaagtgctgataaaagatgatgatgtgggcataaaaacatgcaaataatccaacaaaatagcacttttcaaaactttttttagcgtatggaataaattataagtcgttggggaaggaacagattatttgatgaagggggttgtgaaattgggtattttaaaaaatctatttatatctttgctttggtgacacaccaaaatatctttcatacggattggatttaagtatatatatttaaagctctaagcgagaaaaaaaatgtggagaaaatttgatctctgagaaagaggattttttttaagcctaaaagccaaaaactctaagtgattgctcaacttaagtacataacagtattcattttactgaagaattacaaataactaataatgatcactagaacagaaaaatgtcaaaagaaaaaacacacggtattcattgtcctcttataaaattaagaaagatttagaaaatgcaaatactcagtgctcataagaatatggttagattttcaacactttctagaaggaaaaatgttaaaataaattccaaagaaaaaattttttaaatggtttggtttttacatatactggggaaacttactatttaaagactagagttaattatttcaaaataaaaatagtctttctaattttagtttcataatgttggtttttaatctttgtttgattttaaacaaccttttagtctttgggctgtccaaaattataaattatatgtctgtaattcactattgttaatcatacagttctccatataaaaaatggcagagagataaactggaaaaatatgccctgtgaaggggatttatgatccttaatatcccagaggaagaccataatgaggcatcttatgtaacagagaagtcatatagggcttcagtttctaaagtgctcaaattttaattcatagtgtgactttgaacaggctgctttacctctcttggtctcagtgtcttcatctgtgaaatgggagggttgggttagatcagtttcccagctgagatgcccccgcacagctgtgccaaaattctgatg

SEQ ID NO: 465945 - DNA, 1251 bp, Homo sapiens
cagttctcaacacgggcctcctgctcggaggtgatgtgattcagaccgcggctccagggtctccaaaatttccgcgtaaccaggaaccgcaggtcgaaggccagtaccgcatccaacaccgccatctgctgtgtttgtcaaatagtcttgtttttatgtggttttgtttttacaaccctttaaaaaacatcaaagccattctgacacgagggctgcatgcagccgggcagcttctgccggaggctgtggcttcctggctccttccctagagctgtccctcacttcgcctgcatgcccagaaacacattttcttatgtttccaaaataaacatgtcctgggccgtagtcacagctgggcatggtggagacacaggggacggagcaggcggcactgaagactcttccctaagttggaacacacaggacttgagtacgtgctcaacactcggtgttgtacattctggaaacacgacctcacgcagcaatcgacctcccaccactgcctcgtgcgatgtcacagagctagtgagtgcggctggcgaggacacatgcttggccgtggcaaccgcgtggcaccaaccagcgccgaaggggctgggggctgagtgcagaccccgaagaaggactggctcctcggtgctgatggctgtccttctaaaccagaggggagtccaaaagcttcagtgcaggaggaaggcagtgagtgttagccctgacctgcgctgagccctgagaagaaagcttccttcgcccgcgtcctcccgctggctgagtcagccaggaccctgctgtgcgaggtccatatggggcaggtgcagctgccaacacggccaaactgaaggttcgctcgcaccaggaccagtcgtgggtgaactctttgcacgctcttgacgtcaggtctttgtggactcagtgggaactgagaacaattccatccgtacgacgtccagatgaaccttgctggtcggagaggaaacttctgaccaccccgagctgagctttgtgttcctcaggccccgaaacacattctaggagaacatctggatgactttctgtatggcaatgactttttagatataacacgaaaggcacaattgatgaaataagtaattgataagccagacatcaataaaattaaatatatctgctctacaaaagacaagatcaggagaatgggaaggcaagccacagactggaagaaaatacttgcaaatatacatctaataaagtacggctgcccgcagaactctt

SEQ ID NO: 465946 - DNA, 1129 bp, Homo sapiens
  misc_feature (2)..(2): n is a, c, g, or t
  misc_feature (7)..(8): n is a, c, g, or t
  misc_feature (10)..(11): n is a, c, g, or t
  misc_feature (13)..(16): n is a, c, g, or t
ancatgnntnntnnnngggtgacaacaaaaaaatggaagatgctaaattctacctgaccctgcctggaaccaagatggagatggaagaaaaagagcttcaagcatctaaaaacctggtcaccttcaccccaagcaaggatagcactaaagacagctttcagattgccaccctcatctgctccacaaagctcacccagaatggcttgttaaattggcgttccaactcccagaacattaaacacaacctaaagaagttaatggaagtggatggaggagagattgttaagtttttgcaagatacactagatgcactctttaacataatgatggaaatgtcagacagtgaaacctatgacttccttgtgtttgacgcactggtatttattatttcactgataggagacatcaagttccagcattttaatcctgtacttgaaacctacatttacaagcacttcagcgccactttggcatatgtgaaactctccaaggtactgaacttctatgtggctaatgcagatgactccagcaagactgaactgctttttgctgcgttgaaagccttgaagtacttgtttagattcatcatccaatcccgagtgctctacttgagattttatgggcagagcaaagatggagatgagtttaataattcaattcgccagttatttcttgctttcaatatgctgatggacaggcctctggaggaagccgtcaagatcaaggtcagcctggcagcatcatgggtaactcttcttaggctgtggtaaggatgttctgggaccgcttagaattggccatcatgagggagaaacaaagtgaatcatggttcatgcatagcttatgaattttagtatgatttacagaaaataaaggaaaaaaaatccattttaacttctacagagcttgtattttcaagtgtcaacttgccaaagacaagctacccaattagacatcccttgaaaggccattgtgaaccctgtttgaccccatgatttcagcaaactgatcccaatgcactacaggtgacaaatttttattttttgtccctcattttacccagaagtgcaaagtcaccatctttattatcataattttttaaaaaaatatgaaatatataatccctgaa

SEQ ID NO: 465947 - DNA, 1277 bp, Homo sapiens
agccaccccgtcccagggaggaagagcactcacagctgctgctgatctccttccagggcttccgctgggactaggatcaggatgtggacacccccaatctggaccgtctagccggggagggcgtcaaggccaggtacctcatgccaccctttgtcacgatgacctcccggtcccgcttcaccgccatcccgggtaagcgccactctgcccatttcacccggtgcccatcaaagccccagcgtccgtcattcctggaataagaagcagagctcggtcaggagttcaagaccagcctggccaacatggtgaaacgtcgtctctcctaaaaatacaaaaataagctgagcttggtggcagacgcctataaccccagctactcgggagtctgatacaggagaatcacttgaacccaggaggtggaagttgaagtgagctgagatcatgccattgtactccagtttgggcaacagcacaagattttgtctcaaaaaaagaaaaaataaaagtaataaaaataaaaagatcacaaaggccttttgcctgtgccttctgccctgctccctccagccccagggacttggcctgtgctagtccagtccctccagctcactaggagcatgcagtccagtcggggagacagacaacagacaccctaacaggcacatacatcccaggacaactcgggaggcaccaaggaggaaaacgagttttccaggcacagactacagggtctacagctcccagcatgagtgacacagaagacaggagatttctgcatttccaaatgaggtacttggttcatctcagtggggagtgtcagaaagtgggtgcaggacagtgggtgcagtgcactgagcatgagcccaagcaagtcaaagaaaggggtgacagatggcacctggaaaatcgggtcactctcaccctaatactgtgcttttccaacagtcttagcaaatggcacaccaggagattatatcccgcacctggctcagagggtcctacattcacggagcctcacttattgctagcacagcagtctgagatcaaactgcaaggaggcagcaaggctgggagaggggcgaccgccattgcctgggcttcagtaggtaaacaaagtggctgggaagctcgaactgggtggagcccactgcagcttaaggaggcctgcctgcctctgtagactccacctctgggggcagggcattgccaaacaaaaggcggcagaatcctctgcagacttaaatgtccctgtctgacagctttgaagagagtagtgg

SEQ ID NO: 465948 - DNA, 3787 bp, Homo sapiens
  misc_feature (3323)..(3323): n is a, c, g, or t
  misc_feature (3329)..(3329): n is a, c, g, or t
  misc_feature (3332)..(3332): n is a, c, g, or t
  misc_feature (3336)..(3336): n is a, c, g, or t
  misc_feature (3359)..(3359): n is a, c, g, or t
tccttcagatagcagtgagaagatgtgggcaacaacagtgtccctgacttgtcaaaagcctgagtgattccctctaagttacaaagcttataagagacagaaccagtcctgaagtccattccttttttcactataccagattgagaatatcacccactgtatctcacagtatcatcttgaacatcagttgagatgatgaacatgaaagcttttaagaactgtgctattgttgacttcttcacagaatcaagcactcttttggaagagggtaatctctctccaaaaactgaggacacttaccttccccatatattgagtccagctgtgtttggtggcccaggtactaatttcaagatgccaggacgttccagttcaaattcaggttcaactggtttcatctccttcagtggtgtagagtctgctctctcctccttgaaaaacttccaagcctgtatcaactctggtatggacacagcttctagtgttgctttggatcttgtggaaagtcagagagacaaattcgagctcggtacccgtttcctgctttccttttcactgaaggttttgcagatcatcccagaaagcatgtttacatctcttctaaagatcataaagcttcagacccacgacattattgaagtgcctacccgcctggacaaagacaagctgagggactatgctcagctaggcccacgatacgaggtgctgtgtccctctgacttctgccttttcatgttaaaaactaacagtcatgaaatatcacaggcctgtgtcacctgccatattctggggaccaccagaccaattctgacttgttgtctcacatttgcaatgcgggctcttgcgtcatcagccgtcgccggcgagtggtcacatgatgcccctccctgctcccagccgcttcggtcatgtgaccgcctggggagtcaggggcggaagtcggggtctgacccgctccaggtccgggactgcggatagaagaggaccgccgccttgagggaggggtggaaactgggtgccggctccgcgcgcgacctccggccctgcgcgtgcgccgtggcgcggcccggctgacaggttctttaatggaggagccaatctctctgcacacctggtttcatctaataatatacagacaccagctctgaggccagttaatcatccccagtgtccaggcacagagtagtcggtccgcctcacaatgttggactttctagccgagaacaacctctgtggccaagcaatcctaaggattgtttcctgtggtaatgccatcattgctgaacttttgagactctctgagtttattcctgctgtgttcaggttaaaagacagagctgatcaacagaaatatggagatatcatatttgatttcagctattttaagggtccagaattatgggaaagcaaactggatgctaagccagagctacaggatttagatgaagaatttcgtgaaaacaacatagaaattgtgaccagattttatttagcatttcaaagtgtacataaatatattgtagacttaaacagatatctagatgatctcaatgaaggggtttatattcagcaaaccttagaaactgtgcttctcaatgaagatggaaaacaacttctatgtgaagcactgtacttatatggagttatgctactggtcattgaccaaaagattgaaggagaagtcagagagaggatgctggtttcttactaccgatacagtgctgctcgatcttctgctgattcaaatatggacgatatttgtaagctgcttcgaagtacaggttattctagccaaccaggtgccaaaagaccatccaactatcccgagagctatttccagagagtgcctatcaacgaatccttcatcagtatggtcattggtcgactgagatctgatgatatttacaaccaggtctcagcgtatcctttgccggagcatcgcagcacagccctggcaaaccaagctgccatgctgtacgtgattctctactttgagccttccatccttcacacccatcaagcaaaaatgagagagatagtggataaatactttccagataattgggtaattagtatttacatggggatcacagttaatctagtagatgcttgggaaccttacaaagctgcaaaaactgctttaaataataccctggacctttcaaatgtcagagaacaggcaagcagatatgctactgtcagtgaaagagtgcatgctcaagtgcagcaatttctaaaagaaggttatttaagggaggagatggttctggacaatatcccaaagcttctgaactgcctgagagactgcaatgttgccatccgatggctgatgcttcatacagcagactcagcctgtgacccaaacaacaaacgccttcgtcaaatcaaggaccagattctaacagactctcggtacaatcccaggatcctcttccagctgctgttagatactgcacaatttgagtttatactcaaagagatgttcaagcaaatgctttcagaaaagcaaaccaaatgggagcattacaagaaagagggttcggagcggatgactgagcttgctgatgtcttttcaggagtgaaacccctaaccagagtggagaaaaatgaaaaccttcaagcttggttcagagagatctcaaaacaaatattgtctttaaattatgatgattctactgctgcgggcagaaaaactgtacaactgatacaagctttggaagaggttcaagaattccaccagttggaatccaatctgcaagtatgtcagtttcttgccgatactcgaaagtttcttcatcaaatgatcagaaccattaacattaaagaggaggttctgatcacaatgcagatcgttggggacctttctttcgcttggcagttgattgacagtttcacatccatcatgcaagaaagcataagggtaaatccatccatggttactaaactcagagctaccttcctaaagcttgcctctgccctcgatctgccccttcttcgtattaatcaggcaaatagccccgacctgctcagcgtgtcacagtactattctggagagttggtatcctatgtgagaaaagttttgcagatcatcccagaaagcatgtttacatctcttctaaagatcataaagcttcagacccacgacattattgaagtgcctacccgcctggacaaagacaagctgagggactatgctcagctaggcccacgatacgaggttgccaagcttactcatgctatttccatttttactgaaggcatcttaatgatgaaaacgactttggttggcatcatcaaggtggatccaaagcagttgctggaanatggantangganagagctgtgaagcgcgtgccttngccctgataggggactgatattcaaccctcgagccaagccaagtgaattgatgcccaagctgaaagagtgggagcgaccatggatggattccatcgttctttggaatacatacaggactatgtcaacatttatggtctgaagattggaggaagaagtatctcgtatcatacattacaacgtggagcaagagtgtaataactttctagaacgaagatcaagatggcaagcatgtacagtccatcatatccaataccagttacccggggatgactcgcacgtatggcgctcgcagaaatcgcgtacggccaaaggtgtctaccggacctggtgactaactccgcagggaccgcttactaccctggacggcaggacaagcgctagaacaccacaagcgaacagcaagggccaggaatcccagtagacgtga

SEQ ID NO: 465949 - DNA, 3477 bp, Homo sapiens
  misc_feature (3013)..(3013): n is a, c, g, or t
  misc_feature (3019)..(3019): n is a, c, g, or t
  misc_feature (3022)..(3022): n is a, c, g, or t
  misc_feature (3026)..(3026): n is a, c, g, or t
  misc_feature (3049)..(3049): n is a, c, g, or t
tccttcagatagcagtgagaagatgtgggcaacaacagtgtccctgacttgtcaaaagcctgagtgattccctctaagttacaaagcttataagagacagaaccagtcctgaagtccattccttttttcactataccagattgagaatatcacccactgtatctcacagtatcatcttgaacatcagttgagatgatgaacatgaaagcttttaagaactgtgctattgttgacttcttcacagaatcaagcactcttttggaagagggtaatctctctccaaaaactgaggacacttaccttccccatatattgagtccagctgtgtttggtggcccaggtactaatttcaagatgccaggacgttccagttcaaattcaggttcaactggtttcatctccttcagtggtgtagagtctgctctctcctccttgaaaaacttccaagcctgtatcaactctggtatggacacagcttctagtgttgctttggatcttgtggaaagtcagagagacaaattcgagctcggtacccgtttcctgctttccttttcactgaaggttttgcagatcatcccagaaagcatgtttacatctcttctaaagatcataaagcttcagacccacgacattattgaagtgcctacccgcctggacaaagacaagctgagggactatgctcagctaggcccacgatacgaggtgctgtgtccctctgacttctgccttttcatgttaaaaactaacagtcatgaaatatcacaggcctgtgtcacctgccatattctggggaccaccagaccaattctgacttgttgtctcacatttgcaatgcgggctcttgcgtcatcagccgtcgccggcgagtggtcacatgatgcccctccctgctcccagccgcttcggtcatgtgaccgcctggggagtcaggggcggaagtcggggtctgacccgctccaggtccgggactgcggatagaagaggaccgccgccttgagggaggggtggaaactgggtgccggctccgcgcgcgacctccggccctgcgcgtgcgccgtggcgcggcccggctgacagggtccagaattatgggaaagcaaactggatgctaagccagagctacaggatttagatgaagaatttcgtgaaaacaacatagaaattgtgaccagattttatttagcatttcaaagtgtacataaatatattgtagacttaaacagatatctagatgatctcaatgaaggggtttatattcagcaaaccttagaaactgtgcttctcaatgaagatggaaaacaacttctatgtgaagcactgtacttatatggagttatgctactggtcattgaccaaaagattgaaggagaagtcagagagaggatgctggtttcttactaccgatacagtgctgctcgatcttctgctgattcaaatatggacgatatttgtaagctgcttcgaagtacaggttattctagccaaccaggtgccaaaagaccatccaactatcccgagagctatttccagagagtgcctatcaacgaatccttcatcagtatggtcattggtcgactgagatctgatgatatttacaaccaggtctcagcgtatcctttgccggagcatcgcagcacagccctggcaaaccaagctgccatgctgtacgtgattctctactttgagccttccatccttcacacccatcaagcaaaaatgagagagatagtggataaatactttccagataattgggtaattagtatttacatggggatcacagttaatctagtagatgcttgggaaccttacaaagctgcaaaaactgctttaaataataccctggacctttcaaatgtcagagaacaggcaagcagatatgctactgtcagtgaaagagtgcatgctcaagtgcagcaatttctaaaagaaggttatttaagggaggagatggttctggacaatatcccaaagcttctgaactgcctgagagactgcaatgttgccatccgatggctgatgcttcatacagcagactcagcctgtgacccaaacaacaaacgccttcgtcaaatcaaggaccagattctaacagactctcggtacaatcccaggatcctcttccagctgctgttagatactgcacaatttgagtttatactcaaagagatgttcaagcaaatgctttcagaaaagcaaaccaaatgggagcattacaagaaagagggttcggagcggatgactgagcttgctgatgtcttttcaggagtgaaacccctaaccagagtggagaaaaatgaaaaccttcaagcttggttcagagagatctcaaaacaaatattgtctttaaattatgatgattctactgctgcgggcagaaaaactgtacaactgatacaagctttggaagaggttcaagaattccaccagttggaatccaatctgcaagtatgtcagtttcttgccgatactcgaaagtttcttcatcaaatgatcagaaccattaacattaaagaggaggttctgatcacaatgcagatcgttggggacctttctttcgcttggcagttgattgacagtttcacatccatcatgcaagaaagcataagggtaaatccatccatggttactaaactcagagctaccttcctaaagcttgcctctgccctcgatctgccccttcttcgtattaatcaggcaaatagccccgacctgctcagcgtgtcacagtactattctggagagttggtatcctatgtgagaaaagttttgcagatcatcccagaaagcatgtttacatctcttctaaagatcataaagcttcagacccacgacattattgaagtgcctacccgcctggacaaagacaagctgagggactatgctcagctaggcccacgatacgaggttgccaagcttactcatgctatttccatttttactgaaggcatcttaatgatgaaaacgactttggttggcatcatcaaggtggatccaaagcagttgctggaanatggantangganagagctgtgaagcgcgtgccttngccctgataggggactgatattcaaccctcgagccaagccaagtgaattgatgcccaagctgaaagagtgggagcgaccatggatggattccatcgttctttggaatacatacaggactatgtcaacatttatggtctgaagattggaggaagaagtatctcgtatcatacattacaacgtggagcaagagtgtaataactttctagaacgaagatcaagatggcaagcatgtacagtccatcatatccaataccagttacccggggatgactcgcacgtatggcgctcgcagaaatcgcgtacggccaaaggtgtctaccggacctggtgactaactccgcagggaccgcttactaccctggacggcaggacaagcgctagaacaccacaagcgaacagcaagggccaggaatcccagtagacgtga

SEQ ID NO: 465950 - DNA, 487 bp, Homo sapiens
ttggaggtggtctagactttgtccctgaatttctgcaaagtatcagtgcctgaggagatgacatcagggtcaatgttaatttatagtgtagcttcttatttaaaatttaaattgggtttcctcaagctctcttcataagctgcctagtctggatttttctcttaagtaaataaatattttctgttgcttcaacagatgttcaagcaaatgctttcagaaaagcaaaccaaatgggagcattacaagaaagagggttcggagcggatgactgagcttgctgatgtcttttcaggagtgaaacccctaaccagagtggagaaaaatggtaattactgaagaggaaatactggtgtgtttggaatgtgtgcacaggttatttgaaaccttggaaactggcaggttaaaaagactttatgttctcattattgtatcctatgatattccatctttagtgttgctaataaagatctgaaggttaaatttggct

SEQ ID NO: 465951 - DNA, 2063 bp, Homo sapiens
tccttcagatagcagtgagaagatgtgggcaacaacagtgtccctgacttgtcaaaagcctgagtgattccctctaagttacaaagcttataagagacagaaccagtcctgaagtccattccttttttcactataccagattgagaatatcacccactgtatctcacagtatcatcttgaacatcagttgagatgatgaacatgaaagcttttaagaactgtgctattgttgacttcttcacagaatcaagcactcttttggaagagggtaatctctctccaaaaactgaggacacttaccttccccatatattgagtccagctgtgtttggtggcccaggtactaatttcaagatgccaggacgttccagttcaaattcaggttcaactggtttcatctccttcagtggtgtagagtctgctctctcctccttgaaaaacttccaagcctgtatcaactctggtatggacacagcttctagtgttgctttggatcttgtggaaagtcagagagacaaattcgagctcggtacccgtttcctgctttccttttcactgaaggttttgcagatcatcccagaaagcatgtttacatctcttctaaagatcataaagcttcagacccacgacattattgaagtgcctacccgcctggacaaagacaagctgagggactatgctcagctaggcccacgatacgaggtgctgtgtccctctgacttctgccttttcatgttaaaaactaacagtcatgaaatatcacaggcctgtgtcacctgccatattctggggaccaccagaccaattctgacttgttgtctcacatttgcaatgcgggctcttgcgtcatcagccgtcgccggcgagtggtcacatgatgcccctccctgctcccagccgcttcggtcatgtgaccgcctggggagtcaggggcggaagtcggggtctgacccgctccaggtccgggactgcggatagaagaggaccgccgccttgagggaggggtggaaactgggtgccggctccgcgcgcgacctccggccctgcgcgtgcgccgtggcgcggcccggctgacaggttctttaatggaggagccaatctctctgcacacctggtttcatctaataatatacagacaccagctctgaggccagttaatcatccccagtgtccaggcacagagtagtcggtccgcctcacaatgttggactttctagccgagaacaacctctgtggccaagcaatcctaaggattgtttcctgtggtaatgccatcattgctgaacttttgagactctctgagtttattcctgctgtgttcaggttaaaagacagagctgatcaacagaaatatggagatatcatatttgatttcagctattttaagggtccagaattatgggaaagcaaactggatgctaagccagagctacaggatttagatgaagaatttcgtgaaaacaacatagaaattgtgaccagattttatttagcatttcaaagtgtacataaatatattgtagacttaaacaggtattgatctatttaggaatagcttattctggtagtaaatagtggagagggaaaaggacacatagcaacgtgtaaatctctctgagttactacaaaatttcctaatttagtttatactgtatatagttgtcttttcctacctgtggcactggtcatcttaagaattttgaagttttactataatgtcctgctcttacgaggtgttgtaataaacttagtttaactaagtcatatagtttccaatcctgttatttattatcatatcctagtgtattatatgtgaaaagtgggaaaaagaacttatctttatcattaactttctgtctcttaatacacttcttaagaattcattactcattaacttttagactagatattccatgttcttctgcctttactcctagatacttgtaattcacaaatcaggactagggaatatttcttttacttggaacagcgataaatatcaaactgtggccctaaatcagtttataagactgtattcttaagagcatgaaggaccatgaact

SEQ ID NO: 465952 - DNA, 3733 bp, Homo sapiens
  misc_feature (3269)..(3269): n is a, c, g, or t
  misc_feature (3275)..(3275): n is a, c, g, or t
  misc_feature (3278)..(3278): n is a, c, g, or t
  misc_feature (3282)..(3282): n is a, c, g, or t
  misc_feature (3305)..(3305): n is a, c, g, or t
tccttcagatagcagtgagaagatgtgggcaacaacagtgtccctgacttgtcaaaagcctgagtgattccctctaagttacaaagcttataagagacagaaccagtcctgaagtccattccttttttcactataccagattgagaatatcacccactgtatctcacagtatcatcttgaacatcagttgagatgatgaacatgaaagcttttaagaactgtgctattgttgacttcttcacagaatcaagcactcttttggaagagggtaatctctctccaaaaactgaggacacttaccttccccatatattgagtccagctgtgtttggtggcccaggtactaatttcaagatgccaggacgttccagttcaaattcaggttcaactggtttcatctccttcagtggtgtagagtctgctctctcctccttgaaaaacttccaagcctgtatcaactctggtatggacacagcttctagtgttgctttggatcttgtggaaagtcagagagacaaattcgagctcggtacccgtttcctgctttccttttcactgaaggttttgcagatcatcccagaaagcatgtttacatctcttctaaagatcataaagcttcagacccacgacattattgaagtgcctacccgcctggacaaagacaagctgagggactatgctcagctaggcccacgatacgaggtgctgtgtccctctgacttctgccttttcatgttaaaaactaacagtcatgaaatatcacaggcctgtgtcacctgccatattctggggaccaccagaccaattctgacttgttgtctcacatttgcaatgcgggctcttgcgtcatcagccgtcgccggcgagtggtcacatgatgcccctccctgctcccagccgcttcggtcatgtgaccgcctggggagtcaggggcggaagtcggggtctgacccgctccaggtccgggactgcggatagaagaggaccgccgccttgagggaggggtggaaactgggtgccggctccgcgcgcgacctccggccctgcgcgtgcgccgtggcgcggcccggctgacaggttctttaatggaggagccaatctctctgcacacctggtttcatctaataatatacagacaccagctctgaggccagttaatcatccccagtgtccaggcacagagtagtcggtccgcctcacaatgttggactttctagccgagaacaacctctgtggccaagcaatcctaaggattgtttcctgtggtaatgccatcattgctgaacttttgagactctctgagtttattcctgctgtgttcaggttaaaagacagagctgatcaacagaaatatggagatatcatatttgatttcagctattttaagggtccagaattatgggaaagcaaactggatgctaagccagagctacaggatttagatgaagaatttcgtgaaaacaacatagaaattgtgaccagattttatttagcatttcaaagtgtacataaatatattgtagacttaaacagatatctagatgatctcaatgaaggggtttatattcagcaaaccttagaaactgtgcttctcaatgaagatggaaaacaacttctatgtgaagcactgtacttatatggagttatgctactggtcattgaccaaaagattgaaggagaagtcagagagaggatgctggtttcttactaccgatacagtgctgctcgatcttctgctgattcaaatatggacgatatttgtaagctgcttcgaagtacaggttattctagccaaccaggtgccaaaagaccatccaactatcccgagagctatttccagagagtgcctatcaacgaatccttcatcagtatggtcattggtcgactgagatctgatgatatttacaaccaggtctcagcgtatcctttgccggagcatcgcagcacagccctggcaaaccaagctgccatgctgtacgtgattctctactttgagccttccatccttcacacccatcaagcaaaaatgagagagatagtggataaatactttccagataattgggtaattagtatttacatggggatcacagttaatctagtagatgcttgggaaccttacaaagctgcaaaaactgctttaaataataccctggacctttcaaatgtcagagaacaggcaagcagatatgctactgtcagtgaaagagtgcatgctcaagtgcagcaatttctgaactgcctgagagactgcaatgttgccatccgatggctgatgcttcatacagcagactcagcctgtgacccaaacaacaaacgccttcgtcaaatcaaggaccagattctaacagactctcggtacaatcccaggatcctcttccagctgctgttagatactgcacaatttgagtttatactcaaagagatgttcaagcaaatgctttcagaaaagcaaaccaaatgggagcattacaagaaagagggttcggagcggatgactgagcttgctgatgtcttttcaggagtgaaacccctaaccagagtggagaaaaatgaaaaccttcaagcttggttcagagagatctcaaaacaaatattgtctttaaattatgatgattctactgctgcgggcagaaaaactgtacaactgatacaagctttggaagaggttcaagaattccaccagttggaatccaatctgcaagtatgtcagtttcttgccgatactcgaaagtttcttcatcaaatgatcagaaccattaacattaaagaggaggttctgatcacaatgcagatcgttggggacctttctttcgcttggcagttgattgacagtttcacatccatcatgcaagaaagcataagggtaaatccatccatggttactaaactcagagctaccttcctaaagcttgcctctgccctcgatctgccccttcttcgtattaatcaggcaaatagccccgacctgctcagcgtgtcacagtactattctggagagttggtatcctatgtgagaaaagttttgcagatcatcccagaaagcatgtttacatctcttctaaagatcataaagcttcagacccacgacattattgaagtgcctacccgcctggacaaagacaagctgagggactatgctcagctaggcccacgatacgaggttgccaagcttactcatgctatttccatttttactgaaggcatcttaatgatgaaaacgactttggttggcatcatcaaggtggatccaaagcagttgctggaanatggantangganagagctgtgaagcgcgtgccttngccctgataggggactgatattcaaccctcgagccaagccaagtgaattgatgcccaagctgaaagagtgggagcgaccatggatggattccatcgttctttggaatacatacaggactatgtcaacatttatggtctgaagattggaggaagaagtatctcgtatcatacattacaacgtggagcaagagtgtaataactttctagaacgaagatcaagatggcaagcatgtacagtccatcatatccaataccagttacccggggatgactcgcacgtatggcgctcgcagaaatcgcgtacggccaaaggtgtctaccggacctggtgactaactccgcagggaccgcttactaccctggacggcaggacaagcgctagaacaccacaagcgaacagcaagggccaggaatcccagtagacgtga

SEQ ID NO: 465953 - DNA, 1139 bp, Homo sapiens
cggctgatggcaccataccatttcagctttctccctgtctgctgctatcatgggtaggatggaaggagcatccctgggagctgcggctctaggcgctggcacaagactggggggcggtgcttctctgagggcacactcctcagcctttgcagctgacttatgtcagcaagctgctgcttccccgggaccaggcctgcccttgggctctggtaagaagagctatgcaaatccagggagctctcccaacactctacagcacaaagcctctgcaactttcacatattcaaactctatgcaggggtctaggcagaatatgaactctcaaaggctcattgttagcttggagaaaaaaggttacgaaaattatttttatgttccagtaacttacagttgtttcaagagagtgaagcccaaagaaataaagaagatccccattctggtagaaagctatgctaagaactgagttcttcctattgcaaatgtcagcctatcattcatttcatataatttcctaagatcgtcatgagatgcttagaacttttctgtcctaaatttatataacaatgttaaagccctcaactcaaatgttacaggtataaacatatacctgtatatgttacagtaaattgtttctaaatgagaacaaggattctctcaggagtatgtgcaataatttatcattatgttggcagagacttggagaaatataagaagtgaaaaggtcttcactttaacctgaatggctttaccataggatcaagactaccttttcatgttcattagtcatatgtaaatactcattcaactactatcctttactatcttgcaggcactgtatataaactgttgaacaaaaatgatcgctcccttcaggagatacgggtcacacatcaacatttaagtacaaagggtgacaaatggtgtaccataattggaacatatgttccctgaactgacagtactctgtctctacagcacagtccctatgaattaagatacttacagtgatgaggaatggtatgctggaaacagttttgctattttcttcaaattagctgaagtcatgctatgtctcaataaattatttctttcatcacatagcttatgtttaatactctcagactgtagcagtatgtatg

SEQ ID NO: 465954 - DNA, 1993 bp, Homo sapiens
gtggattgtcatcatatttgagtgcctagcatggtgttaggtgctggggatgtagcaacagtcagcaagggcagagtctcagtcagctctgtagagcttgtgtgctgtcatcataggtactttgagaaatgcaaaggtagaccaggtgttgccccagtacacactgacctgaacttagcatcccggagaatgaaagggacagttggggcagtggggcagcttccccccgagaagacaagcgtcttctcctctgggttcatggttcccaggtgggaattcagggcgggggagttgtatcaatatcactttaaatcaatggaaagtctaaacatagggtgctctagggttgctccatcaagcagcccggcagtcttagccgcatcctgtgtctttccatttctctttggcgtccctggtgtgtgcttcagcctgagccaaatgctcaccttgctctggggaagccatcatatttgagtttttaaaaatcataacagtatgtgtatatgagtgtgtattataagtgcgtgttccttgtgtacttacaaataaatttataatttttcaaagttatctggcggtattgctttacattttgaaagagcattacagttttagaaatgactatttatgtcattggatcagcaaacaattttacaggatgcagaaattatcgattgtattctgtatgttagtgacttactcgagatgctagagctgtcagaatgaacttagactaaaacccaggtcttctgactctatgtccatcaccctacccatgatattgacttgtagatgtcttgcccatggcatgaatcttagggaaaggtgaggagctcctagaagtagctgtcaccagaaacgggccaatgaacttcctggtccaagtcttctgtttaaactcccagttttaacattgagcgtctgctttgcaatgaacatgaaacaaggaatttgcagcattgagggtcgtacgcttcactgacttgaggtcagtgttgctggatgagcctgtttactgctgggggcagggtatgtatccccatgagtcaggggcttgattggtaggggaggtcacagaagccttttgattttgtttttcttcttttttaatgttaagacaggtaactgactagggctgcagcattttttcatgtttacagagcatcaagcatgattcaagtagttgctggaagccgccaggtcaaagtgtgcagagaacaaataccagtatgaggggagctacataaacatatgcacacatattaaacataagctatgtcatctgtagaatttaataaactaggctagatttaaaatctttccctttgatgtgtaatacgtcatggttttgaacattttcagaaaatggggccacttctcagttactccagataaaacttactcttcaaatatgacagcattttcttcaccaatgtattttcttcactcatttttcaaaatccctttattgaccctgggtgccagatgagtgcaagttggggcacccatacaaacccacattttaaacttctttgtttgtttcagggaaggtttgaaatagtgtaaattttctcttagtccaagaataggctatttccagcctgagctatagtaccttgttaaactcagtgaaagctacacctttcaacttcgtaagcttggttgccaaaatgtagttcgtttggaatgaattattagaatatcacacacacacacacacacatacacacacacacacacacacattcaaatgtgattatctactggaaagtcagtagataaatcagttgactagaaagtttatggtttgtattatttttgtaatgttatttcatatttcccacccttatattcccctctttgagaatgataatttgagaagttagctatgtattagccttagtaagaaactgtattatgtttatcagagaatgaaacgaaacaaattattcctcctcttttagctactcccctcccccgccccacacacttt

SEQ ID NO: 465955 - DNA, 848 bp, Homo sapiens
cagatttcatgttgttcaaacacacatgctttacaaacaatttgtacaattaacacaatcatcacagggtcctgaggtgacatacatcctcagcttatgaagatgacaggattaagagattaaagtaagacaggcttaagaaattataaaagtattaattgaggaagtgataaatgtccatgaaatcttcacaatttatgttcttctgccagggcttcagcgggtccctctgttcgtggtccctggcttcccgcaacaaactgtccactgccatcagattatatttgtaacttttactgatgctcctttttttcatgttagaatgagatagaaaaacatctcctgagagagacatttgaggactccaatctgatactcaaagagattctctggtgaccaaaagaagtcttcagtgatggaataacttcagttaagaattcctggtttaagattttacagaaatatgttgaacatcaggtatattgtctttaaaaacattttcaggaataggacactttggatgcagagctgtcattgctgttcattttgtatttagtttgaatgctttgtccctttaagagagattcatagtctctggaaacaattatctcttttataagaattatataagaattaagtagcatgaaggattataaagtaccatctggaattgaaagagagaggagacttactactaatcatcactgaccttcatttaacacatttttgggcaccttctgggtgccagatcttgttaggcacaaattactgaaacagagccaccaagaattaaaaatatgcatatgaatgtttcttaaaagtcactgcagctatgcatattatgaata

SEQ ID NO: 465956 - DNA, 1737 bp, Homo sapiens
ctttgcaataaaaatattattagtgaatgtacaaggagtgtaatattttggttttgctagtggttcttaaggtacaacagcattttgaatttgaatatcagaccaaaatggatggtcttgttacattgaagcacttcaagactccctttttaaaagtggagccctttcttcctggacactatgaagtttttgatttaaagccaaatgaccaagttgcatccgtggtaatggttaaatatcatcactgtcgggatgaacccccacacgtgctctattacaatgtggagaaactctttccagggcttggactccagcttgttgctgctaccctgttgaagcagctcaaagaggcccaagtacagtatcctctccagacatttgtaattggcatggaagacagccctgatttactggctgctagaaaggtggcaaatcatattggaagtgaacatcatgaagttctctttaactctgaggaaggctttcaggctctggatgaagtcatattttccttggaaacttacaacattacaacagctgatgcttcaggagaggctgatcagataatgaaggccgtgtgggaaaggaaggttgaggaagaggtggagggtcgtcagattcagaaaactgtggtaactgcagggggtaaagggattgtgtcagccagtctgagaaataaagagaaagagtacaagaaagaaattttacagctgggccactgggggtgacatcacatttcagtaggttctgtgatgccccctcagccacaaaaccagcaagtttttattaggaacttcaaaaggggaagggggtatgaacagggaggtgccctgatttcatattgttcaaacacacatgttttacaatcagatttcatgttgttcaaacacacatgctttacaaacaatttgtacaattaacacaatcatcacagggtcctgaggtgacatacatcctcagcttatgaagatgacaggattaagagattaaagtaagacaggcttaagaaattataaaagtattaattgaggaagtgataaatgtccatgaaatcttcacaatttatgttcttctgccagggcttcagcgggtccctctgttcgtggtccctggcttcccgcaacaaactgtccactgccatcagattatatttgtaacttttactgatgctcctttttttcatgttagaatgagatagaaaaacatctcctgagagagacatttgaggactccaatctgatactcaaagagattctctggtgaccaaaagaagtcttcagtgatggaataacttcagttaagaattcctggtttaagattttacagaaatatgttgaacatcaggttgatgatgcaatgatggcaaatgcagcccagaaatttcccttcaatactcctaaaaccaaaggatactactaccatcaaatccttgaacaccatttcccaggccaggctgactggctgagccattactgggtgcccaagtggatcgatgccactgacccttctgcccacacactgacccactacaagtcagctgccaaagcttaggtgctctttatgctgtaatatgaaagcaaatatttcttcttattgtatggggactatgggtagataggggaacaatgaaagtcaactcaggctaacttgaatgtgaaaaaaataaaagtcctaaatctaaaacattgctatagtcatttatgttcatacagtctcctcataagaggtaactagaaa

SEQ ID NO: 465957 - DNA, 1437 bp, Homo sapiens
gagtggtctcagggctacggcttgtcggtgcctcgccgcacagtcccctttgcattgaaggacacggtcttacggtgtaggagcatttttgaggtgcattcctggatttggaggcgaacccccaatggttacctccacagaggctttgcgaagggcgctcactgacttaggtgaagagcgaaggctcaagactgtgccgctttatagtggccccttgacgtccagaagttccccccagcgccggtcataagcactcccgccgcctgggccccgccctgcctgccaggcgccctccagcctcagctcccggacgcccggcgtggccgctttctcgcgtcttgctgacccgggccgggggcgtgtgctcctcctgcagcggacggaagatgctgggccacgcaagtttccctgggcttggttaaccaccccgaagcccatttccagaaggaaagggtgttgaggaggagggatagaaagtcgagaagagggccggggtcttgctctgttgctcaggctggagtgaagtagagcattcacagcccactgcaaccttgaacacctgggctcaagcaatcctcctgcctcagcctcctgagtaactgggaccacagatgtgtaccaccatgcccagctacatgtctttcttttggggggacagcagaaacctgggcagaggaggaatcctgatacccagttctgaaacaaagtggcagaatttgtaatacagaagaaggatcttgtgactggtattctgttatccacaagagtaaatgttcccaaataaacaaaactgggatatgaaatggtggagtgtgtggtgcctgttcatgaaaaaaaaaggtctagattgcaagatattccctgatgatatgggaatctgtgatgatatgggaatctgtgatatgggaatccctgatgatatgggaatatggctctgtgtccccacccaaatctcatctcaaattgtgatccccatgtgtccgaggagggaccaaatgagatcttcaaaaccaatagaagatatacaaaccaaacattggtttaaagatgtaacaccaattatacataatctcttccagaaattagaagaggaagaaacatattgtaaatcattctatgagtttgtgacatatgccttaggggatgctgatgcaggcctcatgggcacaggcagcacagagataactattgtcatcatcgtttgccagttgtaagcactctaagcatcacaacagtgcttacagttcacctgaggttccacctgattcacatatttatttgtaatgatatctggaaattaacaattaaaatttttaaatttatatttttaaattagaacaaagtaacatgtatgtcctggttaatataaatcatatattgctgctggacttgtaacaaaatcaacagttccttcaccccatccttcctcacccttga

SEQ ID NO: 465958 - DNA, 3620 bp, Homo sapiens
tcaaagggggtttgttctctggctgacagggctcgcagcctgccagagcgcagctagagtttctgggcagaggagggagaagcaccccgcccatccccgccggcgcctcgcctacgtcactgcttcgagccgcagaccccctccctccttcccggtcgcggtagctttgacagagcgcaatggcggcaaccgcgtctgcaggggtgccggcgaccgtgtcagaaaagcaagagttttaccagcttctgaagaacctgatcaatccaagctgtatggtgcggaggcaagcagaggaaatctatgaaaatatcccaggtctgtgtaagactaccttcctcttagatgccgtcagaaatagaagagcaggttatgaggtgagacaaatggctgccgcactgctacgacggcttttgtcctctgggtttgaggaggtttatccaaatctgcctgctgatgttcagagagatgtcaagattgaactgattctggctgttaagttagaaacacatgctagcatgaggaaaaaactttgtgatatttttgcagtgctggccaggaatttgatagatgaggatggcactaaccactggccggaaggtctgaagtttcttattgattcaatctactccaaaaatgtggttctatgggaagttgcacttcacgttttctggcactttcctgggatttttgggacccaagagcggcatgatttggatatcatcaaacggttgttggaccagtgtattcaagatcaagaacatccagcaatcaggacgttatccgctagagctgcagctgcatttgtacttgctaatgagaataatattgctcttttcaaagactttgcagacttgcttcctggaatcttacaggctgtgaatgactcatgctaccaggatgatgattcagtgctagaatcccttgttgagattgcagataccgtacctaagtacttgggtccttatttagaagatactctacagttgagtttgaagttatgtggagactctaggcttagtaatctgcagcgccagctggccctcgaagttatagtgaccttgtctgaaactgccactccgatgttgaaaaaacatacaaatattattgcacaggcagttcctcatatattagcaatgatggttgatctacaagatgatgaggactgggtaaatgctgatgaaatggaagaagatgattttgacagcaatgcagttgctgcggagagtgcactagacagactggcttgtgggcttggtggaaaagttgttttaccaatgaccaaggagcatatcatgcagatgcttcagagccctgactggaagtatcgacatgctggattaatggccttatctgccattggagaaggatgccatcaacaaatggaatcaattctagatgaaacagttaactccgttttgctttttcttcaggatcctcatccaagggtgagggctgcagcctgtactacacttggacagatggctacagattttgcacctaatttccaaaagaaatttcatgaaacagtgattgcagctctgttacgtaccatggaaaatcaaggtaatcagcgtgtgcaatcacatgcagcttctgctcttattatttttattgaagactgccctaaatcattgctagttctatatgtggatagtatggtgaaaaatctacattccgtcttggtgattaaacttcaagagttgattcggaatggaactaagttggctttggaacaacttgtgacaaccattgcatcagttgcagatacaatagaagaaaaatttgtcccatattatgatatattcatgccctcactaaagcacattgttgagcttgctgttcagaaggaactcaagcttctgagaggaaaaactatcgagtgcattagccatattggtcttgctgttgggaaggaaaaatttatgcaagatgcatcaaatgtgatgcagctgttgttgaagacacaatcagacttaaataatatggaagatgatgaccctcagacctcttacatggtttcagcatgggctagaatgtgtaaaattcttggaaaagattttcaacagtaccttccactggttatcgagcctcttattaagactgcttcagctaaacctgatgttgctctcttagacacacaggatgtggaaaatatgagtgacgatgatggctggcaatttgtaaatcttggagaccagcagagttttggaattaaaacttcaggacttgaagcaaaagcaactgcttgccaaatgttggtttactatgctaaggagttaagggaagggtttgtggaatatacagaacaagttgtgaagctgatggttcctttactgaaattttatttccatgacaatgttcgagtggcagcagcagagtccatgccttttctcctggaatgtgcaagaattcgtggcccagagtatcttgcacagatgtggcaattcatatgtgaccccttaatcaaggctattggtactgaaccagatacagatgtgctctcagaaataatgaattcttttgcaaagtccattgaagttatgggagatggttgccttaatgatgaacacttggaagaactgggaggaatactgaaagcaaaacttgaagggcactttaaaaaccaagaattgagacaggtgaaaagacaggaagaaaactatgatcaacaggttgagatgtctctgcaagatgaggatgaatgtgatgtttatattctgaccaaagtatcagatattttgcactcattatttagtacttataaggaaaagattttaccatggtttgaacaactacttccattaattgtaaatctaatttgttcaagtaggccatggccagacagacagtggggattgtgcatatttgatgacatcatagagcactgcagtccaacttcatttaaatatgtagaatattttcggtggccaatgctactaaatatgcgagataacaaccctgaagtcaggcaagctgctgcttatggcctgggtgtcatggcacagtttggtggagatgattatcgttctttatgttcagaagctgttccactgctggtaaaagttattaagtgtgcaaattccaaaaccaaaaaaaatgtcattgctacagagaactgtatctcagcaatagggaagattttgaagtttaagcctaactgtgtaaatgtagatgaagttcttccacactggttatcatggcttccactgcatgaagataaagaggaagctattcagactttgagttttctctgtgacctaattgaaagtaaccacccagttgtaattggtccaaataattccaatcttcccaaaataatcagtataattgcagaaggaaaaattaatgagactattaactatgaggatccttgtgccaaacgcctagctaatgtcgtgcgtcagttgatgtaaagtatataaattgttgctatttgtttgaactattattgatgctagccaagcagtatacttgatgtgaagatgtcatgctatcacaatatgctaagagctcacaaaaataagatagaatttccaggacaaacatctttggaattgtaattctaggttttaacgagggttctgtgtacctagaaaaaataatatgtgcgtctttcaaat

SEQ ID NO: 465959 - DNA, 3119 bp, Homo sapiens
tcaaagggggtttgttctctggctgacagggctcgcagcctgccagagcgcagctagagtttctgggcagaggagggagaagcaccccgcccatccccgccggcgcctcgcctacgtcactgcttcgagccgcagaccccctccctccttcccggtcgcggtagctttgacagagcgcaatggcggcaaccgcgtctgcaggggtgccggcgaccgtgtcagaaaagcaagagttttaccagcttctgaagaacctgatcaatccaagctgtatggtgcggaggcaagcagaggaaatctatgaaaatatcccaggtctgtgtaagactaccttcctcttagatgccgtcagaaatagaagagcaggttatgaggtgagacaaatggctgccgcactgctacgacggcttttgtcctctgggtttgaggaggtttatccaaatctgcctgctgatgttcagagagatgtcaagattgaactgattctggctgttaagttagaaacacatgctagcatgaggaaaaaactttgtgatatttttgcagtgctggccaggaatttgatagatgaggatggcactaaccactggccggaaggtctgaagtttcttattgattcaatctactccaaaaatgtggttctatgggaagttgcacttcacgttttctggcactttcctgggatttttgggacccaagagcggcatgatttggatatcatcaaacggttgttggaccagtgtattcaagatcaagaacatccagcaatcaggacgttatccgctagagctgcagctgcatttgtacttgctaatgagaataatattgctcttttcaaagactttgcagacttgcttcctggaatcttacaggctgtgaatgactcatgctaccaggatgatgattcagtgctagaatcccttgttgagattgcagataccgtacctaagtacttgggtccttatttagaagatactctacagttgagtttgaagttatgtggagactctaggcttagtaatctgcagcgccagctggccctcgaagttatagtgaccttgtctgaaactgccactccgatgttgaaaaaacatacaaatattattgcacaggcagttcctcatatattagcaatgatggttgatctacaagatgatgaggactgggtaaatgctgatgaaatggaagaagatgattttgacagcaatgcagttgctgcggagagtgcactagacagactggcttgtgggcttggtggaaaagttgttttaccaatgaccaaggagcatatcatgcagatgcttcagagccctgactggaagtatcgacatgctggattaatggccttatctgccattggagaaggatgccatcaacaaatggaatcaattctagatgaaacagttaactccgttttgctttttcttcaggatcctcatccaagggtgagggctgcagcctgtactacacttggacagatggctacagattttgcacctaatttccaaaagaaatttcatgaaacagtgattgcagctctgttacgtaccatggaaaatcaaggtaatcagcgtgtgcaatcacatgcagcttctgctcttattatttttattgaagactgccctaaatcattgctagttctatatgtggatagtatggtgaaaaatctacattccgtcttggtgattaaacttcaagagttgattcggaatggaactaagttggctttggaacaacttgtgacaaccattgcatcagttgcagatacaatagaagaaaaatttgtcccatattatgatatattcatgccctcactaaagcacattgttgagcttgctgttcagaaggaactcaagcttctgagaggaaaaactatcgagtgcattagccatattggtcttgctgttgggaaggaaaaatttatgcaagatgcatcaaatgtgatgcagctgttgttgaagacacaatcagacttaaataatatggaagatgatgaccctcagacctcttacatggtttcagcatgggctagaatgtgtaaaattcttggaaaagattttcaacagtaccttccactggttatcgagcctcttattaagactgcttcagctaaacctgatgttgctctcttagacacacaggatgtggaaaatatgagtgacgatgatggctggcaatttgtaaatcttggagaccagcagagttttggaattaaaacttcaggacttgaagcaaaagcaactgcttgccaaatgttggtttactatgctaaggagttaagggaagggtttgtggaatatacagaacaagttgtgaagctgatggttcctttactgaaattttatttccatgacaatgttcgagtggcagcagcagagtccatgccttttctcctggaatgtgcaagaattcgtggcccagagtatcttgcacagatgtggcaattcatatgtgaccccttaatcaaggctattggtactgaaccagatacagatgtgctctcagaaataatgaattcttttgcaaagtccattgaagttatgggagatggttgccttaatgatgaacacttggaagaactgggaggaatactgaaagcaaaacttgaagggcactttaaaaaccaagaattgagacaggtgaaaagacaggaagaaaactatgatcaacaggttgagatgtctctgcaagatgaggatgaatgtgatgtttatattctgaccaaagtatcagatattttgcactcattatttagtacttataaggaaaagattttaccatggtttgaacaactacttccattaattgtaaatctaatttgttcaagtaggccatggccagacagacagtggggattgtgcatatttgatgacatcatagagcactgcagtccaacttcatttaaatatgtagaatattttcggtggccaatgctactaaatatgcgagataacaaccctgaagtcaggcaagctgctgcttatggcctgggtgtcatggcacagtttggtggagatgattatcgttctttatgttcagaagctgttccactgctggtaaaagttattaagtgtagaaatgaccaggttttgccagctctaaatgtctgcctcaaaggc

SEQ ID NO: 465960 - DNA, 3496 bp, Homo sapiens
  misc_feature (3495)..(3495): n is a, c, g, or t
tcaaagggggtttgttctctggctgacagggctcgcagcctgccagagcgcagctagagtttctgggcagaggagggagaagcaccccgcccatccccgccggcgcctcgcctacgtcactgcttcgagccgcagaccccctccctccttcccggtcgcggtagctttgacagagcgcaatggcggcaaccgcgtctgcaggggtgccggcgaccgtgtcagaaaagcaagagttttaccagcttctgaagaacctgatcaatccaagctgtatggtgcggaggcaagcagaggaaatctatgaaaatatcccaggtctgtgtaagactaccttcctcttagatgccgtcagaaatagaagagcaggttatgaggtgagacaaatggctgccgcactgctacgacggcttttgtcctctgggtttgaggaggtttatccaaatctgcctgctgatgttcagagagatgtcaagattgaactgattctggctgttaagttagaaacacatgctagcatgaggaaaaaactttgtgatatttttgcagtgctggccaggaatttgatagatgaggatggcactaaccactggccggaaggtctgaagtttcttattgattcaatctactccaaaaatgtggttctatgggaagttgcacttcacgttttctggcactttcctgggatttttgggacccaagagcggcatgatttggatatcatcaaacggttgttggaccagtgtattcaagatcaagaacatccagcaatcaggacgttatccgctagagctgcagctgcatttgtacttgctaatgagaataatattgctcttttcaaagactttgcagacttgcttcctggaatcttacaggctgtgaatgactcatgctaccaggatgatgattcagtgctagaatcccttgttgagattgcagataccgtacctaagtacttgggtccttatttagaagatactctacagttgagtttgaagttatgtggagactctaggcttagtaatctgcagcgccagctggccctcgaagttatagtgaccttgtctgaaactgccactccgatgttgaaaaaacatacaaatattattgcacaggcagttcctcatatattagcaatgatggttgatctacaagatgatgaggactgggtaaatgctgatgaaatggaagaagatgattttgacagcaatgcagttgctgcggagagtgcactagacagactggcttgtgggcttggtggaaaagttgttttaccaatgaccaaggagcatatcatgcagatgcttcagagccctgactggaagtatcgacatgctggattaatggccttatctgccattggagaaggatgccatcaacaaatggaatcaattctagatgaaacagttaactccgttttgctttttcttcaggatcctcatccaagggtgagggctgcagcctgtactacacttggacagatggctacagattttgcacctaatttccaaaagaaatttcatgaaacagtgattgcagctctgttacgtaccatggaaaatcaaggtaatcagcgtgtgcaatcacatgcagcttctgctcttattatttttattgaagactgccctaaatcattgctagttctatatgtggatagtatggtgaaaaatctacattccgtcttggtgattaaacttcaagagttgattcggaatggaactaagttggctttggaacaacttgtgacaaccattgcatcagttgcagatacaatagaagaaaaatttgtcccatattatgatatattcatgccctcactaaagcacattgttgagcttgctgttcagaaggaactcaagcttctgagaggaaaaactatcgagtgcattagccatattggtcttgctgttgggaaggaaaaatttatgcaagatgcatcaaatgtgatgcagctgttgttgaagacacaatcagacttaaataatatggaagatgatgaccctcagacctcttacatggtttcagcatgggctagaatgtgtaaaattcttggaaaagattttcaacagtaccttccactggttatcgagcctcttattaagactgcttcagctaaacctgatgttgctctcttagacacacaggatgtggaaaatatgagtgacgatgatggctggcaatttgtaaatcttggagaccagcagagttttggaattaaaacttcaggacttgaagcaaaagcaactgcttgccaaatgttggtttactatgctaaggagttaagggaagggtttgtggaatatacagaacaagttgtgaagctgatggttcctttactgaaattttatttccatgacaatgttcgagtggcagcagcagagtccatgccttttctcctggaatgtgcaagaattcgtggcccagagtatcttgcacagatgtggcaattcatatgtgaccccttaatcaaggctattggtactgaaccagatacagatgtgctctcagaaataatgaattcttttgcaaagtccattgaagttatgggagatggttgccttaatgatgaacacttggaagaactgggaggaatactgaaagcaaaacttgaagggcactttaaaaaccaagaattgagacaggtgaaaagacaggaagaaaactatgatcaacaggttgagatgtctctgcaagatgaggatgaatgtgatgtttatattctgaccaaagtatcagatattttgcactcattatttagtacttataaggaaaagattttaccatggtttgaacaactacttccattaattgtaaatctaatttgttcaagtaggccatggccagacagacagtggggattgtgcatatttgatgacatcatagagcactgcagtccaacttcatttaaatatgtagaatattttcggtggccaatgctactaaatatgcgagataacaaccctgaagtcaggcaagctgctgcttatggcctgggtgtcatggcacagtttggtggagatgattatcgttctttatgttcagaagctgttccactgctggtaaaagttattaagtgtgcaaattccaaaaccaaaaaaaatgtcattgctacagagaactgtatctcagcaatagggaagattttgaagtttaagcctaactgtgtaaatgtagatgaagttcttccacactggttatcatggcttccactgcatgaagataaagaggaagctattcagactttgagttttctctgtgacctaattgaaagtaaccacccagttgtaattggtccaaataattccaatcttcccaaaataatcagtataattgcagaaggaaaaattaatgagactattaactatgaggatccttgtgccaaacgcctagctaatgtcgtgcgtcaggtacagacttctgaagatttatggttggaatgtgtatcacaacttgatgatgaacagcaggaagccttacaggagttgctaaattttgctng

SEQ ID NO: 465961 - DNA, 1130 bp, Homo sapiens
tgggtggagtgtggacaagcggcctttgcatccttcgccgctggttggaaatgcagttttggaccccctcctcccccgccagggctcccacccaaccggaatctgcattttaaccggacacccaggcgattcctgtgcacattaagtaagaatcctgacattctaggatggagagtgaggaggatgagttgagtccatgcactgggtgatcttggaaaggatggagctgtcactccagtgacaccaagcttggagctctgcctgttgtaagaattcccttctctcaagacacacatgtggggcatgtcattgaacaaggctaaagcatcatgaaatacagccaaccatttcttccttgagcaatcaaattgctagtttgggtttgatggtgtgttttgcttttagaagcactgtcatcctttcccacaatgcagagaattgggaggacattaaatctcatggccctcactttcaaaatgtgctcaaaacgctgcctagtagttctcttaatcgccaattggtcctagacaccaaaatctcttacctagattattgccatagcttcataactaaccctatcatcctcaactcttcctgtcccccagtagacactcaacagaaatcttggaacttttgcacaagaagggacttgtgggtgagaggaaaaaatgagcctctgatggaaggaggtaacgagggaaaaagaagtagagagcagaaaggaagcatgagtggacactcagaagttgttttaaccttcccagaagcttccctttataaacagctagacagcttggttcaaaccaatatttggatttttcctgaaactagctaaaataaaaaggaaaggtactcttatatcctaaacacgtggagatttgtgcttagtttaaatgtagtttctccctgtcactgaacatatttggacacatgaatttcaaattgctttctctttcaataatagtgtgatggctggcagtgacaacaaaaaaaattaacatcttaacttaaaacataaattgttttaaagaaagaaatctgaatacataattgtacagataatactcagatgtagccaaaattgtgaggattggcaaatggctaatgattgggaaacaataaaaactgcc

SEQ ID NO: 465962 - DNA, 873 bp, Homo sapiens
agtggaaaaaaaaaaggcaagaatgcctgtttggccaaaagtaatcataagatggttgaaattaaaagtacactgcaggagggcctggatttcagtcagttggagaagggagaagtgcgtgcgcccgtgcccaggcgtccagcagagggcagggcagctgcatctgagcgccgctggagggcagggctggaacaggatgtggctgagccccgagcggggaagagcaggtgctgctcccctgcagaggggaaatctccttccttaccataagcagataggcagtgcctggggctgtgcaattgcagggtttatacttgctagaaaagagaacagaattttacttgtaaagaaaactaaaatgaagctcagcgctttccttacatgcaggaaagatgggtccaggccatggcccttgccccttaagtcgtcctagggtgtcccctccacaccctccagctacgagggactcacaattcctttcccaagctgcccatgcgcatccccagggccctttgctcctcttcctgggcctatgccccagaggctgggcttggcccccatttgtatccttagtccgaggaggactggcccagcggtagcttttgagagtcacaggctgcaatggtgcgggagggagccgcggctagcggaaagcgagaccacccggtccaccaccgcatcctagaggggcactcagaaaggcccagagctggaacgtcatgcctggactccctcactatttggaaagacttctttggagtcctgtcatctaagctacaataaagctttgttcttcattggaaaaatcttgctggaaaatctgaatctagctgtggtgttgtaatataggtgggttgggctgccttcaaaagg

SEQ ID NO: 465963 - DNA, 566 bp, Homo sapiens
tgacctacagatattgacactgtgattgaaaaacttctggattcaggaatggggtgtgtttatttttataatatccagccaaatatcaaaggtctagagaagcttctacaggcatatcttggagatattgtgggtctggggccaacactcagctcccaacctcaggactgtgtgctcatagtgcagtggcagcagcattcttcctcatttgcatatgccagcagcagtgacagcgcagcagggtacatgctcatcagctgtgacagggtaccagtgggttactgggtgcctgcctccgtgcaggtgttcaccacagtggtggagacagcagggttccagagggctaaggtctcctatgggagcaagtcgagcctagggagatgggcttccctggcagtgctctactacagacactcccacaccaagagctctgggctccacttcagctggcatgaggctcctaccacttctctaagcagccagaggcccgtggtgaaagtggcttgctccttgccagttcaactcaccagttcccctggagtctttaagggccaggaatgagtccc

SEQ ID NO: 465964 - DNA, 663 bp, Homo sapiens
tagagctgctgctgtagcttagctagagacccgctgctgttgcatcatggaaaagtgccacatacgtgcacatgtgaaagaatacgcagaccttcatgaaacgcagcaagaggaactcggcgcaacgcagtgttctgacataaatgaggaacgcagctgtgatgaaaaggatgaagaagccccagaggaagtgatgccggcaaagacagcaacaaacttcatattaaaggaactcttattaactagtttgcaggactgtgtccagagttggttccttcggtgggttcgtggtctccctgacttcaagaatgcagctgtggacctttctgaaaatgtgaaactccgaccaagtgcagtggctcatgcctgtaatcccagctcgttgggaggccgaggcaggtggatcacaagtcgcaggtggcgtgatttgatttgtgtgaaggcaatgaaatgatacacagatacaccgaagcctcccaaaagaatcctggttccaagactcaagaagatggattaatgtttttccattaattgttggaatttatgccattttttactatgtgccatcaattttaaagcacttctgaaaagacataacaatctaaatgagatggcattttaaattcataaaaatatagtattttcctcaacttttatacattt

SEQ ID NO: 465965 - DNA, 372 bp, Homo sapiens
ccttgtttccactcaaaaactacaagtatagttctttgaaaatgtgaaactccgaccaagtgcagtggctcatgcctgtaatcccagctcgttgggaggccgaggcaggtggatcacaagtcgcaggtggcgtgatttgatttgtgtgaaggcaatgaaatgatacacagatacaccgaagcctcccaaaagaatcctggttccaagactcaagaagatggattaatgtttttccattaattgttggaatttatgccattttttactatgtgccatcaattttaaagcacttctgaaaagacataacaatctaaatgagatggcattttaaattcataaaaatatagtattttcctcaacttttatacattt

SEQ ID NO: 465966 - DNA, 3058 bp, Homo sapiens
ttggctgccttgggtgataactgctccagtttgcaggagtggctgcagactataccacttcacacccgctaggatggccgtaattaaaaaaacaaaaacaaaaacaaaaaatctggcaataacaaatgttggcaaggatgtggagaaattggggtcctcatacattgctgggtcatatggagttggaaaagatgtgacacaattggactctgaacttcctcaaggccagaggaaggcaggacataaaaaacagcacctgatccatagcgtctgcaagacaaaaaccagttacctaagggaagaacagcactctttgtcagtgagtccgtgtctgtccctgaatgccaagatattgctaagttacactttgacctctactgcggagctttcaagcttcgctgttgtgacaagtgctgccactgacatcggctggtttcataacgcctggccccacgagtgcttcatgctagatggctgaattttgatgaccaccatgaggagggtagaaatacagccttgatgagagaatttatgttttcttaacagtgtgacccacatagccaatgttagcaagcactggaagagaacactattaattacagctttaagtggccactaaacatgcagaagatttcctctgaactgagagttgaaggatatggtgcaacaagcccatttcctggcactggaaagcggagagagagctgcaggagaggcggtggtgaaggaagcagtgcagggccatgcgtggcccccgacgtgggcattcggctggagctcttgattctaggtcccagcctgagtacacgaggattcctctggcctgttagctacaacttcctcttctggaggtcttacttgtcatctatgtcttggtcgtctgcatatattttctagaaatttcctcaagcccttctaccgtgaaggtgagccgtgaagtctattgcccagggattggggacgtttgtattaaagaaggttttggagtacagaagcaggaagatgtgttgtggagatgctgttggcagaaacaactggccttgactaaacaaaccaagagttcctacaggagcagaggcaaccgggtgaaggctgacgcccttgcacaggcttgggcagctcttctccacatgtccacgtggctcacttccttacctacttcagggctctgctcacacgtcacctcctcaagaaggccttccccaactaccctgtcctcactcccaccccttacccctgcattccctgtccctctcactctgctgtggtttatcctacctgacatagaacaggtttatctccctgttgtctagcaggcttttatccagttctgctttgccggactgtattaagtaagtctcagttcctgggctttatcactcagcatgggtggaacacacgaaaatgggattttcctgttcccactacagcacttttcttgtggataccacatctccccatgtgcaatattctattcccatctcactcttaccttgtgcagagctattttctcagagcatgagtctctgaacggaaaatctactgctttgtgccctgcctgaggataagcttcaccagagcagtctatattgttgttgctgttgttgttgtttattgctgtattcctagcttctagaacagtgcctggcatggcaatcagtggcatgagtaaatttatgagtatatataatggacaagtttgggagaagataattagtttggaaacgggagagtttagtgggagagacagggccctgactacctcaaaaagcagcagtactataagaggacagagtttctatttttctgcctggtctaggacttgtactggtctttcaacttgaattcatgcagcaagacagtggtggtgaaaagataaaggcatttctacctgggtagacagtttctttttctggagacaagaattgagaaggcctaccagattctggcagtgagttgactgtacttgtttttagcattgtgaatttttgccttcatatgaatttaagtagggagtttagcaatgctgtttcagggtttccatccagattttccgtttcaaattggacatctatttgcacctttaattcgcgtaacaaatacttcacagagaatacaaagttgaattatgggcagctcaattcatccccccaaaggcagacaagagatggcaggtccaagttatgcctatattacacagtagagattattttaagtgttttgttattgcttccaagttcacacaaatgcttcttactaatttatattggtcacattcactattcttatttggtactcattagtgactttgtactctcttaaagaaaataaacctccagattaactaaaacatttaaatatgaattgtacataggctttattcatttataaaatgcaaagaaattaagattaaaaggaaaaccacatcaaaacccagagacataaataaaatgcatttaaatggctctttggtagtttattgatgctgagatagtttttttctccccttgaaaatatataaaattttcttttcatcttccctgaagcatatccaaataagttagtgactacataattaatatccagtttagtgggtatcctttcagttattctcttatgtatataggaataaattttttataacttagattaactgtttaaaacataattttggaataaaggaacaagagaagaaactagaatatggctgctacctgtgtattgttccattaactatgtatatgcatgtggttttttggtcctcccaacagccaatctcatttattcacaagaaagctaaaacagtcataaagatctaggtgataaattttaagccaacaggcaattcaaaaataacaggattgtgaaatatccaactaaaatcatatttgaaaatggtccaggaatccccaaataacttttatgcatgttatatgaagataaatggattttaacgtttctggttttcattttcagaggtcatagacattaaaaaaatttttgataatgaaaggatatttatttccatgttgtgctcaggcctgagctaaagtacatt

SEQ ID NO: 465967 - DNA, 1304 bp, Homo sapiens
gcagccaggcgcacttctctgcccacatcctttaccattttggtgcaccccaggccggctcccaatggccatcccctgcgtctctgtgagagctgcctattgcgctttgtccatgaacatgacaggccagaagtgcgcctgggtgcgcatccaggcgcagttctggtagtttgactgtggtgtgtacatgtgtgtggggattgtctgtatccttcacttctggtagtttgactgtggtgtgtagatgtgtggtgttttgtctgtatccttcacttctggtagtttgactatggtgtgtatatatgtgtgggggtttgtctgtatccttcacttctggtagtttgactgtggtgtgtagacgtgtgtgggggtttgtctgtatcgttcacttgtggtagtttgactgtggtgtgtgtatgtggggggggttttatctgtatccttcacttctggtagtttgactgcggtgtgtatatgtgtggagttttgtctgtatctttctggttgactgtggtgtgtagatgtgtgtggtgttttgtctgtatccttcacttctggtagtttgactgtggtgtgtgtatatgtgtggggttttgtctgtatctttctggtagtttgactgtggtgtgtagatgtgtgtggagttctgtctgtatccttcacttctggtagtttgactgtggtgtatatatgtgtggagttttgtctgtatccttcacttctggtagtttgactgtggtgtgtatatgtgtgtggggttttttctgtatccttcacttctggtagtttgactgtggtgtgtgtatatgtgtggagttttgtctgtatccttctcttcgggtagtttgactgtgttgtgtcgatgtgtgtggggttttgtctgtatccttctcttctggtagtttgactgtggtgcatatatgtgcggggttttgtctgtatccttcacttctggtagtttgactgtgttgtgtagatgtgtgtggggttttgtctgtatccttctcttctggtagtttgactgtggtgtgtagatgtgtggtgttttgtctgtatccttcacttctggtagtttgactgtggtgtgtagatgtgtgtggggttttgtctgtatccttcacttctggtagtttgactgtggtgtgtgtgtatatgtgtggggttttgtctgtatccttcacttctggtagtttgtggtgtgtgtagatgtgtgcagggttttgtctgtatacttcacttctggtagtttactgtggtgtatagatgtgtggggttttgtctgtatccttcacttctggtagttc

SEQ ID NO: 465968 - DNA, 2014 bp, Homo sapiens
  misc_feature (1)..(1): n is a, c, g, or t
  misc_feature (3)..(4): n is a, c, g, or t
  misc_feature (10)..(11): n is a, c, g, or t
ngnntccctnngctgaaactaaaaatgaagagccagcagcccacggtagtggaggagactgtgagagaggatgcctcctccccaggagcatatggcttcctattaactgaagaactgcaggttgcaggggacgtaactccagggagccttcccagaggaggcaatcagagctgggcatggaaggatgaccggcagcaaggaggagacggtgaacagccgacttcaagtcagaggagcgaggaggaagaaaattgtcaggggaacaaggctttccgggggcagatcacgaaggatctgcactgggatcaggcaaacccctgcaaccagcgcgtggagggtctcaaacagaaagctgagaccatggtggtgttacgctgtgtggagcaaaaggtgatcccagggcaggctcatgggccagaggaatatctgagcccgtcttctgagctcttctcagatgcgtccatcaatagctgaatcatttacgatgaaaagtgtgctgtaattctttatttttctgtacataatggtcgataattttctttctttctttttttttttttttaaggttttatctgtatccttcacttctggtagtttgactgtggtgtgtacatgtgtgtggggcttgtctgtatccttcacttctggtagtttgactgtggtgtgtacatgtgtgtgggggtttgtctgtatccttcacttctggtagtttgactgtggtgtgtacatgtgtggggttttatctgtatccttcacttctggtagtttgactgtggtgtgtatgtgtgcggggttttgtctgtatccttcacttctggtagtttgactgtggtgtgtagacgtgtgtggggttttttctgtatccttcacttctggtagtttgactgtggtgtgtacatgtgtgtggggattgtctgtatccttcacttctggtagtttgactgtggtgtgtagatgtgtggtgttttgtctgtatccttcacttctggtagtttgactatggtgtgtatatatgtgtgggggtttgtctgtatccttcacttctggtagtttgactgtggtgtgtagacgtgtgtgggggtttgtctgtatcgttcacttgtggtagtttgactgtggtgtgtgtatgtggggggggttttatctgtatccttcacttctggtagtttgactgcggtgtgtatatgtgtggagttttgtctgtatctttctggttgactgtggtgtgtagatgtgtgtggtgttttgtctgtatccttcacttctggtagtttgactgtggtgtgtgtatatgtgtggggttttgtctgtatctttctggtagtttgactgtggtgtgtagatgtgtgtggagttctgtctgtatccttcacttctggtagtttgactgtggtgtatatatgtgtggagttttgtctgtatccttcacttctggtagtttgactgtggtgtgtatatgtgtgtggggttttttctgtatccttcacttctggtagtttgactgtggtgtgtgtatatgtgtggagttttgtctgtatccttctcttcgggtagtttgactgtgttgtgtcgatgtgtgtggggttttgtctgtatccttctcttctggtagtttgactgtggtgcatatatgtgcggggttttgtctgtatccttcacttctggtagtttgactgtgttgtgtagatgtgtgtggggttttgtctgtatccttctcttctggtagtttgactgtggtgtgtagatgtgtggtgttttgtctgtatccttcacttctggtagtttgactgtggtgtgtagatgtgtgtggggttttgtctgtatccttcacttctggtagtttgactgtggtgtgtgtgtatatgtgtggggttttgtctgtatccttcacttctggtagtttgtggtgtgtgtagatgtgtgcagggttttgtctgtatacttcacttctggtagtttactgtggtgtatagatgtgtggggttttgtctgtatccttcacttctggtagttc

SEQ ID NO: 465969 - DNA, 3654 bp, Homo sapiens
tagaaaccagtccccgaggcttggcaaagcaggagccctctgtggcagtgcttgggtgtcggggctctgaggatccggcctcacctctccacggggtcgacgggaacgtctccggatgccaggagtcgcaaagggccgaccacgatgaggaaaccccaggcggggacgggggaagcagcacgggatcccagcctcaggcctgcccggacggtgttggttggggatcaagatgagtacactgcagccgagaacaagagccccagaggaactctttgtcccacaggagagcagcggatccacgccagagaagatgcttgtatcttttcacggctcttctctgagaaatgaagccacaccacgatacagtcagcaagaggaagccgggaatgggagatggcaacagtccctgtcactggaacgctggcctccctggacaagccaccctttaggaaccccaccccttatgtctgtggcggtggcacggtgctgtatcctgcctgggctctggcctctactctctcctccctctggctctgcctcccctgtttctcaggggcctggatgcctctcgctctggccaaatgccttcaaaaaagatgacttcccagtccgtcagggagacacttcctggagatccgtgtcatgatcgtttctctctccaaacgtgtttctgcttaattgggcagcacatgcctggacaccaccctttgtttcgccgtcgccccgtatgcctccggcgacacacatccacaccatctgctgtggggtaggccagtgccacgcgtggtcacacggtctccacctcggattcgcccctgttcctggtggcacgtgtcctgtaaagcgcggtcggctttccggagcccctgggcttttagaagcggggcaagccactgatatttcaaaggaggtgggaggcagagggctgatggatcagtgaatttgcagctgacgctaggccttgagacctatgggatcattgtgtgctgcagcgaggccctgccggcctctccagatgtggtgagcccatcctatctcagtgggagggggccagaatcggatctcaacgggagtccggagaacacagcaggcgtcctgaagctccccctccctcggtggaagtcggctcaagcagatcctgaggacaggacccctgggggtttgggcctgggacaggacgagacacccgcggccccctctcccacgccgccccaaacaggacccaggatccagccgccgccgcggcggcagcgatatttaaaggggacgcagcctatctgtcaggagcggagcgcgagtcggctcagccaatgcgcatgcgcgaggcgcgagcggtttctcccgtcacagtggttcccacggttgtcttagaaaccagaccccgaggcttggcagagcaggagccctcggtggcagtgcttgggtgtcgaggctctgaggctccggcctcacctctccacggggtcgaagggaacgtctccggatgccaggagtcgcaaagggccgaccatgatgatgaaaccccaggcagagacgggggaagcagcacgggatcccagcctcaggcctgcacggacggtgttggttggggtgagtctccctaaaagtcgtgccgccgtccgtgatctcgaggacgggtcggcctgcgtgcccctgggctgctctctcacccgagggtctctctgtgtgtttctttcccactctctgtgggtttgtgccagccgaagttgcgtcagggctaccaggtcggtggaggattgggggtgttgcgaattttgcagaaacctctttgctcctccggtagacatttgaaaacgtggcttgggtcaggcacaggcggccccccacccccgggtcccaggtgttctttgattttccttggcattgatggaaaggtcacccgtttcccccttccactggcacatgcctggaccccaccctttgtttcgccgtcgccccgtatgcctccggtgtggtgtaaagcgtggtcggctttctggaaccccagggcctttagcagtggggcaggccactgctctttcaaaggaggagggaggcagagggctgatggatcagtgaattttcagctgtctctaggccttgagaattatgagatcattctgtgctgcagcgaggccctgccggcctcaccagtttttgtgagcccatcctatctcactcggagggggccaaaatcggatctcaacgggagtccggagaacacagcaggagtcctgaagctccccctccatccctccatcggtggaagtgggctcaagcaggtcctgaggacaggacccctgggggtttgggcctgggaaaggacgagactcctgcggccccctctcccacgccaccccaaacaggacccaggatccagctgccgccatggcggcagcaggagcatcgcggccgccaggcgacagtggcgatatttaaaggggacgtagcctgactgccaggagctgagcgcgagtcgtcccagccaatgcgcatgcgcgaggctctagtggcttctcccttcacagtggttccttcggttgtcttagaaaccagtccccgaggcttggcaaagcaggagccctccgtggcagtgcttgggtgtcggggctgtgaggctccggcctgacctctccacggggtcgacgtgaacgtctccggattccaggagtcacaaagggccgaccaggatgaggaagccccaggggggtgccctgtgtgccacaaagcggtttttcgcatggcggcctgtctttgttgagcctctttctgctctctgcctgggtcatgaggccggttgtcaatcgtttttgctgctgtggatccgctttggctctgtgaaggcctggcccaccatcaaaacgaacacactgcagacgaggagaagaatcccacaggagctctttgtcctacaggagagcagcggacccacgtcagagaagatgcttgagtcttttcacggctcttctctgagaaatgaagccacaccacgatacagtcagcaagaggaaaccgggaatgagagatggcaacaatccctgtccctagaacgctggcctccctggacaagccacccttttggaaccccaccccttatgcccttggcggtggcacggtgctaaacctctatgctcctctggtaggcatttgaaaacgtagcttgggtccggcacaggccccccctccccacaccccgcgtgtcccacgtgtttttcgattttccttggtattgatggaaaggtgtcctgtaaagcactgtcggctttccggagccccagggcttttagaagcagggcaggccactgctctttctaaggaggagggcattgaaaaacacacccccaagcaatccctgaggctgtgatgttctgctctctacgagaaggaccctcgggtgagagagcagcccaggggcatgcaggctgacctgtcgtagagatcactgacggaggcatgacttttggggagactcaccccaaccaacaccgtccggtcaggcctgaggctgggatcccgtgctgcttcccccgtctccgctgggctttcctcatggtagtcggccttttgcgactcctggcatctggggacattcccgttgaccccaagaagacgttaggccggagcctcagagccccgaaacccaagtactgccac

SEQ ID NO: 465970 - DNA, 304 bp, Homo sapiens
gcaaagctgtgtgcacatgtgttaagtcatctgttctatgtgttctaattataaataagaaaaaacaaatttcaatcaaccatgctggaggaagagcaattatgtttctattccttctatcataggtgatgtaaaattctcaaacaatgagatagataaaaagtacgcagccaaaaagttcaagaagaagtgttacggagatggagcaggcccttcgtaaaaacacgatgttggttttctggattttgtatgtttgttttttttttttcctcatcctaaataaatattcactgtcatacctaat

SEQ ID NO: 465971 - DNA, 2225 bp, Homo sapiens
tagaaaccagtccccgaggcttggcaaagcaggagccctctgtggcagtgcttgggtgtcggggctctgaggatccggcctcacctctccacggggtcgacgggaacgtctccggatgccaggagtcgcaaagggccgaccacgatgaggaaaccccaggcggggacgggggaagcagcacgggatcccagcctcaggcctgcccggacggtgttggttggggatcaagatgagtacactgcagccgagaacaagagccccagaggaactctttgtcccacaggagagcagcggatccacgccagagaagatgcttgtatcttttcacggctcttctctgagaaatgaagccacaccacgatacagtcagcaagaggaagccgggaatgggagatggcaacagtccctgtcactggaacgctggcctccctggacaagccaccctttaggaaccccaccccttatgtctgtggcggtggcacggtgctgtatcctgcctgggctctggcctctactctctcctccctctggctctgcctcccctgtttctcaggggcctggatgcctctcgctctggccaaatgccttcaaaaaagatgacttcccagtccgtcagggagacacttcctggagatccgtgtcatgatcgtttctctctccaaacgtgtttctgcttaattgggcagcacatgcctggacaccaccctttgtttcgccgtcgccccgtatgcctccggcgacacacatccacaccatctgctgtggggtaggccagtgccacgcgtggtcacacggtctccacctcggattcgcccctgttcctggtggcacgtgtcctgtaaagcgcggtcggctttccggagcccctgggcttttagaagcggggcaagccactgatatttcaaaggaggtgggaggcagagggctgatggatcagtgaatttgcagctgacgctaggccttgagacctatgggatcattgtgtgctgcagcgaggccctgccggcctctccagatgtggtgagcccatcctatctcagtgggagggggccagaatcggatctcaacgggagtccggagaacacagcaggcgtcctgaagctccccctccctcggtggaagtcggctcaagcagatcctgaggacaggacccctgggggtttgggcctgggacaggacgagacacccgcggccccctctcccacgccgccccaaacaggacccaggatccagccgccgccgcggcggcagcgatatttaaaggggacgcagcctatctgtcaggagcggagcgcgagtcggctcagccaatgcgcatgcgcgaggcgcgagcggtttctcccgtcacagtggttcccacggttgtcttagaaaccagaccccgaggcttggcagagcaggagccctcggtggcagtgcttgggtgtcgaggctctgaggctccggcctcacctctccacggggtcgaagggaacgtctccggatgccaggagtcgcaaagggccgaccatgatgatgaaaccccaggcagagacgggggaagcagcacgggatcccagcctcaggcctgcacggacggtgttggttgggagacgaggtctcactatattgaccaggctggtcttgaactcctggccttaagcgatcctcctgccttggcctcccaaagtgctggagttacagatgtgagcctctgtgctcagtccatccttggctgttcaagtgtagagccaagaatgttaaggaacgtggacacaaaggatgaggttggaacagaagtttaatatgcaaaagaagaaagctctccccagcggagaggggacccgaaagagggttgccaactaggaggctgaatctgggggttttgtgaactgggaaggggaagaatgtgctcactagtctgtgagctgtcttggagaaagcacaacttcgcttggcccgggaccttagcttgggaccaaccagaggctgaagtgaaattttggcccaagaacaatcaggggctgaagtgaaagtttggcccaggaccaatcaggggctgaagtgatgattcatagaggcttggctcacagtccaaagcatgtccagaaaaggaaagtggtcaccagagcctgttagtccaagctgcaccgatttgtaagcccccaccgtttcacagaccctggtcagagggaaacattccactggggtttgggctgcgagaaacatcctccccaaccgcctga

SEQ ID NO: 465972 - DNA, 541 bp, Homo sapiens
tagaaaccagtccccgaggcttggcaaagcaggagccctctgtggcagtgcttgggtgtcggggctctgaggatccggcctcacctctccacggggtcgacgggaacgtctccggatgccaggagtcgcaaagggccgaccacgatgaggaaaccccaggcggggacgggggaagcagcacgggatcccagcctcaggcctgcccggacggtgttggttgggagacgaggtctcactatattgaccaggctggtcttgaactcctggccttaagcgatcctcctgccttggcctcccaaagtgctggagttacagatgtgagcctctgtgctcagtccatccttggctgttcaagtgtagaggtgatgtaaaattctcaaacaatgagatagataaaaagtacgcagccaaaaagttcaagaagaagtgttacggagatggagcaggcccttcgtaaaaacacgatgttggttttctggattttgtatgtttgttttttttttttcctcatcctaaataaatattcactgtcatacctaat

SEQ ID NO: 465973 - DNA, 844 bp, Homo sapiens
gccggctgtcaatcgttttcgccgcggcggatccgctttgggtgcctgaaagcctggcccacgtgaggagatgcgtcgctcccggagcaactgaaatctcatccccatcctgagtggcctcttttctaggatcaagatgagtacactgcagccgagaacaagagccccagaggaactctttgtcccacaggagagcagcggatccacgccagagaagatgcttgtatcttttcacggctcttctctgagaaatgaagccacaccacgatacagtcagcaagaggaagccgggaatgggagatggcaacagtccctgtcactggaacgctggcctccctggacaagccaccctttaggaaccccaccccttatgtctgtggcggtggcacggtgctgtatcctgcctgggctctggcctctactctctcctccctctggctctgcctcccctgtttctcaggggcctggatgcctctcgctctggccaaatgccttcaaaaaagatgacttcccagtccgtcagggagacacttcctggagatccgtgtcatgatcgtttctctctccaaacgtgtttctgcttaattgggcaggtatcatgagccgagagctcttggcttccatacgtgtctcaggcagggaagcttccttcttccccacgtttcccctcatgggtgggtggattgcctagaatgagcgctaggcgaccgtgactggccttgacttccaggacaggtggtgtcccatttcctttgcacttcctgtctcattcttgagggacatcctctcctctgctcctgggtggcctgactcccttgatcttctggacgaaacaaatgtcagg

SEQ ID NO: 465974 - DNA, 4235 bp, Homo sapiens
agctcagttgcttgaaagcaacgcgcctattcacatggagaatcttccctttcctttaaaattacttagtgcctcatcgctaaacgcccccagttccacaccatgggtgttggatatcttcctcactttggtgtttgccctggggttcttcttcctattactcccctacttatcttacttccgttgtgatgacccaccctcaccatcgcctgggaagagaaagtgtccagtagggcggaggcggaggcccagaggcaggatgaaaaaccacagtctgagagctggtagagagtgccggagaggcctggaggagacttcggacctgctttcacaactgcagagcctcctggggccacaccttgacaaaggtgactttggtcagctctccggtccagaccccccaggtgaggtgggcgaaagagcacctgatggagcctcccagtcctctcatgagcctatggaagatgctgctcccattctctccccgttagcttccccggatcctcaagccaagcatcctcaggatctggcctccaccccatcaccaggcccaatgaccacctcagtctcctccctaagtgcctcccagccaccagaaccttcccttcccctagaacacccctcacccgagccacctgcacttttccctcacccaccacacacccctgatcctctggcctgctctctgcctcctccaaaaggcttcactgctcctcccctgcgggactccacactgataactccatctcactgtgactcagtggcatttccactgggcaccgtccctcaaagcttgtctccacatgaggatttggtggcttctgtcccagccatctcaggccttggtggctcaaacagtcatgtttctgcctcctcccggtggcaggagactgccagaacctcgtgcgcctttaactcatcagtccagcaagatcatctttcccgccacccaccagagacctgtcagatggaagctggtagcctgtttttgctcagctctgatggccagaatgtcgtggggatacaagtcacagaaacagccaaggtcaacatttgggaagaaaaagaaaatgttggatcatttacaaatcgaatgaccccagaaaagcacttaaattctttgcggaatttggctaaatcattggatgctgagcaggacaccacaaacccaaaacccttctggaacatgggagagaactcgaaacagctgcccggacctcagaagctctcagatcctaggctctggcaggaaagtttttggaagaattatagccagcttttctggggcctcccctctctgcacagcgagtccctggtggctaacgcctgggtaactgacaggtcttatactttacagtctcctcctttcttgttcaatgaaatgtccaatgtctgcccaattcaaagggagactacaatgtccccactgcttttccaggcccagcccctgtcccatctggggcccgagtgccaaccctttatttcatccacaccccaattccggcccacacctatggctcaggccgaggctcaggcccatcttcaatcttctttcccagtcctatctcctgcttttccatccctgattcagaacactggagtagcttgccctgcatcgcagaataaagtgcaagctctctccctacctgaaactcagcaccctgaatggcctttgttgaggagacaactagaaggtaggttggctttaccctctagggtccaaaaatctcaggacgtctttagtgtctccactcctaaccttccccaggaaagtttgacatccattctgcctgagaactttccagtcagtcctgaactccggagacaactggagcaacacataaaaaagtggatcatccaacactggggcaacctgggaaggatccaagagtctctggatctgatgcagcttcgggatgaatcaccagggacaagtcaggccaagggcaaacccagtccctggcagtcctccatgtccacaggtgaaggcagcaaggaggcacagaaggtgaagttccagctagagagggacccgtgcccacatctggggcaaattctgggtgagaccccacaaaatctatccagggatatgaaaagcttcccacggaaggttctgggggtgacttctgaggagttggaaaggaacttgaggaagcccttgaggagtgactcgggaagtgatttattaagatgcacagagaggactcatatagaaaacatcctgaaagcccacatgggcaggaacttgggccagaccaacgagggcttgatccccgtgtgtgtgcgtcgatcctggcttgctgtcaaccaggctcttcccgtgtccaacacccatgtgaaaaccagcaatctagcagccccgaaaagtgggaaagcctgtgtgaacacagcccaggtgctttccttcctcgagccgtgtactcagcaggggttgggagcccatattgtgaggttttgggccaaacacaggtggggtctacccctcagggtcctcaagcccattcagtgctttaaactggaaaaggtttcatccttgtcccttacacagcttgctggtccctcctcagccacctgtgaatctggggctggctcagaagttgaggtggacatgttccttagaaagccaccaatggcaagtctgagaaagcaggtgctgaccaaagcatctgatcacatgccagagagtcttctggcctcctcacctgcatggaagcagttccagagggcaccgcgaggaatcccatcttggaatgatcatgaacccttgaagcctcctccagctggacaggagggcaggtggccatctaagcccctcacgtacagcctcacaggcagcatccagcagagcaggagcttaggagcccaatcttcaaaggctggagagacaagggaggcagtgccacaatgcagagtccccttggaaacctgtatgctggcaaacctccaagccacaagtgaggatgtgcatggtttcgaggctccagggaccagcaaaagctctctacaccctagagtgtctgtctcccaagatccaagaaagctgtgtcttatggaggaggttgttaatgaatttgagcctggaatggccacaaagtcagagacccagcctcaagtttgtgccgctgttgtgctccttccagatgggcaagcatctgttgtgccccacgcttcagagaatttggtttctcaagtgccccagggccatctccagagcatgcctactgggaacatgcgggcttcccaggagctacatgacctcatggcagccagaaggagcaaactggtgcacgaggagcccagaaacccaaactgtcaaggctcatgcaagagccaaaggccaatgtttccccctattcacaagagtgagaagtctaggaaacccaacttagaaaaacatgaagaaaggcttgaaggattgaggactcctcaacttaccccagtcaggaaaacagaagacacccatcaggatgaaggcgtccagctactgccatcaaagaaacagcctccttcagtaagcccctttggagaaaacatcaagcaaatttttcagtggattttttcaaagaaaaaaagcaagccagcaccagtcactgctgagagccaaaaaacagtaaaaaacagatcacgtgtgtacagcagcagtgctgaagctcagggtctcatgacggcagttggacaaatgctggacgagaaaatgtcactttgccatgcgcgccatgcctcgaaggtaaatcagcacaaacagaagtttcaagccccagtctgtgggtttccctgcaaccacaggcacctcttctactcagaacacggcagaatactgagctatgcagccagcagtcaacaagccactctcaagagccagggttgtcccaacagagacagacaaatcagaaatcaacagcccttgaaaagtgtgcggtgcaacaatgagcaatggggcctgcgacatccccaaatcttgcaccccaagaaagctgtatccccagtcagtccccttcagcactggccgaagacatccggtgcctctagccaccatcaccactgtccaaggcactgtcttctttgggaaggtatctgatttggtcagtcacaaattcttttttagccttccctggagaaaaagaagtccccaagaaaaaattcactctatgtagagaaaaaatattttctctcatgttagtacatgcagaacatttaatattccacaatatatatggttttttattcataaaaaa

SEQ ID NO: 465975 - DNA, 4056 bp, Homo sapiens
atgcgggaatgaagccatggtgggccagggactgggcgttacccagcagggggcagtgtgtgtgtcctggggagaccaatgcctgcctggatgcggagggggctggtagagagtgccggagaggcctggaggagacttcggacctgctttcacaactgcagagcctcctggggccacaccttgacaaaggtgactttggtcagctctccggtccagaccccccaggtgaggtgggcgaaagagcacctgatggagcctcccagtcctctcatgagcctatggaagatgctgctcccattctctccccgttagcttccccggatcctcaagccaagcatcctcaggatctggcctccaccccatcaccaggcccaatgaccacctcagtctcctccctaagtgcctcccagccaccagaaccttcccttcccctagaacacccctcacccgagccacctgcacttttccctcacccaccacacacccctgatcctctggcctgctctctgcctcctccaaaaggcttcactgctcctcccctgcgggactccacactgataactccatctcactgtgactcagtggcatttccactgggcaccgtccctcaaagcttgtctccacatgaggatttggtggcttctgtcccagccatctcaggccttggtggctcaaacagtcatgtttctgcctcctcccggtggcaggagactgccagaacctcgtgcgcctttaactcatcagtccagcaagatcatctttcccgccacccaccagagacctgtcagatggaagctggtagcctgtttttgctcagctctgatggccagaatgtcgtggggatacaagtcacagaaacagccaaggtcaacatttgggaagaaaaagaaaatgttggatcatttacaaatcgaatgaccccagaaaagcacttaaattctttgcggaatttggctaaatcattggatgctgagcaggacaccacaaacccaaaacccttctggaacatgggagagaactcgaaacagctgcccggacctcagaagctctcagatcctaggctctggcaggaaagtttttggaagaattatagccagcttttctggggcctcccctctctgcacagcgagtccctggtggctaacgcctgggtaactgacaggtcttatactttacagtctcctcctttcttgttcaatgaaatgtccaatgtctgcccaattcaaagggagactacaatgtccccactgcttttccaggcccagcccctgtcccatctggggcccgagtgccaaccctttatttcatccacaccccaattccggcccacacctatggctcaggccgaggctcaggcccatcttcaatcttctttcccagtcctatctcctgcttttccatccctgattcagaacactggagtagcttgccctgcatcgcagaataaagtgcaagctctctccctacctgaaactcagcaccctgaatggcctttgttgaggagacaactagaaggtaggttggctttaccctctagggtccaaaaatctcaggacgtctttagtgtctccactcctaaccttccccaggaaagtttgacatccattctgcctgagaactttccagtcagtcctgaactccggagacaactggagcaacacataaaaaagtggatcatccaacactggggcaacctgggaaggatccaagagtctctggatctgatgcagcttcgggatgaatcaccagggacaagtcaggccaagggcaaacccagtccctggcagtcctccatgtccacaggtgaaggcagcaaggaggcacagaaggtgaagttccagctagagagggacccgtgcccacatctggggcaaattctgggtgagaccccacaaaatctatccagggatatgaaaagcttcccacggaaggttctgggggtgacttctgaggagttggaaaggaacttgaggaagcccttgaggagtgactcgggaagtgatttattaagatgcacagagaggactcatatagaaaacatcctgaaagcccacatgggcaggaacttgggccagaccaacgagggcttgatccccgtgtgtgtgcgtcgatcctggcttgctgtcaaccaggctcttcccgtgtccaacacccatgtgaaaaccagcaatctagcagccccgaaaagtgggaaagcctgtgtgaacacagcccaggtgctttccttcctcgagccgtgtactcagcaggggttgggagcccatattgtgaggttttgggccaaacacaggtggggtctacccctcagggtcctcaagcccattcagtgctttaaactggaaaaggtttcatccttgtcccttacacagcttgctggtccctcctcagccacctgtgaatctggggctggctcagaagttgaggtggacatgttccttagaaagccaccaatggcaagtctgagaaagcaggtgctgaccaaagcatctgatcacatgccagagagtcttctggcctcctcacctgcatggaagcagttccagagggcaccgcgaggaatcccatcttggaatgatcatgaacccttgaagcctcctccagctggacaggagggcaggtggccatctaagcccctcacgtacagcctcacaggcagcatccagcagagcaggagcttaggagcccaatcttcaaaggctggagagacaagggaggcagtgccacaatgcagagtccccttggaaacctgtatgctggcaaacctccaagccacaagtgaggatgtgcatggtttcgaggctccagggaccagcaaaagctctctacaccctagagtgtctgtctcccaagatccaagaaagctgtgtcttatggaggaggttgttaatgaatttgagcctggaatggccacaaagtcagagacccagcctcaagtttgtgccgctgttgtgctccttccagatgggcaagcatctgttgtgccccacgcttcagagaatttggtttctcaagtgccccagggccatctccagagcatgcctactgggaacatgcgggcttcccaggagctacatgacctcatggcagccagaaggagcaaactggtgcacgaggagcccagaaacccaaactgtcaaggctcatgcaagagccaaaggccaatgtttccccctattcacaagagtgagaagtctaggaaacccaacttagaaaaacatgaagaaaggcttgaaggattgaggactcctcaacttaccccagtcaggaaaacagaagacacccatcaggatgaaggcgtccagctactgccatcaaagaaacagcctccttcagtaagcccctttggagaaaacatcaagcaaatttttcagtggattttttcaaagaaaaaaagcaagccagcaccagtcactgctgagagccaaaaaacagtaaaaaacagatcacgtgtgtacagcagcagtgctgaagctcagggtctcatgacggcagttggacaaatgctggacgagaaaatgtcactttgccatgcgcgccatgcctcgaaggtaaatcagcacaaacagaagtttcaagccccagtctgtgggtttccctgcaaccacaggcacctcttctactcagaacacggcagaatactgagctatgcagccagcagtcaacaagccactctcaagagccagggttgtcccaacagagacagacaaatcagaaatcaacagcccttgaaaagtgtgcggtgcaacaatgagcaatggggcctgcgacatccccaaatcttgcaccccaagaaagctgtatccccagtcagtccccttcagcactggccgaagacatccggtgcctctagccaccatcaccactgtccaaggcactgtcttctttgggaaggtatctgatttggtcagtcacaaattcttttttagccttccctggagaaaaagaagtccccaagaaaaaattcactctatgtagagaaaaaatattttctctcatgttagtacatgcagaacatttaatattccacaatatatatggttttttattcataaaaaa

SEQ ID NO: 465976 - DNA, 2150 bp, Homo sapiens
tctgtagatctgggctccctgaaaaactgcagctcttctctccttctcatccacaacatggtgagtgggttgggggagtgtgtttcagctgtgtttgtgttacacctctttcagttctgccattcagtgggtcccaagttcttgtaccacatccaggaagaattagcagccatggatggacccagaagaagcaccacaagttctcactgtgggccatggatttcacttggaactggtagcctggcctccaggcttcaggctatcccaggcttgaaagtggggcttcattggggacccactcctttccactcaggaacttgtctgcctcctctcctgatgccatcaacatgctttccatggcacccaggctgtttgtccaaagaaatgccagcaggctggcaccaagacaccctcagcccccttcagcctccctcccatgctcttcagcacccaaattccagagggagtcaaggcggcagggggctggtgtgtcaatgcttccctaagcatggcacacttggctggtttgtgacagggtctgtgcttcacctcaactttgctccagaatcagagctggtgctgggagcagggagaggccaggctgtggaagaaggcacgtctgagcccgtgggggcagtggagcttcctggaactccaagagcacagagatgcctgagtccagagccatggctgggcagctgcagctgagcccatgagtgcagggctcccaccctgccaatttggcaaaggatcctctccttgtggtcactaccacccctggtccacagggggctctttcaggacaccactgatgtttacttaaagcccaagggctcttctgtcagcctgtggtgaatgttgctaggcctgcgactcacccttcagggcagagtgttcccctctggcccatgacaggtctaaaaatgctgtgcaggagcctaggcctggacttggaagccccaagagcttgctgggtgctctatccctgtggcttggcagcattgccaccaaattatggtagtggacattctaagtaaaatgcttaactattattttaatttatttaaaataaagtaagcatcttggtttttctgaaataacagcataaggaggaaggtttagtcattaaacttatcactggtttgctttgctacttttgtcttctttgtggcataatataggctctcattctgtgctgagtactaggatgatgtccatggcaccaaaaaaaaaaaaaaaaaaaaaagaaaagaaagaaagaaataagagcttttctttcttttatttgtaatttttttttccgtcccaaataagaaaatcattagaggagcatagtagggaggtgtctccacttcctattaagaatcacatattctataagcagacgatattgaagaaacaagctctgtatttttagaatattattttatttggggcccataaaagtttagttgttgataaggttctaaatattctaggatgattcacacaattattataagattgtagtttttctactttgtgacctatttactaattgtaaagggttgacatttcaaaattttatagattcatttcaattcttttttgcatctgaactaagcagcttcttcaataaatcataaataatgggaagtaaggtgcttaaaaataccaataatgagataattatgtataaaatggaaagtgtaatgggaattttgtctaaataaaaaatataaatcccattacttgttgcatttaagaatatgaaaagatacattatgaagaaaaatataatttaagtgtgcatctaagcagcattatttcttcatatgtagtcaagtaggaaaattaagaaaaagctgattagatccttaagaattaatcagtaatttctgagaatgagaaagaagaatcagtgaacagtagcacaactgaatgattatgtacaagattctttataagctaaagggtagctatttctttaaataagacttacaaagtgggagagcagaataaaaaagtgtatggaaacagaaaataaacagattctgacaagagaattattcaaaacggacaaattacaaaagtagcaaacatgcactcaggctgtggatttgcctttggaatttcacttaatacagtattgccagtcagtcattcttgca

SEQ ID NO: 465977 - DNA, 1301 bp, Homo sapiens
gcagcaacgtctgatgctcaagccatgagccatacatcgcgggtgggagatctttttcttttgggtccaagttttctttggaggcttcagtctgttgaatgctgtgaatgtgcatcttatatctgggcccagagggctccaggaaggaaggaaagttcctctccaggtgaggaaggtgctgatctcttcactccctttgtctccgttgagaaaaagttctcctggttgtcaaagaggcaggactggcatcagttccatgagctacgaaagcaatttgtggagaagtcgtcctgtgcccagcccctgggtgagctgaccagcctggatgctcatggggagtttggtggaggcagtggcagcagcccgtcctcctcctctctgtgcactgagccactgatccccaccacccccatcatccccagtgaggaaatggccaaaattgcctgcagcctggagaccaaggagctttgggacaaattccatgagctgggcaccgagatgatcatcaccaagtcgggcaggaggatgtttccaaccatccgggtgtccttttcgggggtggatcctgaggccaagtacatagtcctgatggacatcgtccctgtggacaacaagaggtaccgctacgcctaccaccggtcctcctggctggtggctggcaaggccgacccgccgttgccagccaggctctatgtgcatccagattctccttttaccggtgagcaactactcaaacagatggtgtcttttgaaaaggtgaaactcaccaacaatgaactggatcaacatggccatataattttgaactcaatgcataagtaccagccaagggtgcacatcattaagaagaaagaccacacagcctcattgctcaacctgaagtctgaagaatttagaactttcatctttccagaaacagtttttacggcagtcactgcctaccagaatcaactgataacgaagctgaaaatagatagcaatccttttgccaaaggattccgggattcctccaggctcactgacattgagaggcattttatgcatactgccaagtttccttcaggaaaggttgttcacagcagttaccattcctttacatctttgtccgacatgatcgttgtcttttcatctttgccagtttcatttttactctgaattttgggagaacatcttatatcttctaatttgctgattctgttttctgcagcatctaatattctggcttctgtctttactgagttcctttaaaatgtgagaatttctgttgtgttattttcttccctttaccctcatcactcatt

SEQ ID NO: 465978 - DNA, 3886 bp, Homo sapiens
ggagagcagcgccgtctgtactgggtcctgcagcctctgtcctttcaatgcctggttttttctgtgactgctggccttccctggagatcagagcgctcctgtatgccatgggctgtattcagagcatcggaggcaaagccagagtcttccgggaagggatcacggtgattgatgtgaaagcctccatcgaccccgtccccactagcatcgatgagtcctccagcgtggtgctccgctaccggacaccccacttccgggcctcggcccaggtggtcatgccgcccatccccaagaaggagacttgggtagttggctggatccaggcgtgcagccacatggagttctacaaccagtacggcgagcagggcatgaccagccctggccaagggattgctgcagccctcatccaccttccaagcactggaaacaaacattggagaccaaggtctccagaagcttccactgactgctgttggctgcaccaggcaacagggtctggctctgtcacccaggctggagtgcaatggtatgatctcggctcactgcaacctctgcctcccaggttcaagcgattctcctgcctcagcctcccgagtagctgggattacaggtccagctgggagctccccgacctccaggagggcaagatccaagccatcagcgactcggatggggtgaactacccctggtacggcaacaccacagagacctgcaccatcgtgggccccaccaagagggactccaagttcatcatcagcatgaatgacaacttttaccccagcgtcacatgggccgtgcccgtcagcgagagcaacgtggccaagctcaccaatatctaccgggaccagagcttcaccacctggctggtggccaccaacacctccaccaacgacatgatcatcctgcagacgctgcactggcgcatgcagctcagcatcgaggtgaaccccaaccggcccctgggccagcgcgcccggctgcgggagcccatcgcccaggaccagcccaaaatcctgagcaagaatgagcccatcccgcccagcgccctggtcaagcccaatgccaacgatgcccaggtcctcatgtggcggcccaagtacgggcagccgctggtggtgatcccgcccaagcaccggtgacagccaggaccacccgctaggttagactcacaaataataataccgctgaaaacaaaactcagactcactcttcagtcattcagcaagatacaaccattctaccctctccagcgggcggatctcactgtgctgatgcccccgggaaggcctccccggctctcggcacctgcttcctttcagggagaggggagatctaagcaggacagacagaccccacgtgcgccctcagggtgacctctggtctccttgcctctcctttttctcagtttcagtcgctcacttgtaacagattccctgaaacactgctttttccgttttttaaaaaaactcctcttttgggggctcaggggcaggaggagggggagctgattaggagggaagctccagcccccgatcaaagagacagatccacactgctgccgatttgtggcgctggccggccttccccccaggtccctccgccctctgtcatgcggccttatgtagacttgctttgccaaacttttgccttaagctgaattgaaaggaagaaaaccaatcggagaaagaaagcaggatctcttttctaccggacttttcctcttctgccagaggtggagggagggttggggtcgcccgcgagagtctcttgagcccttcttcccggttgtcttgggagaagggtgaggatgggcatttagacccgaaaccagctgctcactctttctttttggcagaaataaaaccacaggtagattctgcctgaacagccccttctctccctccacccccaggtcgtatccctgcacctgcggagaggggctgtgagctctggcggggggtggctccaccagtcgcctggcctcttctcccctctcttcccagcagccttaacttcccttgggcggctctaggaggagagaggcaggctcctgtgagcccagggaattttcaccctctcagtcctcaggacccacccccagttgagtccctggcccttcctccaggtgtgtggctttttccttctccatccacactggtcccaaatgcctgggggccggccacctggaccgccgacacacagcctcaatgttagtctcaaaggtaaggaaggcattcacgtcccttcttgcagggcattttaagacttgaatcgggtgggccccggcccctgtggctggctggcccctggtgtactgtaaaagggccaagacagggctcgttctcaggggcgcccctcccaggccctcagggcagcgggacggtgcagtcaggctctgggtgccacagtgatggaggtggaaggcacccaagctctagggaagtcttgggaggcagtcggccgagcccctgcttcctgtcctcaaataagtgaatccaggccaagggctgggagggctgggtgggcttatcgtcgagagggttcagagccactctggaggctgggctggcacagtggagagcaacaggtgaggacagacgtctggaagcccatccctgggacctgccctccctcggtcccaggtcactggagctccagggcttacttagtcctgacccattgtgccagggttctgagcagtgtcggccttgtggccacttgcaggggctattaggggacatcccgctgaagccacgctccttccagcttgccaaacccacagctacccgcccgggacccacactcagcctaataattatcaagcacagaaaaccgtccatttagaaaaataatccatttctgctgcagatgagccacttgtaagagtctccgtgacagcgtgggacggtgtgggaaccaaagtccctgccctgctcctttgtccacgggctattgcgtttattcaaggggtgcttaatgaccgtttagccactgccgtcggtctccgggcccagctcgtgccaggaggctgtcctgggacacactgggctggagctgccggctggcacggtgctcagggggcccctgatgggggccaggacctccccgcagaaactgcaggttctcttgtgaggatggaggccgtgccaccccgaaaggcagtagccttaggggaacagtgggtcccagctgcatgtctgaggatgggtggggacagggctgggactcagctttcattcactggagacttctccactcaggtctttgttgcactaaagcagggacaggaccctgggggttcaggaagcgggtctcaggccgctggtttattcctggaggtggggctggagaccagaatggaaaggggcttcctgagctgctagggggtgaaggacccccgaacccgcatttcttgagtgagagcaaacactcgaggcaggagccagcacccctcccactgcatgcccggcccccagcccaccttgccccctgacccaccttcacccgtgccccttctttctgcccttcctcaccgaagaagggctaggaacaccctggagaggctgcaggtccggccacggacgctcagctgagccccggtcttgctccttcagcctccttgctcatgttggagcacaggccccaggcttcctgccagggccccgattcttcttatgtcctccagccccgccctggggtggacatccactcactccttccagcaataagaaccgtccttggtcgtggagagtactgtgaaacaaaccaatgcacttaccaggaggcacaagactcttgaagaagatgtacaatgaacctttttttttttacaaaaaacaaaaagcaaatattcataaagagaaataaaatgtaattttaaagtagg

SEQ ID NO: 465979 - DNA, 1059 bp, Homo sapiens
ccgggagcatggtagaaggagccacatggggacaaagagagctctttaaagccctcatcttctgggtgccctgccaggccctggtggggcctccagtcgcagaagcgctgcagggactggcgagactccaccacgtcgcggaagccaacagcacgtcggcccaggaacgcccctccaccccggccggccgcctcccaccccacctcctgggtgcccgtcagcaccgcggcccacggagcgcgcgagcccaggggcccaaccgagcgcagccaccggacgccccgcgtggccaccgcgtgggcctctcccgcgcctgcgcagcccgcccccttcccggcagcaccggcggcgtcaaggcaggcacgtggcggcggctgcgcatgcgcgggctcgggccttcccggcgtctccgcgcaggcctcggggaagcggggtccgggggagccgtggtgcggtgggaccgcgtgggtcctggaagagctgcagaggaggtggggacactcagttgcagataggtgatgggagacagtcggggcccaatttgaagcagttgccagtggatgataaagttgctctcaagagcagtgcttgagggaagaaaataaattctccgtttcaaaagaaaatccagggcgggacaatcttactgttggaacaaagaaaagagcccgatggaaaaacggttagcttttgcttttgagaaatgtggtacctccgtggcttgatggcaggctgcatgcatccattcgcggcgagtagaatctaagactgcagcccgtgctgatgactgtggctgtgatgaattcgtgcctgtgaccacagctgctctccaggtgctgggtggctcctcccttgacgcccatccattctgtctcctgcctggccttgttcactgtcgctcatctcgctcagctgaggtccctcctcctccgctgtttggtgtccttgccagttaatcacccttaggtgctgggccctggacttacggacaacatggagcctggcttgttgacaggacagtgtctgcgcctctccgtctacacccccacaacaggggtt

SEQ ID NO: 465980 - DNA, 1404 bp, Homo sapiens
gaggacagcagaaatgatagcgatagctagtgcccagtgcttgcttcctgcatggcaggcaccttctaagcactttacacatgttgatcgatttatttatcctccagtgctagtattatccccatttcatagatgaatacactgaggggtgaagtcacgtagatagcacttgtggttacggcgtaaccctcccctccacgctgactagagcattggcctggcgtaggcaaatggctgagctcttctggatgaactcagggcatctctgaggactgtggacctggcccagccctccgcagggtgtaaccctgctctggggtgaactttcattcactgtggagcagaaaatgcatctatgagcatcaatttactgtgtcctgcctggcttcagggcctcagatgcatcctgaagagcatccagggaagtcttagagccatgggcttctctgctaagaactggtgatgtcacgcaggctggaagctgacaatttaagtcaattcactctccaaaatgttgcacccctgctgcgtgttaagctcattaaagttggagagttgaatgagctaatgttcatgactcgctccctgctgccctcagccccctcatcctgtctggcccaggccggcaacaggcccccatgtggcttccctgtgcccctggccttccactacggagtccccacgcagctgcccggaggatcttttgaaacttgtcaggcgcggctctgggcggtctttgatgccttcctgtccttttccccaaatcgcatctgtgcgtatgagcagaggggagttagtgcacacccaggccctgaggtggcacctggtttgcagcaagtgctcactgcatctttgtggagagcttagctttggtgaacgccccctgaggcccatgcccccgcggactctctgcaggctgggtggggcacagccatagcaggtgtctcctggggggccggcacagctcggagccccaaggccgccaaagagctaactagctcaggggatcccatttcccttggctgagggacccacagcccgcgcatcccaggaccagctccctggacggggtctgctatgttggagaaggctccaggagcccctggatcattctgagctaggtccagtgtactatttttctgggatctttgggaagcaacttctattccacaaggatctcccagttcagctgcccccaaaccaacgcccccagagcagttttcggttcatttggatcccactgaagatgccacgtgacagttagttgtgtctctggagtcccctctgagacagtcactcaggctgtctttgtttttcatggccgtggcagttttgaagagtagtggtcagacaaacctgtagaatgttcctcagcttgggtttatctgatgtttcctcatgatt

SEQ ID NO: 465981 - DNA, 1218 bp, Homo sapiens
  misc_feature (1203)..(1203): n is a, c, g, or t
  misc_feature (1211)..(1211): n is a, c, g, or t
  misc_feature (1213)..(1213): n is a, c, g, or t
agtaagatatggttatcaaggcctggagaggcaaaccatgtccagaaaaggtccctgatgatagaactccctgagtattcttgcagaaatgaatatccaccaggcttcttcttttttttttttttttgagatggagtctgtctctgtcgcccaggctggcgtgcaatggtgggatcttggctcaatgcaagctccgcctcccaggttcacgctattctcctgcctcagcctcccaactactcaggaggctgaagcaggaggattgcttgaacccaggaggcggcggttgcagtgagccaaggtggcgccaccactctccagcctggcaacagagcgtgactccgtctcaaaaaaagaaaaaaaaaaatttcagggatatttatgtagtgacctgttatttaatttttcaataatataaatctgtttcaagaaaaagaaattttaaataaactcttatgattttctttctcctgaaaattattccagaacttaaaaaaaaagaagaaacaaaacagatgttgcctgtggcgcttctcctggcctgagccatgggctccacgtccagctcctccacatcccagaactcgcgtcttggtttcctgagggaacccagcagcagccaggcatggcccatcctcagtggtcagggtcccagctctgtgccacactctcctgagctcccggaggaccggggctgctctctgctccaggtcccagctcctcctgctgatcctggctccgctgtcaccgctgggcccaccttggaggctgcttcagttatccgggccccagagaggacctggccccaggagaagccacaggctggggactgtgcccactgccccctgcaccccagtgccggccagtcccacatgttgggggcagggccatttccattgtcatctagatcagtggcactgcctggcactggcctctccaccattgaaatgaggcccccggaagtgggcctcttgcacgcctggcccagagaggaggaaagctgtgctgaaagcagagggagacagcagggatggctcctgtcctgcccataccctgcccattctggacaggtcacttccagctcccttgtatgttcaaatcctgcctgcctgcatcttcccttgctggtctctggaacaagcaaggatgtcaggagccaggggagatttgctgtgtgaccccagctcagctgctgggcccttntaagtgcnanctttc

SEQ ID NO: 465982 - DNA, 1495 bp, Homo sapiens
ttcaagctgcaggcgggaagcgctctagcaggggctcgccttgcgagagtccctgattcgagcctcttttcttcctcttcaatcaatactactctctcctactcaccattcaaaccgtctatgagcctaaattttcacggccatgggacggacaaggaccccgtctttagccgaactaaggaaaaggtggaaaattcccctggaggggctcgggccatgagaaacatcctggcaggtcccaggcctaaccgtctgactgcaggaaattcttcctttatcacatcctgccctgcagcgacccatactgccccacctctcctgtcgggacctacaactgctccagtctgtaagcggggcttgggctccagcgctgtctggccccagccatctccagttgtgtattcattcacaacccatgagctggcaccgggggattggcagacccttgttcctggaacttctcactggttatcacgcctaatgttggaacactgtggtacagtgaactctgattcctggaattgttaccaggcgaccacggcgtcatcaaatgacctggcaattccgtctactgatgtctcgaacatgtttcagactaagctacgaaatgaaacttgggaagacttgccaaaaatgtcctgcacaactgagatccaagcagcattcattctctcttcctttgtgaccttcttcagtggactcatcatcctgttgatcttcaggctgatctggagatctgttaaaaaatggcaaatcatcaagggaacaggaattatcttggaactgttcacatcaggtaccatcgctaggagccatgtaagaagcctccacttccagggacaatttcgtgatcatatagaaatgttgctttcagcccaaacctttgtggggcaagtgttggtgatccttgtctttgtactaagcattgggtctcttataatctatttcatcaattctgctgaccctgttggaagctgttcatcatatgaagacaaaaccattcctattgatttggttttcaatgctttctttagtttctattttggattgaggtttatggcagctgatgacaaaatcaagttctggctggagatgaattcaatcgtaaacatctttaccatcccaccaacctttatttcttattatttgaaaagcaattggctaggtttaaggttcctaagagccttgcgcctgctagaactccctcaaatcttgcaaattttacgagccatcaagaccaggtaaatagccctgaccgaagtactgcttacttattagtttggattagaaaatgaatgtattaactggaccctaaactcaatgcatttcttatcagaatttcagtgcaaagatcatgaaatctttcagctgccaaaatattatttgttcacattctcccattatattacatcttacactagctgaaaactttgcaatcattttaaagaagctggtttagtctttgttttttaagctatggtgtataagtttattt

SEQ ID NO: 465983 - DNA, 1452 bp, Homo sapiens
ataaggaggagagcttgtgggcatggctgagctacctcggagacgtcctctgacccggtctggcctgacctcgcttttcttcattccaattggaccatttgtgtattcactttcgtttttatcctttgcggtggaaacggccacagattctgacacggagagccgcggtctgcgggaataccactctgtcggggtgcaagtggaagatgagaagcgacacggacgttttaaacgttctaacagcgtcacggccgccgtccaagctgacctggagctggaggggttcccaggccacatcaccacggaggacaaaggccttcagttcggctcatccttccagcggcactccgagcccagcacccccacccagtacagcgcggtgagaactgtacggacccaggggctcttcagctatagagaagactatcggacccaagtggacacctccaccctgccccctccagacccctggctggagcccgccattgacacggtagagactgggaggatgtctccgtgccgcagggatggctcgtggtttttgaagctgctgcacgcagagacaaagaggatggaaggctggtgcaaagagatggagagagaggcggaggagaacgacctctcggaggaaagtaagagctcaggcttccctagggcctcttaaatatcatttctcagtaatgcaaatatgcacatcacagcattagtggagaaaagttcctccctttggtattcaagtgaagggaaataaatgtgctttctagtatatccccctcaattctaagaaaagatataaattacatgaaaagagaagcagtcactacgatatcgaaggaaaattgtgtgtgttttgtcagatgtcaaaacactttttacgcccctcacctgtgtgttttgtccataaaactagaacaatattcatcaagttcagatacttccctaaatgtttaaaaggtaagatgataaccttaatttccagtcctaattttaggagcagatacagggttattggttatggtactttttaaaataaagattaaattaaatgtcttatgagactaaaactctgatctctgaatattgaaatttccattatatgaagtaatttttgcccaaaatataatttcataacacagttccccgaactgattgaatgaatctagattcagtcagtcttctatggttaataaaatctatagtgaacccaaagaaatgctggtctgcataaagtcacattaatgcaggctgcctattgttaataaaagtactttcaagatattaaatcattagtaatgttttaagatttttgtattatgtcaaaccaaatgggtaaatacataaaggaaaatcaaaaatgtgcatattttctaaaacaaaagaatccttcccagctaagactttattgaataattccattgagatgcaactctcatcaagaactcaccaagggag

SEQ ID NO: 465984 - DNA, 1521 bp, Homo sapiens
  misc_feature (1497)..(1499): n is a, c, g, or t
  misc_feature (1503)..(1503): n is a, c, g, or t
  misc_feature (1506)..(1506): n is a, c, g, or t
ctggctaatggggagtggtcttgtggagacccatcacaggcagcgaccagccagggtcctgtggtcctgggaagcagcacctgcactgttccctgggaggaagccggtagccttcgtggggtcgctgactgcatccccagagtgcagagagctcaatgaagacagcactcgagtcagaaatcaatgtttactgcagagaacacagaagccagcaagcagtaggcaagggaggcgtcgcagtgagtgtgtcgggcaggctgggaaccagcgcaacggcccacgtggaccgaggactcacgcagagcaagtcacagaaagcgcagctgaaaacaaacggatgcttatcccagatgcacaggacacttaccaaggactgatgggcagctgagtggggctgggaggatggtgcccgctggtcagggcagccctctgggtcagggtgactgagcaaggctggaaggatggtgcctgctggtcagggtggccgcgtgaggctgggagggtggtgcccgctggtcctgaggaacctttgtcccaagtccatccaggtaagtcaggccgcctctctgggaggaaggctgggccaagagggcacgtggtgtggcccagttccggggacgggggtctgagctcagggactggcactccagcaggaggagagaagccagaggaccaagcacagttggggcacagaggccgggcagggacaagcggccccgggcactgaagctggctgggcagggatgagtggtcccagggctcgctgcagagctcggggacccagagggcagagagtccagactggggccttcagcggcagatgaaaggcttaagcagagtggacatcacaggcaggcagcagcgggaagtgctgggctgcccactacaccaggagcctctcctgctgggtgctctgaggtgacccaaacacgtccaatggatggcagtgaatactccctggtctctggtgctgagccccgttcgccatcgggaacttggaaaatgctctgtggctgcaaggagcctctggtggcttctccatcactgcggtgtcttgatcagagagactctctgcagtggaaaggtctctccctcgctggcacgttcccacatctgactgggctgcttttccgggggtccccagggcacggaacacagtgcgcacggccctgcgcccccatcagacgcgggacacgagggagccacggagcaggtgtccggcgaggctcgcaccgcagggcccgagtccgcagatggccccggctcagggcttcttccgagggtggcgtttctgatggcggatgagacaggagctgtaggcaaaggctttcccacagtgcgtgcattcgtagggcttctccccggtgtgcgtcttctgatgtttcaggagattggagccgcagttaaaggctttcccgcactccccgcatttgaagggcttctctcccgtgtgagtcctctggtgtttggtgacgtcagagctgtgccggaaggccnnncgcntgngcacacttgaagggc

SEQ ID NO: 465985 - DNA, 1167 bp, Homo sapiens
  misc_feature (1143)..(1145): n is a, c, g, or t
  misc_feature (1149)..(1149): n is a, c, g, or t
  misc_feature (1152)..(1152): n is a, c, g, or t
atctgctctaccagcctgaatgctgggcagctgagtggggctgggaggatggtgcccgctggtcagggcagccctctgggtcagggtgactgagcaaggctggaaggatggtgcctgctggtcagggtggccgcgtgaggctgggagggtggtgcccgctggtcctgaggaacctttgtcccaagtccatccaggtaagtcaggccgcctctctgggaggaaggctgggccaagagggcacgtggtgtggcccagttccggggacgggggtctgagctcagggactggcactccagcaggaggagagaagccagaggaccaagcacagttggggcacagaggccgggcagggacaagcggccccgggcactgaagctggctgggcagggatgagtggtcccagggctcgctgcagagctcggggacccagagggcagagagtccagactggggccttcagcggcagatgaaaggcttaagcagagtggacatcacaggcaggcagcagcgggaagtgctgggctgcccactacaccaggagcctctcctgctgggtgctctgaggtgacccaaacacgtccaatggatggcagtgaatactccctggtctctggtgctgagccccgttcgccatcgggaacttggaaaatgctctgtggctgcaaggagcctctggtggcttctccatcactgcggtgtcttgatcagagagactctctgcagtggaaaggtctctccctcgctggcacgttcccacatctgactgggctgcttttccgggggtccccagggcacggaacacagtgcgcacggccctgcgcccccatcagacgcgggacacgagggagccacggagcaggtgtccggcgaggctcgcaccgcagggcccgagtccgcagatggccccggctcagggcttcttccgagggtggcgtttctgatggcggatgagacaggagctgtaggcaaaggctttcccacagtgcgtgcattcgtagggcttctccccggtgtgcgtcttctgatgtttcaggagattggagccgcagttaaaggctttcccgcactccccgcatttgaagggcttctctcccgtgtgagtcctctggtgtttggtgacgtcagagctgtgccggaaggccnnncgcntgngcacacttgaagggc

SEQ ID NO: 465986 - DNA, 934 bp, Homo sapiens
atctgctctaccagcctgaatgctgggcagctgagtggggctgggaggatggtgcccgctggtcagggcagccctctgggtcagggtgactgagcaaggctggaaggatggtgcctgctggtcagggtggccgcgtgaggctgggagggtggtgcccgctggtccgggtggccaagagaggctggaaggatggtgtctgctggtcagggcggcccaggaggtgctgtccaggcggagcccggggctggtgtgggtgcgccatgctcctgagaagtttctgggttgtggctttaatgttctcctgcaataagaacgctgacacttggctgaaaggtcctcacgtctcccccagtacacttctgagatgccaggaaggcattctgaacatcaggctgattcctgggactcccctccagggtgacctcaccggagtcaggagcccccgccccgcgcccactgccccactaggatggctctgcagtggcctgaggacagtgaacactggggtgtaaagttgcccactgtgatggttttgacctttgaagaaatttgggaaccaagtgaaagcccggcagctatttctaggcatttcagagggtgcttccctgcacgatttcagagggtgcttccctgcacgatttcagaaggtgcttccctgcacgacttcacagggtgcttccctgcacgatttcagagggtgcttccctgcacgatttcagagggtgcttccctgcacgacttcacagggtgcttccctgcacgatttcacagggtgcttccctgcacgatttcacagggtgcttccctgcacgatttcagaggctgcttccctgcacgcactctgccgcacaccgcactccctgggccaggagcctgctgcacagaaggaggttccttttcttctctttccagcgcttttcttctccttttcttc

SEQ ID NO: 465987 - DNA, 3845 bp, Homo sapiens
ccaggagaggtgactgagggacagagagcaggagagcccaacagcctggacgcagaagaggccaacagtccggacgtgacagcaggctgtgacccggcaggggtccacccaccccagtgagcaggcccaaggcagcgagggcccacacccctcacatgcaaaactggcctcttctggtcactggtgtctgaaaccaaatccagaacagcctgtggcctgtaaagcatatatttctaacgactgcagactggtgggatgataggagccttctgaatgaccaggactgctttcttgtggagctgatgaaaacgtattcttttagcatgttagaaatcactcttgcacacttgcccccactgcccctttcctggcatggggtgagatcggtctacttcagcaaccagtgcctgcccttgatccctgcaggagctgaaggagatgaccactccagggtcaggctgacccagctggagggagagcctcattctgactacatcaatgccaacttggtcccaggctacacccgcccacaggagttcattgcctctcaggggcctctcaagaaaacactggagaacttctggcggctggtgcgggagcagcaggtccgcatcatcatcatgccgaccatcagcatggagaacgggagggtgctgtgtgagcattactggctgaccgactctaccccggacacccatggtcacatcaccatccacctcctagctgaggagcctgaggatgagtggaccaagcgggaattccagctgcagcacctcctcaggggctgtccctgcggtgtgggcatgggccggacaggcaccttcgtggccctgtcgaggctgctgcagcagctggaggaggagcagatggtagacgtgttccatgctgtgtatgcactccggatgcaccagcccctcatgatccagaccctgagccagtacgtcttcctgcacagctgcctactgaacaagattctggaaggacccttcaacatctctgagtcttggcccatctctgtgacggacctcccgcaggcgtgtgccaagagggcagccagtgccaatgctggcttcttgaaggagtacgaggccatcaaggacgaggctggcttttccgcacccccgcctggctatgagcaggacagccccgtctcctcaccaatgctgatcatgtctttgccacagggggagagcaggaaggaaagggaggtgcagagactgcaatttccatacctggagcctgggcatgagctgcccgccaccaccctgctgcccttcctggctgctgtgggccagtgctgctctcggggcaacaacaagaagccgggcacactgctcagccactccaacaagggtgcaacccagctgggcaccttcctggccatggagcagctgctgcagcaggcagggtctgagtgcaccgtggatatctttaacgtggccctgcagcagtctcaggcctgtggccttatgaccccaacactgattggggcaggcggggcgagcctcctaaccctatgtccatctccagaagcagtatgtctacctctacaactgtctgaacagcgcgctggcagacgggctgccctgagtcagcactggtcacggtgcaggagagtagagcccccggggcggtccccaccgacggcgcagcccgccgggaccgggagaaagcagctgcggacaccgcgcccgtgcgtctgcgcgcctggccgccaggtgacccagcagcccggccgccgagatgcccaacccgcccaggctccgggcgctgtgacttcgcgccgctgtgtgcgcctccccgagcgccggctgcgccccccagcccggcccggggcctaccgcctgcccggccccctgccactgccaggaggacggcatcatgctgtctgccgactgctcttgagcttgggctgtccgccataccgggggacctggatcccctgacggcttacctattccatgtcagtagtggcaaacctttacaggattatgaatacaaaatgccactggtctcctgaagatacagcagcaaaatgaaacatccacaaatatgacttaaattgagaatatgtgcatgtctataactccacccttcactgtgctgcggttgttctctggaccactcctatttcatcagtgttattgtcaacctgaagaacaagcagaaagaggctctctgaaatgaaatggatgcttatttgggaagagagcattgcaacgggaatacacatgccatcgtaaatgacaagaatattcagggaggaccccatcacatttggctgccatatctccttggactcctcttggctgtgacagggtctcagacggcccttgccgttgatgaccttgatggtttgaagagccctaatcaggtgcattgcaggacgctcctcagttgggatttgtctgaggctttcctcgtaaatagcctggggttatgggttttgggaggaagaccacacagataaatgccattctcatcatgtcataacaagggtacacacgctgctgacatgactcttcactgacagtggtggctgtagtcggctggctgaggtctccccactgtgaagtccccctctccatgctgtactctctggaaggacgtcgccatgcacagccgacacttaggggtatgggttgtgctccacttccgaggaggagaagtagctacatgagtgactgggaaatgtcctgggggggatactcatccatgcctccacattacttatgtactcaatcttttatttatattgctatggactcatggatactcagcccatgctcgggctggactccagtgtgactttgcttcttttcctgctcagcttcttcgaggttggccttggtgagctcccgtggtgggttcccagctcctgtgtgcctctgacaggtgctcatcacttggctttttgggcatctccttaatttctgctactaaagatgctcctggcttatcttctgcatgtcctgcctttgcccttgaatcagtcaattctccaagaagctctggctcctttcctagaacagtgttagaaaccaagatctgggcactggtgtgttcattgctagtgaggtgttgttgcttctagactctctcagctgatagagcaagggaatgtttaagccatttagaacataaatgcattcatttaaaaacatggactatgtattcactgtgccttgggccccaagctgggtgttgaggatcttgagaaaataaatcaaggaagcccatggtctagggtagtgctggtgaggagataacagactcttgagatggcactagggccatggcggagacagacctggacactagtgggacccagcaaagacccacagcagcctggggaggcggcttccagagtgctgcgactttggaacatgaatactcctgagggttcacaaacgagcctggggggtattccaggaccagctggtaggggggcaaaggttgggtcatgaactatggggaatgcaagaattgcaagaggttgaacatgcctgggggtgcagagacagaggctgaggtgcagggcagtctgagacatggttaggagcctgggcattctcttgagagacaggggagaagaaaattcagatggagcgttcatttcaggaaggccaccctgggatctgggcaggagatgaatacctggcagggtcagggaagggaaggtaattgaaagtttacaaaaacaaaaccccattcacattcttaaagtattcttcatagaggtactatttcaataaacacatgctttatttgtatattataacagatgaattttcttcactggcaatttctatctttaactgtcaaatttaagccttttctgtaat

SEQ ID NO: 465988 - DNA, 1989 bp, Homo sapiens
ggaccaagcaggcagcttcttctacactcatgccaaattccatgtcagtagtggcaaacctttacaggattatgaatacaaaatgccactggtctcctgaagatacagcagcaaaatgaaacatccacaaatatgacttaaattgagaatatgtgcatgtctataactccacccttcactgtgctgcggttgttctctggaccactcctatttcatcagtgttattgtcaacctgaagaacaagcagaaagaggctctctgaaatgaaatggatgcttatttgggaagagagcattgcaacgggaatacacatgccatcgtaaatgacaagaatattcagggagggctgtctctcccgatctgaaaccccaattatacctgtgaaggcatggcattctggaacaccccatttcaaaaggagaaattatatttgtaaaaattttcagaacccctacagaccataacaaagagtaatgtcttgaaaacaggctgagtttagttgatttgtaatcaaagtttaacctcttttaggaccccatcacatttggctgccatatctccttggactcctcttggctgtgacagggtctcagacggcccttgccgttgatgaccttgatggtttgaagagccctaatcagggtacacacgctgctgacatgactcttcactgacagtggtggctgtagtcggctggctgaggtctccccactgtgaagtccccctctccatgctgtactctctggaaggacgtcgccatgcacagccgacacttaggggtatgggttgtgctccacttccgaggaggagaagtagctacatgagtgactgggaaatgtcctgggggggatactcatccatgcctccacattacttatgtactcaatcttttatttatattgctatggactcatggatactcagcccatgctcgggctggactccagtgtgactttgcttcttttcctgctcagcttcttcgaggttggccttggtgagctcccgtggtgggttcccagctcctgtgtgcctctgacaggtgctcatcacttggctttttgggcatctccttaatttctgctactaaagatgctcctggcttatcttctgcatgtcctgcctttgcccttgaatcagtcaattctccaagaagctctggctcctttcctagaacagtgttagaaaccaagatctgggcactggtgtgttcattgctagtgaggtgttgttgcttctagactctctcagctgatagagcaagggaatgtttaagccatttagaacataaatgcattcatttaaaaacatggactatgtattcactgtgccttgggccccaagctgggtgttgaggatcttgagaaaataaatcaaggaagcccatggtctagggtagtgctggtgaggagataacagactcttgagatggcactagggccatggcggagacagacctggacactagtgggacccagcaaagacccacagcagcctggggaggcggcttccagagtgctgcgactttggaacatgaatactcctgagggttcacaaacgagcctggggggtattccaggaccagctggtaggggggcaaaggttgggtcatgaactatggggaatgcaagaattgcaagaggttgaacatgcctgggggtgcagagacagaggctgaggtgcagggcagtctgagacatggttaggagcctgggcattctcttgagagacaggggagaagaaaattcagatggagcgttcatttcaggaaggccaccctgggatctgggcaggagatgaatacctggcagggtcagggaagggaaggtaattgaaagtttacaaaaacaaaaccccattcacattcttaaagtattcttcatagaggtactatttcaataaacacatgctttatttgtatattataacagatgaattttcttcactggcaatttctatctttaactgtcaaatttaagccttttctgtaat

SEQ ID NO: 465989 - DNA, 2325 bp, Homo sapiens
ccaggagaggtgactgagggacagagagcaggagagcccaacagcctggacgcagaagaggccaacagtccggacgtgacagcaggctgtgacccggcaggggtccacccaccccagtgagcaggcccaaggcagcgagggcccacacccctcacatgcaaaactggcctcttctggtcactggtgtctgaaaccaaatccagaacagcctgtggcctgtaaagcatatatttctaacgactgcagactggtgggatgataggagccttctgaatgaccaggactgctttcttgtggagctgatgaaaacgtattcttttagcatgttagaaatcactcttgcacacttgcccccactgcccctttcctggcatggggtgagatcggtctacttcagcaaccagtgcctgcccttgatccctgcaggagctgaaggagatgaccactccagggtcaggctgacccagctggagggagagcctcattctgactacatcaatgccaacttggtcccaggctacacccgcccacaggagttcattgcctctcaggggcctctcaagaaaacactggagaacttctggcggctggtgcgggagcagcaggtccgcatcatcatcatgccgaccatcagcatggagaacgggagggtgctgtgtgagcattactggctgaccgactctaccccggacacccatggtcacatcaccatccacctcctagctgaggagcctgaggatgagtggaccaagcgggaattccagctgcagcacctcctcaggggctgtccctgcggtgtgggcatgggccggacaggcaccttcgtggccctgtcgaggctgctgcagcagctggaggaggagcagatggtagacgtgttccatgctgtgtatgcactccggatgcaccagcccctcatgatccagaccctgagccagtacgtcttcctgcacagctgcctactgaacaagattctggaaggacccttcaacatctctgagtcttggcccatctctgtgacggacctcccgcaggcgtgtgccaagagggcagccagtgccaatgctggcttcttgaaggagtacgaggccatcaaggacgaggctggcttttccgcacccccgcctggctatgagcaggacagccccgtctcctcaccaatgctgatcatgtctttgccacagggggagagcaggaaggaaagggaggtgcagagactgcaatttccatacctggagcctgggcatgagctgcccgccaccaccctgctgcccttcctggctgctgtgggccagtgctgctctcggggcaacaacaagaagccgggcacactgctcagccactccaacaagggtgcaacccagctgggcaccttcctggccatggagcagctgctgcagcaggcagggtctgagtgcaccgtggatatctttaacgtggccctgcagcagtctcaggcctgtggccttatgaccccaacactgattggggcaggcggggcgagcctcctaaccctatgtccatctccagaagcagtatgtctacctctacaactgtctgaacagcgcgctggcagacgggctgccctgagtcagcactggtcacggtgcaggagagtagagcccccggggcggtccccaccgacggcgcagcccgccgggaccgggagaaagcagctgcggacaccgcgcccgtgcgtctgcgcgcctggccgccaggtgacccagcagcccggccgccgagatgcccaacccgcccaggctccgggcgctgtgacttcgcgccgctgtgtgcgcctccccgagcgccggctgcgccccccagcccggcccggggcctaccgcctgcccggccccctgccactgccaggaggacggcatcatgctgtctgccgactgctcttgagcttgggctgtccgccataccgggggacctggatcccctgacggcttacctagcagtgcccaggatggtggctgagggtaaagctgacagaactggaggtggaggaagtagcaggccagagaggactcgaagatccttagaaggagccatagacggaaccataggaggcgcccaggagctatgggctccagaagtttcctcctaaactgtggtctcagcgaggctcattgacactcaccggggtttcgacattctccctggctagggcctgttctggaaatagaccaagggggagatggagcccctggccgtgggacatccaatctgatggtgatgagaaggcatgatgcctcttgttctattcttttttgtttcttctttttttttaaataaaaaagaccagtaatgtgctgacttcat

SEQ ID NO: 465990 - DNA, 1680 bp, Homo sapiens
gtgtgggtttgaggttcctcttctgtgaactgccaagatctcatgctcctccccacagccctcttctctgctcacacaggaagcccaggaagcctctgcctcagagatgctgccgctgctgctgccgctgcccctgctgtgggcagggccctcgctcaggatgcaagattccggctggagatgccagagtccgtgacggtgcaggagggtctgtgcatctttgtgcactgttcggtcttctacctcgagtatggctggaaagattctacccctgcttatggccactggttccgggaaggggtcagtgtagaccaggagactccagtggccacaaacaactcaactcaaaaagtgcagaaggagacccagggccgattccacctcctcggtgatccctcaaggaacaactgctccctgagcatcagagacgccaggaggagggacaacggttcatacttcttttgggtggcgagaggaagaacaaaatttagttacaaatattccccgctctctgtgtatgtgacagccctgacccacaggcccgacatcctcatcccggagttcctaaagtctggccatcccagcaacctgacctgctctgtgccctgggtctgtgagcagggaacaccccccatcttctcctggatgtcagctgcccccacctccctgggccccaggaccctccactcctcagtgctcacgatcatcccacggcctcaggaccacggcaccaacctcatctgtcaggtgacgttccccggagctggtgtgaccacggagagaaccatccagctcagtgtctcctggaaatcaggaaccgtggaagaggtggttgttttggccgtgggggtagtggctgtgaagatcctgcttctctgcctttgcctcatcatcctcagtttccacaagaagaaggcggtgagggcagtggaggttgaggagaatgtatatgctgtcatgggttaatctctcaggcctccagactgtacttccagatgtctcctcatccagttcctccacagtctgaatggccatgtttcttcttcattgctggagaatgaagtgcaaatgccactgcctggactgaaggcctttcacgatctgtcttctgctggactctgctcctgatcccccttctccttgcatcacccgaagtctccctacacccaccaggccaagccctctgtgattctgagactttgcatgtgtagttacttctcctgaaatggccttcctccccattcctgccaatccaggtccttatcatccttcaggttgtcttaaatgtcatccaggtgtgtgtatttttatgtaatccttgtatgatattaagcggagatgtggcatttgttcattaatttgtagacatattcagtaaccatactgaatacatataatgactatgtgccagcatttccgtatgtgcaagaagttcatcaatagatatagactcaaagagctctgtcatcaagctgttgttctgaagagcagaaggatacaaataaaaagaaataagtaaaatattttttcccatgttggatagagatatttgtttagagaaaaataacacagggaaataagcacagactatactgggaaacagtttctatatctgatagtggaaagaggtgacatttaggcaaagacgtgaaggtgctgaagaggcgggctctgagtctg

SEQ ID NO: 465991 - DNA, 5368 bp, Homo sapiens
gactgtggcttttggaccacacttcggattcacccgggcagatgattaaaaatgccggtttcgggacccgccctattcccatggaattagtctggagcttgggccccggagtctgcatgtctaataagcgtccctggggttaccaaggcaccccaaagtttaaaagagtatgctgctgctgttccgctttgcgtcctcgctacaaacgcctggtggacaacatattccctgaagatccaaaagatggccttgtgaaaactgatatggagaaattgacattttatgcagtatctgctccagagaaactggatcgaattggttcttacctggcagaaaggttgagcagggatgttgtcagacatcgttctgggtatgttttgattgctatggaggcactggaccaacttctcatggcttgccattctcaaagcattaagccatttgtagaaagctttcttcatatggtggcaaagctgctggaatcgggggaaccaaagcttcaagttcttggaacaaattcttttgtcaaatttgcaaatattgaagaagacacaccatcctatcacagacgttatgacttttttgtgtctcgattcagtgccatgtgccattcctgtcatagtgatccagaaatacgaacagagatacgaattgctggaattagaggtattcaaggtgtggttcgcaaaacagtcaacgatgaacttcgggccaccatttgggaacctcagcatatggataagattgttccatccctcctgtttaacatgcaaaagatagaagaagttgacagtcgcataggccctccttcttctccttctgcaactgacaaagaagagaatcctgctgtgctggctgaaaactgtttcagagaactgctgggtcgagcaacttttgggaatatgaataatgctgttagaccagtttttgcgcatttagatcatcacaaactgtgggatcccaatgaatttgcagttcactgctttaaaattataatgtattccattcaggctcagtattctcaccatgtgatccaggagattctaggacaccttgatgctcgtaaaaaagatgctccccgggttcgagcaggtattattcaggttctgttagaggctgttgccattgctgctaaaggttccataggtccgacagtgctggaagtcttcaatacccttttgaaacatctgcgtctcagcgttgaattcgaagcaaatgatttacaggggggatctgtaggcagtgtcaacttaaatacaagttccaaagacaatgatgagaagattgtgcagaatgctatcatccaaacaataggattttttggaagtaacctaccagattatcagaggtcagaaatcatgatgttcattatggggaaagtacctgtctttggaacatctacccatactttggatatcagtcaactaggggatttgggaaccaggagaattcagataatgttgctgagatctttgcttatggtgacctctggatataaagcgaagacgattgttactgcactgccagggtctttcctggatcctttgttatcaccatctctcatggaggactacgaactgagacagttggtcttggaagtaatgcataatctcatggatcgtcatgacaatagggcaaagcttcgagggatcagaataataccggatgtagctgacctaaagataaaaagagaaaaaatttgcagacaagacacaagtttcatgaaaaagaatgggcaacagctgtatcggcacatatatttgggttgtaaagaggaagacaacgttcagaaaaactatgaactactttatacttctcttgctcttataactattgaactggctaatgaagaagtagttattgatctcattcgactggccattgctttacaggacagtgcaattatcaatgaggataatttgccaatgttccatcgttgtggaatcatggcactggttgcagcatacctcaactttgtaagtcagatgatagctgtccctgcattttgccagcatgttagcaaggttattgaaattcgaactatggaagccccttattttctaccagagcatatcttcagagataagtgcatgcttccaaaatctttagagaagcatgaaaaagatttgtactttctgaccaacaagattgcagagtcgctaggtggaagtggatatagtgttgagagattgtcagttccgtatgtaccacaagtaacagatgaagatcgactttctagaagaaaaagcattgtggacaccgtatccattcaggtggatattttatccaacaatgttccttctgatgatgtggttagtaacactgaagaaatcacttttgaagcattgaagaaagcaattgataccagtggaatggaagaacaggaaaaggaaaagaggcgtcttgtgatagagaaatttcagaaagcaccttttgaagaaatagcagcacagtgtgaatccaaagcaaatttgcttcatgatagacttgcccaaatattggaactcaccatacgtcctcctcccagtccatcaggaacactgaccattacttctgggcatgcccaataccaatctgtcccagtctatgagatgaagtttccagatctgtgtgtgtactgatcggcgcatgaagacctcagcatatgatttgtaaagcctaaaaattaaggccaagctgagctttcagggtttacttaatgtgtattaacatacttcttgaaaataatgatggaacatatctttaaccaaatgtttggcataccatattagaagttttggagctatatataatttcgagtactttcaaagatagatttatgccatgttaatttgctttgaggttcctgttgcctttttaagttgaacatgttttggtttcactttattccactgttaagtagtatgttttaaacttttcacaaatgtaatgttttttaaaaagtaagccttcagaggattgaaactgtataaattgtttatctcttaaacatctacacagccgcttagatgtagaatttttgttgttgttttctgcaaaggcagatacatttaaatatattcctagtcctggggctgcaaaactgttcggtggctttttgtccccatgctttagataagctgggataggcaccttgctattcagttactataataatatgtgataggcattcctcatcttcttcacaataataggacatctgttgaatagcattcctcgaatataaccctaaaaacgccatactttaaattgtctggttcttgtaatattgtgtttcctgccaagagtttgaccattctgcttgagaagtgtagagcttactcttggagtaccaaactgtgcaatatttttacatcataagatgtattagtttacaggctgtgctttgaaattatagtagtattttgctgtggctccattaattaaatgagatatatatttagtgcagaaaaaagacatttaaaacagctattagttcacctgtgaagagtctgtacattttgatttctattaagagcacatttatttacatttgtatattattttaaatcctcatagtcaaaaaattctccagatggacttttaatttgtaagatttgaactgtgacttgtatacatctgtttagaatcaattatatttgaaaagctgcctgtgttttaacagtcaagtgtgctaaagtttgtcaatttaagctgcttttgatttcagctaccaagatcacaggtgcactctacacataacactgacagacccataacattacatacatcttagtgaattctatcacatggtaaaatgaacagctttctttgtaactcataaaattctcttaggacatttttataaagtcacctgtttatagttctatcttttcagattccatttctttttacataaaacagcatacatatcaaaaactgtagcctagaatacagtttaatttttggcttttgtttttgtttaaaaaattgcagtgaagaatgggatgtttgtgtttatggctatttgggcacctttagtagaaacagacaaaagtaaggaaacgataataggacaagcatacttgaaaatttctgaatacttaaacaaaagcgcaacatcttgaaaaccagtctagtcattgaaacctatgaaatgacactgaaagatcctgggctgcttcttaaataagtagatcagcaagacttgtttcagagtgacagtggagtcgttaccgctggaggactaaagggccctgtggcagctgtcactggaactttgcctcttgatcaggaaaaatgcttcaccagtccgtaaagccaagttgtattttttttattgcccttttttccttctgtatttttaaagaaggatgttaatttttgactatatattttaaaaaaatctaagcagggggacatgcaaaaacaatcatcatccacttggatgtcattttatagattaacactgtgtgcttttgtatggaaaaaatatatataatttaatagtataaaaaataaaatatatattcatttgcacttacgtgaaacacaaactttgctctacaaaatttcgtgtttcttagtgattttaaaatgcatgtattgcatgtaaaggaaaaccattacaattaatgtttatcacacctttatcttggtctttgttgatttgggttttgttggggtttttgttactgtttttaaattacagtaggcttctatatatcctggatttctgaactggtcttgttgacaaggattcccaagaaatggatcttttcactggctgactctcccatatctgcaagagattctgcaggaactgggtgtgcacacggtgttgtagccagttcaggtactgaatatttaggatttggtgaagttcactgtattgctatatttttgtagataaataaaactcaataaattgttaatcattctctttttgctgtatagaattgcttatatcactctttctttcatgacattggttaacatttaaatgttcctcctgtacttgtgttgtctgtgaccgcttatagagttttattgttattggtgtttacctgaatacctatgcgtacacacacacatatttccttaatacttctgaactcattatcttttagaataataatactactacactttaccagcaattaacttctccctacccaaaatgtttttcttcctgtctgaaaatggaactaatttgtcttattcgtgcttatatctgtattaaatgcaataaagttagtttttgaaatgtaaaaattcactgtgcaattcatatgtcagcaataaaacatagattatttgtatataagttcatttttatagctattgttacatttaattaaatttattcaatatttgcttaaattaaaaa

SEQ ID NO: 465992 - DNA, 5370 bp, Homo sapiens
cccggcgaggagtgggctggcggcggtagctgtcgcccgcttggttgcgtgaccgcggggtccgcgtccgctccctccacccttcgcccttcgcccttcgcctcgttccggcctccgcggcccagcaacggccgtcatggtgccgtcggcgctccctgcgcggccccgctgagcctcggtgcggcggcgagcgcggtcgagatcgccatgcctacccgagtatgctgctgctgttccgctttgcgtcctcgctacaaacgcctggtggacaacatattccctgaagatccaaaagtaatttgatctacatctactgatccttctctttgctgacccattctgccccccgctgacctccttaaggatggccttgtgaaaactgatatggagaaattgacattttatgcagtatctgctccagagaaactggatcgaattggttcttacctggcagaaaggttgagcagggatgttgtcagacatcgttctgggtatgttttgattgctatggaggcactggaccaacttctcatggcttgccattctcaaagcattaagccatttgtagaaagctttcttcatatggtggcaaagctgctggaatcgggggaaccaaagcttcaagttcttggaacaaattcttttgtcaaatttgcaaatattgaagaagacacaccatcctatcacagacgttatgacttttttgtgtctcgattcagtgccatgtgccattcctgtcatagtgatccagaaatacgaacagagatacgaattgctggaattagaggtattcaaggtgtggttcgcaaaacagtcaacgatgaacttcgggccaccatttgggaacctcagcatatggataagattgttccatccctcctgtttaacatgcaaaagatagaagaagttgacagtcgcataggccctccttcttctccttctgcaactgacaaagaagagaatcctgctgtgctggctgaaaactgtttcagagaactgctgggtcgagcaacttttgggaatatgaataatgctgttagaccagtttttgcgcatttagatcatcacaaactgtgggatcccaatgaatttgcagttcactgctttaaaattataatgtattccattcaggctcagtattctcaccatgtgatccaggagattctaggacaccttgatgctcgtaaaaaagatgctccccgggttcgagcaggtattattcaggttctgttagaggctgttgccattgctgctaaaggttccataggtccgacagtgctggaagtcttcaatacccttttgaaacatctgcgtctcagcgttgaattcgaagcaaatgatttacaggggggatctgtaggcagtgtcaacttaaatacaagttccaaagacaatgatgagaagattgtgcagaatgctatcatccaaacaataggattttttggaagtaacctaccagattatcagaggtcagaaatcatgatgttcattatggggaaagtacctgtctttggaacatctacccatactttggatatcagtcaactaggggatttgggaaccaggagaattcagataatgttgctgagatctttgcttatggtgacctctggatataaagcgaagacgattgttactgcactgccagggtctttcctggatcctttgttatcaccatctctcatggaggactacgaactgagacagttggtcttggaagtaatgcataatctcatggatcgtcatgacaatagggcaaagcttcgagggatcagaataataccggatgtagctgacctaaagataaaaagagaaaaaatttgcagacaagacacaagtttcatgaaaaagaatgggcaacagctgtatcggcacatatatttgggttgtaaagaggaagacaacgttcagaaaaactatgaactactttatacttctcttgctcttataactattgaactggctaatgaagaagtagttattgatctcattcgactggccattgctttacaggacagtgcaattatcaatgaggataatttgccaatgttccatcgttgtggaatcatggcactggttgcagcatacctcaactttgtaagtcagatgatagctgtccctgcattttgccagcatgttagcaaggttattgaaattcgaactatggaagccccttattttctaccagagcatatcttcagagataagtgcatgcttccaaaatctttagagaagcatgaaaaagatttgtactttctgaccaacaagattgcagagtcgctaggtggaagtggatatagtgttgagagattgtcagttccgtatgtaccacaagtaacagatgaagatcgactttctagaagaaaaagcattgtggacaccgtatccattcaggtggatattttatccaacaatgttccttctgatgatgtggttagtaacactgaagaaatcacttttgaagcattgaagaaagcaattgataccagtggaatggaagaacaggaaaaggaaaagaggcgtcttgtgatagagaaatttcagaaagcaccttttgaagaaatagcagcacagtgtgaatccaaagcaaatttgcttcatgatagacttgcccaaatattggaactcaccatacgtcctcctcccagtccatcaggaacactgaccattacttctgggcatgcccaataccaatctgtcccagtctatgagatgaagtttccagatctgtgtgtgtactgatcggcgcatgaagacctcagcatatgatttgtaaagcctaaaaattaaggccaagctgagctttcagggtttacttaatgtgtattaacatacttcttgaaaataatgatggaacatatctttaaccaaatgtttggcataccatattagaagttttggagctatatataatttcgagtactttcaaagatagatttatgccatgttaatttgctttgaggttcctgttgcctttttaagttgaacatgttttggtttcactttattccactgttaagtagtatgttttaaacttttcacaaatgtaatgttttttaaaaagtaagccttcagaggattgaaactgtataaattgtttatctcttaaacatctacacagccgcttagatgtagaatttttgttgttgttttctgcaaaggcagatacatttaaatatattcctagtcctggggctgcaaaactgttcggtggctttttgtccccatgctttagataagctgggataggcaccttgctattcagttactataataatatgtgataggcattcctcatcttcttcacaataataggacatctgttgaatagcattcctcgaatataaccctaaaaacgccatactttaaattgtctggttcttgtaatattgtgtttcctgccaagagtttgaccattctgcttgagaagtgtagagcttactcttggagtaccaaactgtgcaatatttttacatcataagatgtattagtttacaggctgtgctttgaaattatagtagtattttgctgtggctccattaattaaatgagatatatatttagtgcagaaaaaagacatttaaaacagctattagttcacctgtgaagagtctgtacattttgatttctattaagagcacatttatttacatttgtatattattttaaatcctcatagtcaaaaaattctccagatggacttttaatttgtaagatttgaactgtgacttgtatacatctgtttagaatcaattatatttgaaaagctgcctgtgttttaacagtcaagtgtgctaaagtttgtcaatttaagctgcttttgatttcagctaccaagatcacaggtgcactctacacataacactgacagacccataacattacatacatcttagtgaattctatcacatggtaaaatgaacagctttctttgtaactcataaaattctcttaggacatttttataaagtcacctgtttatagttctatcttttcagattccatttctttttacataaaacagcatacatatcaaaaactgtagcctagaatacagtttaatttttggcttttgtttttgtttaaaaaattgcagtgaagaatgggatgtttgtgtttatggctatttgggcacctttagtagaaacagacaaaagtaaggaaacgataataggacaagcatacttgaaaatttctgaatacttaaacaaaagcgcaacatcttgaaaaccagtctagtcattgaaacctatgaaatgacactgaaagatcctgggctgcttcttaaataagtagatcagcaagacttgtttcagagtgacagtggagtcgttaccgctggaggactaaagggccctgtggcagctgtcactggaactttgcctcttgatcaggaaaaatgcttcaccagtccgtaaagccaagttgtattttttttattgcccttttttccttctgtatttttaaagaaggatgttaatttttgactatatattttaaaaaaatctaagcagggggacatgcaaaaacaatcatcatccacttggatgtcattttatagattaacactgtgtgcttttgtatggaaaaaatatatataatttaatagtataaaaaataaaatatatattcatttgcacttacgtgaaacacaaactttgctctacaaaatttcgtgtttcttagtgattttaaaatgcatgtattgcatgtaaaggaaaaccattacaattaatgtttatcacacctttatcttggtctttgttgatttgggttttgttggggtttttgttactgtttttaaattacagtaggcttctatatatcctggatttctgaactggtcttgttgacaaggattcccaagaaatggatcttttcactggctgactctcccatatctgcaagagattctgcaggaactgggtgtgcacacggtgttgtagccagttcaggtactgaatatttaggatttggtgaagttcactgtattgctatatttttgtagataaataaaactcaataaattgttaatcattctctttttgctgtatagaattgcttatatcactctttctttcatgacattggttaacatttaaatgttcctcctgtacttgtgttgtctgtgaccgcttatagagttttattgttattggtgtttacctgaatacctatgcgtacacacacacatatttccttaatacttctgaactcattatcttttagaataataatactactacactttaccagcaattaacttctccctacccaaaatgtttttcttcctgtctgaaaatggaactaatttgtcttattcgtgcttatatctgtattaaatgcaataaagttagtttttgaaatgta

SEQ ID NO: 465993 - DNA, 5600 bp, Homo sapiens
cccggcgaggagtgggctggcggcggtagctgtcgcccgcttggttgcgtgaccgcggggtccgcgtccgctccctccacccttcgcccttcgcccttcgcctcgttccggcctccgcggcccagcaacggccgtcatggtgccgtcggcgctccctgcgcggccccgctgagcctcggtgcggcggcgagcgcggtcgagatcgccatgcctacccgagtatgctgctgctgttccgctttgcgtcctcgctacaaacgcctggtggacaacatattccctgaagatccaaaagtaatttgatctacatctactgatccttctctttgctgacccattctgccccccgctgacctccttaaggatggccttgtgaaaactgatatggagaaattgacattttatgcagtatctgctccagagaaactggatcgaattggttcttacctggcagaaaggttgagcagggatgttgtcagacatcgttctgggtatgttttgattgctatggaggcactggaccaacttctcatggcttgccattctcaaagcattaagccatttgtagaaagctttcttcatatggtggcaaagctgctggaatcgggggaaccaaagcttcaagttcttggaacaaattcttttgtcaaatttgcaaatattgaagaagacacaccatcctatcacagacgttatgacttttttgtgtctcgattcagtgccatgtgccattcctgtcatagtgatccagaaatacgaacagagatacgaattgctggaattagaggtattcaaggtgtggttcgcaaaacagtcaacgatgaacttcgggccaccatttgggaacctcagcatatggataagattgttccatccctcctgtttaacatgcaaaagatagaagaagttgacagtcgcataggccctccttcttctccttctgcaactgacaaagaagagaatcctgctgtgctggctgaaaactgtttcagagaactgctgggtcgagcaacttttgggaatatgaataatgctgttagaccagtttttgcgcatttagatcatcacaaactgtgggatcccaatgaatttgcagttcactgctttaaaattataatgtattccattcaggctcagtattctcaccatgtgatccaggagattctaggacaccttgatgctcgtaaaaaagatgctccccgggttcgagcaggtattattcaggttctgttagaggctgttgccattgctgctaaaggttccataggtccgacagtgctggaagtcttcaatacccttttgaaacatctgcgtctcagcgttgaattcgaagcaaatgatttacaggggggatctgtaggcagtgtcaacttaaatacaagttccaaagacaatgatgagaagattgtgcagaatgctatcatccaaacaataggattttttggaagtaacctaccagattatcagaggtcagaaatcatgatgttcattatggggaaagtacctgtctttggaacatctacccatactttggatatcagtcaactaggggatttgggaaccaggagaattcagataatgttgctgagatctttgcttatggtgacctctggatataaagcgaagacgattgttactgcactgccagggtctttcctggatcctttgttatcaccatctctcatggaggactacgaactgagacagttggtcttggaagtaatgcataatctcatggatcgtcatgacaatagggcaaagcttcgagggatcagaataataccggatgtagctgacctaaagataaaaagagaaaaaatttgcagacaagacacaagtttcatgaaaaagaatgggcaacagctgtatcggcacatatatttgggttgtaaagaggaagacaacgttcagaaaaactatgaactactttatacttctcttgctcttataactattgaactggctaatgaagaagtagttattgatctcattcgactggccattgctttacaggacagtgcaattatcaatgaggataatttgccaatgttccatcgttgtggaatcatggcactggttgcagcatacctcaactttgtaagtcagatgatagctgtccctgcattttgccagcatgttagcaaggttattgaaattcgaactatggaagccccttattttctaccagagcatatcttcagagataagtgcatgcttccaaaatctttagagaagcatgaaaaagatttgtactttctgaccaacaagattgcagagtcgctaggtggaagtggatatagtgttgagagattgtcagttccgtatgtaccacaagtaacagatgaagatcgactttctagaagaaaaagcattgtggacaccgtatccattcaggtggatattttatccaacaatgttccttctgatgatgtgaacaaaacaacagaagattcccaagtttaatctgacttcaactagaactatgaagctcagtagcaaaactgagggagtggaactcttgctgcttgatttccagctaaagcctttgtattgcagagaagctaaggtgcagagaatgacgtcttttgctttcattagtcttgctgccttagacttagcaaaagaagctcatgagctaaaattagggatgaccagattcccaggttagtaacactgaagaaatcacttttgaagcattgaagaaagcaattgataccagtggaatggaagaacaggaaaaggaaaagaggcgtcttgtgatagagaaatttcagaaagcaccttttgaagaaatagcagcacagtgtgaatccaaagcaaatttgcttcatgatagacttgcccaaatattggaactcaccatacgtcctcctcccagtccatcaggaacactgaccattacttctgggcatgcccaataccaatctgtcccagtctatgagatgaagtttccagatctgtgtgtgtactgatcggcgcatgaagacctcagcatatgatttgtaaagcctaaaaattaaggccaagctgagctttcagggtttacttaatgtgtattaacatacttcttgaaaataatgatggaacatatctttaaccaaatgtttggcataccatattagaagttttggagctatatataatttcgagtactttcaaagatagatttatgccatgttaatttgctttgaggttcctgttgcctttttaagttgaacatgttttggtttcactttattccactgttaagtagtatgttttaaacttttcacaaatgtaatgttttttaaaaagtaagccttcagaggattgaaactgtataaattgtttatctcttaaacatctacacagccgcttagatgtagaatttttgttgttgttttctgcaaaggcagatacatttaaatatattcctagtcctggggctgcaaaactgttcggtggctttttgtccccatgctttagataagctgggataggcaccttgctattcagttactataataatatgtgataggcattcctcatcttcttcacaataataggacatctgttgaatagcattcctcgaatataaccctaaaaacgccatactttaaattgtctggttcttgtaatattgtgtttcctgccaagagtttgaccattctgcttgagaagtgtagagcttactcttggagtaccaaactgtgcaatatttttacatcataagatgtattagtttacaggctgtgctttgaaattatagtagtattttgctgtggctccattaattaaatgagatatatatttagtgcagaaaaaagacatttaaaacagctattagttcacctgtgaagagtctgtacattttgatttctattaagagcacatttatttacatttgtatattattttaaatcctcatagtcaaaaaattctccagatggacttttaatttgtaagatttgaactgtgacttgtatacatctgtttagaatcaattatatttgaaaagctgcctgtgttttaacagtcaagtgtgctaaagtttgtcaatttaagctgcttttgatttcagctaccaagatcacaggtgcactctacacataacactgacagacccataacattacatacatcttagtgaattctatcacatggtaaaatgaacagctttctttgtaactcataaaattctcttaggacatttttataaagtcacctgtttatagttctatcttttcagattccatttctttttacataaaacagcatacatatcaaaaactgtagcctagaatacagtttaatttttggcttttgtttttgtttaaaaaattgcagtgaagaatgggatgtttgtgtttatggctatttgggcacctttagtagaaacagacaaaagtaaggaaacgataataggacaagcatacttgaaaatttctgaatacttaaacaaaagcgcaacatcttgaaaaccagtctagtcattgaaacctatgaaatgacactgaaagatcctgggctgcttcttaaataagtagatcagcaagacttgtttcagagtgacagtggagtcgttaccgctggaggactaaagggccctgtggcagctgtcactggaactttgcctcttgatcaggaaaaatgcttcaccagtccgtaaagccaagttgtattttttttattgcccttttttccttctgtatttttaaagaaggatgttaatttttgactatatattttaaaaaaatctaagcagggggacatgcaaaaacaatcatcatccacttggatgtcattttatagattaacactgtgtgcttttgtatggaaaaaatatatataatttaatagtataaaaaataaaatatatattcatttgcacttacgtgaaacacaaactttgctctacaaaatttcgtgtttcttagtgattttaaaatgcatgtattgcatgtaaaggaaaaccattacaattaatgtttatcacacctttatcttggtctttgttgatttgggttttgttggggtttttgttactgtttttaaattacagtaggcttctatatatcctggatttctgaactggtcttgttgacaaggattcccaagaaatggatcttttcactggctgactctcccatatctgcaagagattctgcaggaactgggtgtgcacacggtgttgtagccagttcaggtactgaatatttaggatttggtgaagttcactgtattgctatatttttgtagataaataaaactcaataaattgttaatcattctctttttgctgtatagaattgcttatatcactctttctttcatgacattggttaacatttaaatgttcctcctgtacttgtgttgtctgtgaccgcttatagagttttattgttattggtgtttacctgaatacctatgcgtacacacacacatatttccttaatacttctgaactcattatcttttagaataataatactactacactttaccagcaattaacttctccctacccaaaatgtttttcttcctgtctgaaaatggaactaatttgtcttattcgtgcttatatctgtattaaatgcaataaagttagtttttgaaatgta

SEQ ID NO: 465994 - DNA, 3069 bp, Homo sapiens
tcgatttagaggatcccccctcacggatactcaagtacagatgaagatcgactttctagaagaaaaagcattgtggacaccgtatccattcaggtggatattttatccaacaatgttccttctgatgatgtggttagtaacactgaagaaatcacttttgaagcattgaagaaagcaattgataccagtggaatggaagaacaggaaaaggaaaagaggcgtcttgtgatagagaaatttcagaaagcaccttttgaagaaatagcagcacagtgtgaatccaaagcaaatttgcttcatgatagacttgcccaaatattggaactcaccatacgtcctcctcccagtccatcaggaacactgaccattacttctgggcatgcccaataccaatctgtcccagtctatgagatgaagtttccagatctgtgtgtgtactgatcggcgcatgaagacctcagcatatgatttgtaaagcctaaaaattaaggccaagctgagctttcagggtttacttaatgtgtattaacatacttcttgaaaataatgatggaacatatctttaaccaaatgtttggcataccatattagaagttttggagctatatataatttcgagtactttcaaagatagatttatgccatgttaatttgctttgaggttcctgttgcctttttaagttgaacatgttttggtttcactttattccactgttaagtagtatgttttaaacttttcacaaatgtaatgttttttaaaaagtaagccttcagaggattgaaactgtataaattgtttatctcttaaacatctacacagccgcttagatgtagaatttttgttgttgttttctgcaaaggcagatacatttaaatatattcctagtcctggggctgcaaaactgttcggtggctttttgtccccatgctttagataagctgggataggcaccttgctattcagttactataataatatgtgataggcattcctcatcttcttcacaataataggacatctgttgaatagcattcctcgaatataaccctaaaaacgccatactttaaattgtctggttcttgtaatattgtgtttcctgccaagagtttgaccattctgcttgagaagtgtagagcttactcttggagtaccaaactgtgcaatatttttacatcataagatgtattagtttacaggctgtgctttgaaattatagtagtattttgctgtggctccattaattaaatgagatatatatttagtgcagaaaaaagacatttaaaacagctattagttcacctgtgaagagtctgtacattttgatttctattaagagcacatttatttacatttgtatattattttaaatcctcatagtcaaaaaattctccagatggacttttaatttgtaagatttgaactgtgacttgtatacatctgtttagaatcaattatatttgaaaagctgcctgtgttttaacagtcaagtgtgctaaagtttgtcaatttaagctgcttttgatttcagctaccaagatcacaggtgcactctacacataacactgacagacccataacattacatacatcttagtgaattctatcacatggtaaaatgaacagctttctttgtaactcataaaattctcttaggacatttttataaagtcacctgtttatagttctatcttttcagattccatttctttttacataaaacagcatacatatcaaaaactgtagcctagaatacagtttaatttttggcttttgtttttgtttaaaaaattgcagtgaagaatgggatgtttgtgtttatggctatttgggcacctttagtagaaacagacaaaagtaaggaaacgataataggacaagcatacttgaaaatttctgaatacttaaacaaaagcgcaacatcttgaaaaccagtctagtcattgaaacctatgaaatgacactgaaagatcctgggctgcttcttaaataagtagatcagcaagacttgtttcagagtgacagtggagtcgttaccgctggaggactaaagggccctgtggcagctgtcactggaactttgcctcttgatcaggaaaaatgcttcaccagtccgtaaagccaagttgtattttttttattgcccttttttccttctgtatttttaaagaaggatgttaatttttgactatatattttaaaaaaatctaagcagggggacatgcaaaaacaatcatcatccacttggatgtcattttatagattaacactgtgtgcttttgtatggaaaaaatatatataatttaatagtataaaaaataaaatatatattcatttgcacttacgtgaaacacaaactttgctctacaaaatttcgtgtttcttagtgattttaaaatgcatgtattgcatgtaaaggaaaaccattacaattaatgtttatcacacctttatcttggtctttgttgatttgggttttgttggggtttttgttactgtttttaaattacagtaggcttctatatatcctggatttctgaactggtcttgttgacaaggattcccaagaaatggatcttttcactggctgactctcccatatctgcaagagattctgcaggaactgggtgtgcacacggtgttgtagccagttcaggtactgaatatttaggatttggtgaagttcactgtattgctatatttttgtagataaataaaactcaataaattgttaatcattctctttttgctgtatagaattgcttatatcactctttctttcatgacattggttaacatttaaatgttcctcctgtacttgtgttgtctgtgaccgcttatagagttttattgttattggtgtttacctgaatacctatgcgtacacacacacatatttccttaatacttctgaactcattatcttttagaataataatactactacactttaccagcaattaacttctccctacccaaaatgtttttcttcctgtctgaaaatggaactaatttgtcttattcgtgcttatatctgtattaaatgcaataaagttagtttttgaaatgta

SEQ ID NO: 465995 - DNA, 3070 bp, Homo sapiens
cagctcacagctcagacccaacacaaagaagaaaacaaatctgaaaaacttcttagatgacttgtaactaggtaaaggtgttatttatattgaccctttttaactctcgatttcacttatcacttttctctaggttagtaacactgaagaaatcacttttgaagcattgaagaaagcaattgataccagtggaatggaagaacaggaaaaggaaaagaggcgtcttgtgatagagaaatttcagaaagcaccttttgaagaaatagcagcacagtgtgaatccaaagcaaatttgcttcatgatagacttgcccaaatattggaactcaccatacgtcctcctcccagtccatcaggaacactgaccattacttctgggcatgcccaataccaatctgtcccagtctatgagatgaagtttccagatctgtgtgtgtactgatcggcgcatgaagacctcagcatatgatttgtaaagcctaaaaattaaggccaagctgagctttcagggtttacttaatgtgtattaacatacttcttgaaaataatgatggaacatatctttaaccaaatgtttggcataccatattagaagttttggagctatatataatttcgagtactttcaaagatagatttatgccatgttaatttgctttgaggttcctgttgcctttttaagttgaacatgttttggtttcactttattccactgttaagtagtatgttttaaacttttcacaaatgtaatgttttttaaaaagtaagccttcagaggattgaaactgtataaattgtttatctcttaaacatctacacagccgcttagatgtagaatttttgttgttgttttctgcaaaggcagatacatttaaatatattcctagtcctggggctgcaaaactgttcggtggctttttgtccccatgctttagataagctgggataggcaccttgctattcagttactataataatatgtgataggcattcctcatcttcttcacaataataggacatctgttgaatagcattcctcgaatataaccctaaaaacgccatactttaaattgtctggttcttgtaatattgtgtttcctgccaagagtttgaccattctgcttgagaagtgtagagcttactcttggagtaccaaactgtgcaatatttttacatcataagatgtattagtttacaggctgtgctttgaaattatagtagtattttgctgtggctccattaattaaatgagatatatatttagtgcagaaaaaagacatttaaaacagctattagttcacctgtgaagagtctgtacattttgatttctattaagagcacatttatttacatttgtatattattttaaatcctcatagtcaaaaaattctccagatggacttttaatttgtaagatttgaactgtgacttgtatacatctgtttagaatcaattatatttgaaaagctgcctgtgttttaacagtcaagtgtgctaaagtttgtcaatttaagctgcttttgatttcagctaccaagatcacaggtgcactctacacataacactgacagacccataacattacatacatcttagtgaattctatcacatggtaaaatgaacagctttctttgtaactcataaaattctcttaggacatttttataaagtcacctgtttatagttctatcttttcagattccatttctttttacataaaacagcatacatatcaaaaactgtagcctagaatacagtttaatttttggcttttgtttttgtttaaaaaattgcagtgaagaatgggatgtttgtgtttatggctatttgggcacctttagtagaaacagacaaaagtaaggaaacgataataggacaagcatacttgaaaatttctgaatacttaaacaaaagcgcaacatcttgaaaaccagtctagtcattgaaacctatgaaatgacactgaaagatcctgggctgcttcttaaataagtagatcagcaagacttgtttcagagtgacagtggagtcgttaccgctggaggactaaagggccctgtggcagctgtcactggaactttgcctcttgatcaggaaaaatgcttcaccagtccgtaaagccaagttgtattttttttattgcccttttttccttctgtatttttaaagaaggatgttaatttttgactatatattttaaaaaaatctaagcagggggacatgcaaaaacaatcatcatccacttggatgtcattttatagattaacactgtgtgcttttgtatggaaaaaatatatataatttaatagtataaaaaataaaatatatattcatttgcacttacgtgaaacacaaactttgctctacaaaatttcgtgtttcttagtgattttaaaatgcatgtattgcatgtaaaggaaaaccattacaattaatgtttatcacacctttatcttggtctttgttgatttgggttttgttggggtttttgttactgtttttaaattacagtaggcttctatatatcctggatttctgaactggtcttgttgacaaggattcccaagaaatggatcttttcactggctgactctcccatatctgcaagagattctgcaggaactgggtgtgcacacggtgttgtagccagttcaggtactgaatatttaggatttggtgaagttcactgtattgctatatttttgtagataaataaaactcaataaattgttaatcattctctttttgctgtatagaattgcttatatcactctttctttcatgacattggttaacatttaaatgttcctcctgtacttgtgttgtctgtgaccgcttatagagttttattgttattggtgtttacctgaatacctatgcgtacacacacacatatttccttaatacttctgaactcattatcttttagaataataatactactacactttaccagcaattaacttctccctacccaaaatgtttttcttcctgtctgaaaatggaactaatttgtcttattcgtgcttatatctgtattaaatgcaataaagttagtttttgaaatgta

SEQ ID NO: 465996 - DNA, 5315 bp, Homo sapiens
cccggcgaggagtgggctggcggcggtagctgtcgcccgcttggttgcgtgaccgcggggtccgcgtccgctccctccacccttcgcccttcgcccttcgcctcgttccggcctccgcggcccagcaacggccgtcatggtgccgtcggcgctccctgcgcggccccgctgagcctcggtgcggcggcgagcgcggtcgagatcgccatgcctacccgagtatgctgctgctgttccgctttgcgtcctcgctacaaacgcctggtggacaacatattccctgaagatccaaaagtaatttgatctacatctactgatccttctctttgctgacccattctgccccccgctgacctccttaaggatggccttgtgaaaactgatatggagaaattgacattttatgcagtatctgctccagagaaactggatcgaattggttcttacctggcagaaaggttgagcagggatgttgtcagacatcgttctgggtatgttttgattgctatggaggcactggaccaacttctcatggcttgccattctcaaagcattaagccatttgtagaaagctttcttcatatggtggcaaagctgctggaatcgggggaaccaaagcttcaagttcttggaacaaattcttttgtcaaatttgcaaatattgaagaagacacaccatcctatcacagacgttatgacttttttgtgtctcgattcagtgccatgtgccattcctgtcatagtgatccagaaatacgaacagagatacgaattgctggaattagaggtattcaaggtgtggttcgcaaaacagtcaacgatgaacttcgggccaccatttgggaacctcagcatatggataagattgttccatccctcctgtttaacatgcaaaagatagaagaagttgacagtcgcataggccctccttcttctccttctgcaactgacaaagaagagaatcctgctgtgctggctgaaaactgtttcagagaactgctgggtcgagcaacttttgggaatatgaataatgctgttagaccagtttttgcgcatttagatcatcacaaactgtgggatcccaatgaatttgcagttcactgctttaaaattataatgtattccattcaggctcagtattctcaccatgtgatccaggagattctaggacaccttgatgctcgtaaaaaagatgctccccgggttcgagcaggtattattcaggttctgttagaggctgttgccattgctgctaaaggttccataggtccgacagtgctggaagtcttcaatacccttttgaaacatctgcgtctcagcgttgaattcgaagcaaatgatttacaggggggatctgtaggcagtgtcaacttaaatacaagttccaaagacaatgatgagaagattgtgcagaatgctatcatccaaacaataggattttttggaagtaacctaccagattatcagaggtcagaaatcatgatgttcattatggggaaagtacctgtctttggaacatctacccatactttggatatcagtcaactaggggatttgggaaccaggagaattcagataatgttgctgagatctttgcttatggtgacctctggatataaagcgaagacgattgttactgcactgccagggtctttcctggatcctttgttatcaccatctctcatggaggactacgaactgagacagttggtcttggaagtaatgcataatctcatggatcgtcatgacaatagggcaaagcttcgagggatcagaataataccggatgtagctgacctaaagataaaaagagaaaaaatttgcagacaagacacaagtttcatgaaaaagaatgggcaacagctgtatcggcacatatatttgggttgtaaagaggaagacaacgttcagaaaaactatgaactactttatacttctcttgctcttataactattgaactggctaatgaagaagtagttattgatctcattcgactggccattgctttacaggacagtgcaattatcaatgaggataatttgccaatgttccatcgttgtggaatcatggcactggttgcagcatacctcaactttgtaagtcagatgatagctgtccctgcattttgccagcatgttagcaaggttattgaaattcgaactatggaagccccttattttctaccagagcatatcttcagagataagtgcatgcttccaaaatctttagagaagcatgaaaaagatttgtactttctgaccaacaagattgcagagtcgctaggtggaagtggatatagtgttgagagattgtcagttccgtatgtaccacaagtaacagatgaagatcgactttctagaagaaaaagcattgtggacaccgtatccattcaggtggatattttatccaacaatgttccttctgatgatgtggttagtaacactgaagaaatcacttttgaagcattgaagaaagcaattgataccagtggaatggaagaacaggaaaaggaaaagaggcgtcttgtgatagagaaatttcagaaagcaccttttgaagaaatagcagcacagtgtgaatccaaagcaaatttgcttcatgatagacttgcccaaatattggaactcaccatacgtcctcctcccagtccatcaggaacactgaccattacttctgggcatgcccaataccaatctgtcccagtctatgagatgaagtttccagatctgtgtgtgtactgatcggcgcatgaagacctcagcatatgatttgtaaagcctaaaaattaaggccaagctgagctttcagggtttacttaatgtgtattaacatacttcttgaaaataatgatggaacatatctttaaccaaatgtttggcataccatattagaagttttggagctatatataatttcgagtactttcaaagatagatttatgccatgttaatttgctttgaggttcctgttgcctttttaagttgaacatgttttggtttcactttattccactgttaagtagtatgttttaaacttttcacaaatgtaatgttttttaaaaagtaagccttcagaggattgaaactgtataaattgtttatctcttaaacatctacacagccgcttagatgtagaatttttgttgttgttttctgcaaaggcagatacatttaaatatattcctagtcctggggctgcaaaactgttcggtggctttttgtccccatgctttagataagctgggataggcaccttgctattcagttactataataatatgtgataggcattcctcatcttcttcacaataataggacatctgttgaatagcattcctcgaatataaccctaaaaacgccatactttaaattgtctggttcttgtaatattgtgtttcctgccaagagtttgaccattctgcttgagaagtgtagagcttactcttggagtaccaaactgtgcaatatttttacatcataagatgtattagtttacaggctgtgctttgaaattatagtagtattttgctgtggctccattaattaaatgagatatatatttagtgcagaaaaaagacatttaaaacagctattagttcacctgtgaagagtctgtacattttgatttctattaagagcacatttatttacatttgtatattattttaaatcctcatagtcaaaaaattctccagatggacttttaatttgtaagatttgaactgtgacttgtatacatctgtttagaatcaattatatttgaaaagctgcctgtgttttaacagtcaagtgtgctaaagtttgtcaatttaagctgcttttgatttcagctaccaagatcacaggtgcactctacacataacactgacagacccataacattacatacatcttagtgaattctatcacatggtaaaatgaacagctttctttgtaactcataaaattctcttaggacatttttataaagtcacctgtttatagttctatcttttcagattccatttctttttacataaaacagcatacatatcaaaaactgtagcctagaatacagtttaatttttggcttttgtttttgtttaaaaaattgcagtgaagaatgggatgtttgtgtttatggctatttgggcacctttagtagaaacagacaaaagtaaggaaacgataataggacaagcatacttgaaaatttctgaatacttaaacaaaagcgcaacatcttgaaaaccagtctagtcattgaaacctatgaaatgacactgaaagatcctgggctgcttcttaaataagtagatcagcaagacttgtttcagagtgacagtggagtcgttaccgctggaggactaaagggccctgtggcagctgtcactggaactttgcctcttgatcaggaaaaatgcttcaccagtccgtaaagccaagttgtattttttttattgcccttttttccttctgtatttttaaagaaggatgttaatttttgactatatattttaaaaaaatctaagcagggggacatgcaaaaacaatcatcatccacttggatgtcattttatagattaacactgtgtgcttttgtatggaaaaaatatatataatttaatagtataaaaaataaaatatatattcatttgcacttacgtgaaacacaaactttgctctacaaaatttcgtgtttcttagtgattttaaaatgcatgtattgcatgtaaagggttttgttggggtttttgttactgtttttaaattacagtaggcttctatatatcctggatttctgaactggtcttgttgacaaggattcccaagaaatggatcttttcactggctgactctcccatatctgcaagagattctgcaggaactgggtgtgcacacggtgttgtagccagttcaggtactgaatatttaggatttggtgaagttcactgtattgctatatttttgtagataaataaaactcaataaattgttaatcattctctttttgctgtatagaattgcttatatcactctttctttcatgacattggttaacatttaaatgttcctcctgtacttgtgttgtctgtgaccgcttatagagttttattgttattggtgtttacctgaatacctatgcgtacacacacacatatttccttaatacttctgaactcattatcttttagaataataatactactacactttaccagcaattaacttctccctacccaaaatgtttttcttcctgtctgaaaatggaactaatttgtcttattcgtgcttatatctgtattaaatgcaataaagttagtttttgaaatgta

SEQ ID NO: 465997 - DNA, 951 bp, Homo sapiens
aaaatttgtgtttcacgtaagccaaatgaatatatattgtatttttaaagaaggatgttaatttttgactatatattttaaaaaaatctaagcagggggacatgcaaaaacaatcatcatccacttggatgtcattttatagattaacactgtgtgcttttgtatggaaaaaatatatataatttaatagtataaaaaataaaatatatattcatttgcacttacgtgaaacacaaactttgctctacaaaatttcgtgtttcttagtgattttaaaatgcatgtattgcatgtaaaggaaaaccattacaattaatgtttatcacacctttatcttggtctttgttgatttgggttttgttggggtttttgttactgtttttaaattacagtaggcttctatatatcctggatttctgaactggtcttgttgacaaggattcccaagaaatggatcttttcactggctgactctcccatatctgcaagagattctgcaggaactgggtgtgcacacggtgttgtagccagttcaggtactgaatatttaggatttggtgaagttcactgtattgctatatttttgtagataaataaaactcaataaattgttaatcattctctttttgctgtatagaattgcttatatcactctttctttcatgacattggttaacatttaaatgttcctcctgtacttgtgttgtctgtgaccgcttatagagttttattgttattggtgtttacctgaatacctatgcgtacacacacacatatttccttaatacttctgaactcattatcttttagaataataatactactacactttaccagcaattaacttctccctacccaaaatgtttttcttcctgtctgaaaatggaactaatttgtcttattcgtgcttatatctgtattaaatgcaataaagttagtttttgaaatgta

SEQ ID NO: 465998 - DNA, 1990 bp, Homo sapiens
cccggcgaggagtgggctggcggcggtagctgtcgcccgcttggttgcgtgaccgcggggtccgcgtccgctccctccacccttcgcccttcgcccttcgcctcgttccggcctccgcggcccagcaacggccgtcatggtgccgtcggcgctccctgcgcggccccgctgagcctcggtgcggcggcgagcgcggtcgagatcgccatgcctacccgagtatgctgctgctgttccgctttgcgtcctcgctacaaacgcctggtggacaacatattccctgaagatccaaaagtaatttgatctacatctactgatccttctctttgctgacccattctgccccccgctgacctccttaaggatggccttgtgaaaactgatatggagaaattgacattttatgcagtatctgctccagagaaactggatcgaattggttcttacctggcagaaaggttgagcagggatgttgtcagacatcgttctgggtatgttttgattgctatggaggcactggaccaacttctcatggcttgccattctcaaagcattaagccatttgtagaaagctttcttcatatggtggcaaagctgctggaatcgggggaaccaaagcttcaagttcttggaacaaattcttttgtcaaatttgcaaatattgaagaagacacaccatcctatcacagacgttatgacttttttgtgtctcgattcagtgccatgtgccattcctgtcatagtgatccagaaatacgaacagagatacgaattgctggaattagaggtattcaaggtgtggttcgcaaaacagtcaacgatgaacttcgggccaccatttgggaacctcagcatatggataagattgttccatccctcctgtttaacatgcaaaagatagaagaagttgacagtcgcataggccctccttcttctccttctgcaactgacaaagaagagaatcctgctgtgctggctgaaaactgtttcagagaactgctgggtcgagcaacttttgggaatatgaataatgctgttagaccagtttttgcgcatttagatcatcacaaactgtgggatcccaatgaatttgcagttcactgctttaaaattataatgtattccattcaggctcagtattctcaccatgtgatccaggagattctaggacaccttgatgctcgtaaaaaagatgctccccgggttcgagcaggtattattcaggttctgttagaggctgttgccattgctgctaaaggttccataggtccgacagtgctggaagtcttcaatacccttttgaaacatctgcgtctcagcgttgaattcgaagcaaatgatttacaggggggatctgtaggcagtgtcaacttaaatacaagttccaaagacaatgatgagaagattgtgcagaatgctatcatccaaacaataggattttttggaagtaacctaccagattatcagaggtcagaaatcatgatgttcattatggggaaagtacctgtctttggaacatctacccatactttggatatcagtcaactaggggatttgggaaccaggagaattcagataatgttgctgagatctttgcttatggtgacctctggatataaagcgaagacgattgttactgcactgccagggtctttcctggatcctttgttatcaccatctctcatggaggactacgaactgagacagttggtcttggaagtaatgcataatctcatggatcgtcatgacaatagggcaaagcttcgagggatcagaataataccggatgtagctgacctaaagataaaaagagaaaaaatttgcagacaagacacaagtttcatgaaaaagatcagataaactatgtactacatgataattctcttgctattataaatattgaacatggttaaggacatttcggttttgtgcccatttctaacgctctttttttttgggacaaattgaacattccaatgggaaacctact

SEQ ID NO: 465999 - DNA, 1647 bp, Homo sapiens
cccggcgaggagtgggctggcggcggtagctgtcgcccgcttggttgcgtgaccgcggggtccgcgtccgctccctccacccttcgcccttcgcccttcgcctcgttccggcctccgcggcccagcaacggccgtcatggtgccgtcggcgctccctgcgcggccccgctgagcctcggtgcggcggcgagcgcggtcgagatcgccatgcctacccgagtatgctgctgctgttccgctttgcgtcctcgctacaaacgcctggtggacaacatattccctgaagatccaaaagtaatttgatctacatctactgatccttctctttgctgacccattctgccccccgctgacctccttaaggatggccttgtgaaaactgatatggagaaattgacattttatgcagtatctgctccagagaaactggatcgaattggttcttacctggcagaaaggttgagcagggatgttgtcagacatcgttctgggtatgttttgattgctatggaggcactggaccaacttctcatggcttgccattctcaaagcattaagccatttgtagaaagctttcttcatatggtggcaaagctgctggaatcgggggaaccaaagcttcaagttcttggaacaaattcttttgtcaaatttgcaaatattgaagaagacacaccatcctatcacagacgttatgacttttttgtgtctcgattcagtgccatgtgccattcctgtcatagtgatccagaaatacgaacagagatacgaattgctggaattagaggtattcaaggtgtggttcgcaaaacagtcaacgatgaacttcgggccaccatttgggaacctcagcatatggataagattgttccatccctcctgtttaacatgcaaaagatagaagaagttgacagtcgcataggccctccttcttctccttctgcaactgacaaagaagagaatcctgctgtgctggctgaaaactgtttcagagaactgctgggtcgagcaacttttgggaatatgaataatgctgttagaccagtttttgcgcatttagatcatcacaaactgtgggatcccaatgaatttgcagttcactgctttaaaattataatgtattccattcaggctcagtattctcaccatgtgatccaggagattctaggacaccttgatgctcgtaaaaaagatgctccccgggttcgagcaggtattattcaggttctgttagaggctgttgccattgctgctaaaggttccataggtccgacagtgctggaagtcttcaatacccttttgaaacatctgcgtctcagcgttgaattcgaagcaaatgatttacaggggggatctgtaggcagtgtcaacttaaatacaagttccaaagacaatgatgagaagattgtgcagaatgctatcatccaaacaataggattttttggaagtaacctaccagattatcagaggtcagaaatcatgatgttcattatggggaaagtacctgtctttggaacatctacccatactttggatatcagtcaactaggggatttgggaaccaggagaattcagataatgttgctgagatctttgcttatggtgacctctggatataaagcaaagccccaaaaggggtaccgagct

SEQ ID NO: 466000 - DNA, 410 bp, Homo sapiens
tcaagttcttggaacaaattctgtgagtaaaactattctgttactaaatgtatgcttaattagcatatctagaattaattacttcttagaatgactttacctggtaaaggcaaattccctgaatagggcatttgaacagtcaacacaaattaagataattagaatactttgcctctcagtttttctgctgtttcttgtgaaatctgtggtattaactaatcataatagaatgtctgcatgtaaatgaatgcatacttgtcatttttattttctcttggtcttttattgcaacactaactttgtgtcctacattccttttgagtttcatgccttttcattaattaaggttgtttccatttttatggctagtatgaataatgctgctatgaagatttgtgtacaggtttttg

SEQ ID NO: 466001 - DNA, 653 bp, Homo sapiens
ttccaaagacaatgatgagaagattgtgcagaatgctatcatccaaacaataggtgagtacatttcacttttcaaaactatcatgtaaaacagtgatttacaaagctctcacataaggtcctggactattatagtacatttgtcaaagatgaatgatagcttaaatttctgaaaatttaattttcgaaaacaagcaagcatgagaatggaacaaagaacactatgttgttccattaaatctgcaggacacaaattcatctattgttgacattttatggcatttacttcttcatttgcttttactctctttttcctgcatctcttcctcccttctctctctctctgtttctttctctccctatgtgtgtctctttgtgtgtgtatgtatatgtgggaatacacacatacacatgcatatttttttctaaaccacgagatacaggaagttgcatacatcatggtctattaccactaaatactttgatgtatttttccaaaaaataaatgtactttttaatataaccagagtaaaattgtcaacatcactaaatttaggattgatccagtacttgaatcagcctttcatatttcagttttatcagttgacccaataatgtactatattgacttttttccttgaatccaagattcag

SEQ ID NO: 466002 - DNA, 5301 bp, Homo sapiens
cccggcgaggagtgggctggcggcggtagctgtcgcccgcttggttgcgtgaccgcggggtccgcgtccgctccctccacccttcgcccttcgcccttcgcctcgttccggcctccgcggcccagcaacggccgtcatggtgccgtcggcgctccctgcgcggccccgctgagcctcggtgcggcggcgagcgcggtcgagatcgccatgcctacccgagtatgctgctgctgttccgctttgcgtcctcgctacaaacgcctggtggacaacatattccctgaagatccaaaagatggccttgtgaaaactgatatggagaaattgacattttatgcagtatctgctccagagaaactggatcgaattggttcttacctggcagaaaggttgagcagggatgttgtcagacatcgttctgggtatgttttgattgctatggaggcactggaccaacttctcatggcttgccattctcaaagcattaagccatttgtagaaagctttcttcatatggtggcaaagctgctggaatcgggggaaccaaagcttcaagttcttggaacaaattcttttgtcaaatttgcaaatattgaagaagacacaccatcctatcacagacgttatgacttttttgtgtctcgattcagtgccatgtgccattcctgtcatagtgatccagaaatacgaacagagatacgaattgctggaattagaggtattcaaggtgtggttcgcaaaacagtcaacgatgaacttcgggccaccatttgggaacctcagcatatggataagattgttccatccctcctgtttaacatgcaaaagatagaagaagttgacagtcgcataggccctccttcttctccttctgcaactgacaaagaagagaatcctgctgtgctggctgaaaactgtttcagagaactgctgggtcgagcaacttttgggaatatgaataatgctgttagaccagtttttgcgcatttagatcatcacaaactgtgggatcccaatgaatttgcagttcactgctttaaaattataatgtattccattcaggctcagtattctcaccatgtgatccaggagattctaggacaccttgatgctcgtaaaaaagatgctccccgggttcgagcaggtattattcaggttctgttagaggctgttgccattgctgctaaaggttccataggtccgacagtgctggaagtcttcaatacccttttgaaacatctgcgtctcagcgttgaattcgaagcaaatgatttacaggggggatctgtaggcagtgtcaacttaaatacaagttccaaagacaatgatgagaagattgtgcagaatgctatcatccaaacaataggattttttggaagtaacctaccagattatcagaggtcagaaatcatgatgttcattatggggaaagtacctgtctttggaacatctacccatactttggatatcagtcaactaggggatttgggaaccaggagaattcagataatgttgctgagatctttgcttatggtgacctctggatataaagcgaagacgattgttactgcactgccagggtctttcctggatcctttgttatcaccatctctcatggaggactacgaactgagacagttggtcttggaagtaatgcataatctcatggatcgtcatgacaatagggcaaagcttcgagggatcagaataataccggatgtagctgacctaaagataaaaagagaaaaaatttgcagacaagacacaagtttcatgaaaaagaatgggcaacagctgtatcggcacatatatttgggttgtaaagaggaagacaacgttcagaaaaactatgaactactttatacttctcttgctcttataactattgaactggctaatgaagaagtagttattgatctcattcgactggccattgctttacaggacagtgcaattatcaatgaggataatttgccaatgttccatcgttgtggaatcatggcactggttgcagcatacctcaactttgtaagtcagatgatagctgtccctgcattttgccagcatgttagcaaggttattgaaattcgaactatggaagccccttattttctaccagagcatatcttcagagataagtgcatgcttccaaaatctttagagaagcatgaaaaagatttgtactttctgaccaacaagattgcagagtcgctaggtggaagtggatatagtgttgagagattgtcagttccgtatgtaccacaagtaacagatgaagatcgactttctagaagaaaaagcattgtggacaccgtatccattcaggtggatattttatccaacaatgttccttctgatgatgtggttagtaacactgaagaaatcacttttgaagcattgaagaaagcaattgataccagtggaatggaagaacaggaaaaggaaaagaggcgtcttgtgatagagaaatttcagaaagcaccttttgaagaaatagcagcacagtgtgaatccaaagcaaatttgcttcatgatagacttgcccaaatattggaactcaccatacgtcctcctcccagtccatcaggaacactgaccattacttctgggcatgcccaataccaatctgtcccagtctatgagatgaagtttccagatctgtgtgtgtactgatcggcgcatgaagacctcagcatatgatttgtaaagcctaaaaattaaggccaagctgagctttcagggtttacttaatgtgtattaacatacttcttgaaaataatgatggaacatatctttaaccaaatgtttggcataccatattagaagttttggagctatatataatttcgagtactttcaaagatagatttatgccatgttaatttgctttgaggttcctgttgcctttttaagttgaacatgttttggtttcactttattccactgttaagtagtatgttttaaacttttcacaaatgtaatgttttttaaaaagtaagccttcagaggattgaaactgtataaattgtttatctcttaaacatctacacagccgcttagatgtagaatttttgttgttgttttctgcaaaggcagatacatttaaatatattcctagtcctggggctgcaaaactgttcggtggctttttgtccccatgctttagataagctgggataggcaccttgctattcagttactataataatatgtgataggcattcctcatcttcttcacaataataggacatctgttgaatagcattcctcgaatataaccctaaaaacgccatactttaaattgtctggttcttgtaatattgtgtttcctgccaagagtttgaccattctgcttgagaagtgtagagcttactcttggagtaccaaactgtgcaatatttttacatcataagatgtattagtttacaggctgtgctttgaaattatagtagtattttgctgtggctccattaattaaatgagatatatatttagtgcagaaaaaagacatttaaaacagctattagttcacctgtgaagagtctgtacattttgatttctattaagagcacatttatttacatttgtatattattttaaatcctcatagtcaaaaaattctccagatggacttttaatttgtaagatttgaactgtgacttgtatacatctgtttagaatcaattatatttgaaaagctgcctgtgttttaacagtcaagtgtgctaaagtttgtcaatttaagctgcttttgatttcagctaccaagatcacaggtgcactctacacataacactgacagacccataacattacatacatcttagtgaattctatcacatggtaaaatgaacagctttctttgtaactcataaaattctcttaggacatttttataaagtcacctgtttatagttctatcttttcagattccatttctttttacataaaacagcatacatatcaaaaactgtagcctagaatacagtttaatttttggcttttgtttttgtttaaaaaattgcagtgaagaatgggatgtttgtgtttatggctatttgggcacctttagtagaaacagacaaaagtaaggaaacgataataggacaagcatacttgaaaatttctgaatacttaaacaaaagcgcaacatcttgaaaaccagtctagtcattgaaacctatgaaatgacactgaaagatcctgggctgcttcttaaataagtagatcagcaagacttgtttcagagtgacagtggagtcgttaccgctggaggactaaagggccctgtggcagctgtcactggaactttgcctcttgatcaggaaaaatgcttcaccagtccgtaaagccaagttgtattttttttattgcccttttttccttctgtatttttaaagaaggatgttaatttttgactatatattttaaaaaaatctaagcagggggacatgcaaaaacaatcatcatccacttggatgtcattttatagattaacactgtgtgcttttgtatggaaaaaatatatataatttaatagtataaaaaataaaatatatattcatttgcacttacgtgaaacacaaactttgctctacaaaatttcgtgtttcttagtgattttaaaatgcatgtattgcatgtaaaggaaaaccattacaattaatgtttatcacacctttatcttggtctttgttgatttgggttttgttggggtttttgttactgtttttaaattacagtaggcttctatatatcctggatttctgaactggtcttgttgacaaggattcccaagaaatggatcttttcactggctgactctcccatatctgcaagagattctgcaggaactgggtgtgcacacggtgttgtagccagttcaggtactgaatatttaggatttggtgaagttcactgtattgctatatttttgtagataaataaaactcaataaattgttaatcattctctttttgctgtatagaattgcttatatcactctttctttcatgacattggttaacatttaaatgttcctcctgtacttgtgttgtctgtgaccgcttatagagttttattgttattggtgtttacctgaatacctatgcgtacacacacacatatttccttaatacttctgaactcattatcttttagaataataatactactacactttaccagcaattaacttctccctacccaaaatgtttttcttcctgtctgaaaatggaactaatttgtcttattcgtgcttatatctgtattaaatgcaataaagttagtttttgaaatgta

SEQ ID NO: 466003 - DNA, 724 bp, Homo sapiens
agtaccatactatagaaggaagagcaggggctttgcatggagacctacctggattttaatccccagtttgctacttactggttgagtgacttttgggaatatgaataatgctgttagaccagtttttgcgcatttagatcatcacaaactgtgggatcccaatgaatttgcagttcactgctttaaaattataatgtattccattcaggctcagtattctcaccatgtgatccaggagattctaggacaccttgatgctcgtaaaaaagatgctccccgggttcgagcaggtattattcaggttctgttagaggctgttgccattgctgctaaaggttccataggtccgacagtgctggaagtcttcaatacccttttgaaacatctgcgtctcagcgttgaattcgaagcaaatgatttacaggggggatctgtaggcagtgtcaacttaaatacaagttccaaagacaatgatgagaagattgtgcagaatgctatcatccaaacaataggattttttggaagtaacctaccagattatcagaggtcagaaatcatgatgttcattatggggaaagtacctgtctttggaacatctacccatactttggatatcagtcaactaggggatttgggaaccaggagaattcagataatgttgctgagatctttgcttatggtgacctctggatataaagcaaagccccaaaaggggtaccgagct

SEQ ID NO: 466004 - DNA, 5317 bp, Homo sapiens
cccggcgaggagtgggctggcggcggtagctgtcgcccgcttggttgcgtgaccgcggggtccgcgtccgctccctccacccttcgcccttcgcccttcgcctcgttccggcctccgcggcccagcaacggccgtcatggtgccgtcggcgctccctgcgcggccccgctgagcctcggtgcggcggcgagcgcggtcgagatcgccatgcctacccgagtatgctgctgctgttccgctttgcgtcctcgctacaaacgcctggtggacaacatattccctgaagatccaaaagtaatttgatctacatctactgatccttctctttgctgacccattctgccccccgctgacctccttaaggatggccttgtgaaaactgatatggagaaattgacattttatgcagtatctgctccagagaaactggatcgaattggttcttacctggcagaaaggttgagcagggatgttgtcagacatcgttctgggtatgttttgattgctatggaggcactggaccaacttctcatggcttgccattctcaaagcattaagccatttgtagaaagctttcttcatatggtggcaaagctgctggaatcgggggaaccaaagcttcaagttcttggaacaaattcttttgtcaaatttgcaaatattgaagaagacacaccatcctatcacagacgttatgacttttttgtgtctcgattcagtgccatgtgccattcctgtcatagtgatccagaaatacgaacagagatacgaattgctggaattagaggtattcaaggtgtggttcgcaaaacagtcaacgatgaacttcgggccaccatttgggaacctcagcatatggataagattgttccatccctcctgtttaacatgcaaaagatagaagaagttgacagtcgcataggccctccttcttctccttctgcaactgacaaagaagagaatcctgctgtgctggctgaaaactgtttcagagaactgctgggtcgagcaacttttgggaatatgaataatgctgttagaccagtttttgcgcatttagatcatcacaaactgtgggatcccaatgaatttgcagttcactgctttaaaattataatgtattccattcaggctcagtattctcaccatgtgatccaggagattctaggacaccttgatgctcgtaaaaaagatgctccccgggttcgagcaggtattattcaggttctgttagaggctgttgccattgctgctaaaggttccataggtccgacagtgctggaagtcttcaatacccttttgaaacatctgcgtctcagcgttgaattcgaagcaaatgatttacaggggggatctgtaggcagtgtcaacttaaatacaagttccaaagacaatgatgagaagattgtgcagaatgctatcatccaaacaataggattttttggaagtaacctaccagattatcagaggtcagaaatcatgatgttcattatggggaaagtacctgtctttggaacatctacccatactttggatatcagtcaactaggggatttgggaaccaggagaattcagataatgttgctgagatctttgcttatggtgacctctggatataaagcgaagacgattgttactgcactgccagggtctttcctggatcctttgttatcaccatctctcatggaggactacgaactgagacagttggtcttggaagtaatgcataatctcatggatcgtcatgacaatagggcaaagcttcgagggatcagaataataccggatgtagctgacctaaagataaaaagagaaaaaatttgcagacaagacacaagtttcatgaaaaagaatgggcaacagctgtatcggcacatatatttgggttgtaaagaggaagacaacgttcagaaaaactatgaactactttatacttctcttgctcttataactattgaactggctaatgaagaagtagttattgatctcattcgactggccattgctttacaggacagtgcaattatcaatgaggataatttgccaatgttccatcgttgtggaatcatggcactggttgcagcatacctcaactttgtaagtcagatgatagctgtccctgcattttgccagcatgttagcaaggttattgaaattcgaactatggaagccccttattttctaccagagcatatcttcagagataagtgcatgcttccaaaatctttagagaagcatgaaaaagatttgtactttctgaccaacaagattgcagagtcgctaggtggaagtggatatagtgttgagagattgtcagttccgtatgtaccacaagtaacagatgaagatcgactttctagaagaaaaagcattgtggacaccgtatccattcaggtggatattttatccaacaatgttccttctgatgatgtggttagtaacactgaagaaatcacttttgaagcattgaagaaagcaattgataccagtggaatggaagaacaggaaaaggaaaagaggcgtcttgtgatagagaaatttcagaaagcaccttttgaagaaatagcagcacagtgtgaatccaaagcaaatttgcttcatgatagacttgcccaaatattggaactcaccatacgtcctcctcccagtccatcaggaacactgaccattacttctgggcatgcccaataccaatctgtcccagtctatgagatgaagtttccagatctgtgtgtgtactgatcggcgcatgaagacctcagcatatgatttgtaaagcctaaaaattaaggccaagctgagctttcagggtttacttaatgtgtattaacatacttcttgaaaataatgatggaacatatctttaaccaaatgtttggcataccatattagaagttttggagctatatataatttcgagtactttcaaagatagatttatgccatgttaatttgctttgaggttcctgttgcctttttaagttgaacatgttttggtttcactttattccactgttaagtagtatgttttaaacttttcacaaatgtaatgttttttatctacacagccgcttagatgtagaatttttgttgttgttttctgcaaaggcagatacatttaaatatattcctagtcctggggctgcaaaactgttcggtggctttttgtccccatgctttagataagctgggataggcaccttgctattcagttactataataatatgtgataggcattcctcatcttcttcacaataataggacatctgttgaatagcattcctcgaatataaccctaaaaacgccatactttaaattgtctggttcttgtaatattgtgtttcctgccaagagtttgaccattctgcttgagaagtgtagagcttactcttggagtaccaaactgtgcaatatttttacatcataagatgtattagtttacaggctgtgctttgaaattatagtagtattttgctgtggctccattaattaaatgagatatatatttagtgcagaaaaaagacatttaaaacagctattagttcacctgtgaagagtctgtacattttgatttctattaagagcacatttatttacatttgtatattattttaaatcctcatagtcaaaaaattctccagatggacttttaatttgtaagatttgaactgtgacttgtatacatctgtttagaatcaattatatttgaaaagctgcctgtgttttaacagtcaagtgtgctaaagtttgtcaatttaagctgcttttgatttcagctaccaagatcacaggtgcactctacacataacactgacagacccataacattacatacatcttagtgaattctatcacatggtaaaatgaacagctttctttgtaactcataaaattctcttaggacatttttataaagtcacctgtttatagttctatcttttcagattccatttctttttacataaaacagcatacatatcaaaaactgtagcctagaatacagtttaatttttggcttttgtttttgtttaaaaaattgcagtgaagaatgggatgtttgtgtttatggctatttgggcacctttagtagaaacagacaaaagtaaggaaacgataataggacaagcatacttgaaaatttctgaatacttaaacaaaagcgcaacatcttgaaaaccagtctagtcattgaaacctatgaaatgacactgaaagatcctgggctgcttcttaaataagtagatcagcaagacttgtttcagagtgacagtggagtcgttaccgctggaggactaaagggccctgtggcagctgtcactggaactttgcctcttgatcaggaaaaatgcttcaccagtccgtaaagccaagttgtattttttttattgcccttttttccttctgtatttttaaagaaggatgttaatttttgactatatattttaaaaaaatctaagcagggggacatgcaaaaacaatcatcatccacttggatgtcattttatagattaacactgtgtgcttttgtatggaaaaaatatatataatttaatagtataaaaaataaaatatatattcatttgcacttacgtgaaacacaaactttgctctacaaaatttcgtgtttcttagtgattttaaaatgcatgtattgcatgtaaaggaaaaccattacaattaatgtttatcacacctttatcttggtctttgttgatttgggttttgttggggtttttgttactgtttttaaattacagtaggcttctatatatcctggatttctgaactggtcttgttgacaaggattcccaagaaatggatcttttcactggctgactctcccatatctgcaagagattctgcaggaactgggtgtgcacacggtgttgtagccagttcaggtactgaatatttaggatttggtgaagttcactgtattgctatatttttgtagataaataaaactcaataaattgttaatcattctctttttgctgtatagaattgcttatatcactctttctttcatgacattggttaacatttaaatgttcctcctgtacttgtgttgtctgtgaccgcttatagagttttattgttattggtgtttacctgaatacctatgcgtacacacacacatatttccttaatacttctgaactcattatcttttagaataataatactactacactttaccagcaattaacttctccctacccaaaatgtttttcttcctgtctgaaaatggaactaatttgtcttattcgtgcttatatctgtattaaatgcaataaagttagtttttgaaatgta

SEQ ID NO: 466005 - DNA, 5106 bp, Homo sapiens
  misc_feature (5106)..(5106): n is a, c, g, or t
cccggcgaggagtgggctggcggcggtagctgtcgcccgcttggttgcgtgaccgcggggtccgcgtccgctccctccacccttcgcccttcgcccttcgcctcgttccggcctccgcggcccagcaacggccgtcatggtgccgtcggcgctccctgcgcggccccgctgagcctcggtgcggcggcgagcgcggtcgagatcgccatgcctacccgagtatgctgctgctgttccgctttgcgtcctcgctacaaacgcctggtggacaacatattccctgaagatccaaaagtaatttgatctacatctactgatccttctctttgctgacccattctgccccccgctgacctccttaaggatggccttgtgaaaactgatatggagaaattgacattttatgcagtatctgctccagagaaactggatcgaattggttcttacctggcagaaaggttgagcagggatgttgtcagacatcgttctgggtatgttttgattgctatggaggcactggaccaacttctcatggcttgccattctcaaagcattaagccatttgtagaaagctttcttcatatggtggcaaagctgctggaatcgggggaaccaaagcttcaagttcttggaacaaattcttttgtcaaatttgcaaatattgaagaagacacaccatcctatcacagacgttatgacttttttgtgtctcgattcagtgccatgtgccattcctgtcatagtgatccagaaatacgaacagagatacgaattgctggaattagaggtattcaaggtgtggttcgcaaaacagtcaacgatgaacttcgggccaccatttgggaacctcagcatatggataagattgttccatccctcctgtttaacatgcaaaagatagaagaagttgacagtcgcataggccctccttcttctccttctgcaactgacaaagaagagaatcctgctgtgctggctgaaaactgtttcagagaactgctgggtcgagcaacttttgggaatatgaataatgctgttagaccagtttttgcgcatttagatcatcacaaactgtgggatcccaatgaatttgcagttcactgctttaaaattataatgtattccattcaggctcagtattctcaccatgtgatccaggagattctaggacaccttgatgctcgtaaaaaagatgctccccgggttcgagcaggtattattcaggttctgttagaggctgttgccattgctgctaaaggttccataggtccgacagtgctggaagtcttcaatacccttttgaaacatctgcgtctcagcgttgaattcgaagcaaatgatttacaggggggatctgtaggcagtgtcaacttaaatacaagttccaaagacaatgatgagaagattgtgcagaatgctatcatccaaacaataggattttttggaagtaacctaccagattatcagaggtcagaaatcatgatgttcattatggggaaagtacctgtctttggaacatctacccatactttggatatcagtcaactaggggatttgggaaccaggagaattcagataatgttgctgagatctttgcttatggtgacctctggatataaagcgaagacgattgttactgcactgccagggtctttcctggatcctttgttatcaccatctctcatggaggactacgaactgagacagttggtcttggaagtaatgcataatctcatggatcgtcatgacaatagggcaaagcttcgagggatcagaataataccggatgtagctgacctaaagataaaaagagaaaaaatttgcagacaagacacaagtttcatgaaaaagaatgggcaacagctgtatcggcacatatatttgggttgtaaagaggaagacaacgttcagaaaaactatgaactactttatacttctcttgctcttataactattgaactggctaatgaagaagtagttattgatctcattcgactggccattgctttacaggacagtgcaattatcaatgaggataatttgccaatgttccatcgttgtggaatcatggcactggttgcagcatacctcaactttgtaagtcagatgatagctgtccctgcattttgccagcatgttagcaaggttattgaaattcgaactatggaagccccttattttctaccagagcatatcttcagagataagtgcatgcttccaaaatctttagagaagcatgaaaaagatttgtactttctgaccaacaagattgcagagtcgctaggtggaagtggatatagtgttgagagattgtcagttccgtatgtaccacaagtaacagatgaagatcgactttctagaagaaaaagcattgtggacaccgtatccattcaggtggatattttatccaacaatgttccttctgatgatgtggttagtaacactgaagaaatcacttttgaagcattgaagaaagcaattgataccagtggaatggaagaacaggaaaaggaaaagaggcgtcttgtgatagagaaatttcagaaagcaccttttgaagaaatagcagcacagtgtgaatccaaagcaaatttgcttcatgatagacttgcccaaatattggaactcaccatacgtcctcctcccagtccatcaggaacactgaccattacttctgggcatgcccaataccaatctgtcccagtctatgagatgaagtttccagatctgtgtgtgtactgatcggcgcatgaagacctcagcatatgatttgtaaagcctaaaaattaaggccaagctgagctttcagggtttacttaatgtgtattaacatacttcttgaaaataatgatggaacatatctttaaccaaatgtttggcataccatattagaagttttggagctatatataatttcgagtactttcaaagatagatttatgccatgttaatttgctttgaggttcctgttgcctttttaagttgaacatgttttggtttcactttattccactgttaagtagtatgttttaaacttttcacaaatgtaatgttttttaaaaagtaagccttcagaggattgaaactgtataaattgtttatctcttaaacatctacacagccgcttagatgtagaatttttgttgttgttttctgcaaaggcagatacatttaaatatattcctagtcctggggctgcaaaactgttcggtggctttttgtccccatgctttagataagctgggataggcaccttgctattcagttactataataatatgtgataggcattcctcatcttcttcacaataataggacatctgttgaatagcattcctcgaatataaccctaaaaacgccatactttaaattgtctggttcttgtaatattgtgtttcctgccaagagtttgaccattctgcttgagaagtgtagagcttactcttggagtaccaaactgtgcaatatttttacatcataagatgtattagtttacaggctgtgctttgaaattatagtagtattttgctgtggctccattaattaaatgagatatatatttagtgcagaaaaaagacatttaaaacagctattagttcacctgtgaagagtctgtacattttgatttctattaagagcacatttatttacatttgtatattattttaaatcctcatagtcaaaaaattctccagatggacttttaatttgtaagatttgaactgtgacttgtatacatctgtttagaatcaattatatttgaaaagctgcctgtgttttaacagtcaagtgtgctaaagtttgtcaatttaagctgcttttgatttcagctaccaagatcacaggtgcactctacacataacactgacagacccataacattacatacatcttagtgaattctatcacatggtaaaatgaacagctttctttgtaactcataaaattctcttaggacatttttataaagtcacctgtttatagttctatcttttcagattccatttctttttacataaaacagcatacatatcaaaaactgtagcctagaatacagtttaatttttggcttttgtttttgtttaaaaaattgcagtgaagaatgggatgtttgtgtttatggctatttgggcacctttagtagaaacagacaaaagtaaggaaacgataataggacaagcatacttgaaaatttctgaatacttaaacaaaagcgcaacatcttgaaaaccagtctagtcattgaaacctatgaaatgacactgaaagatcctgggctgcttcttaaataagtagatcagcaagacttgtttcagagtgacagtggagtcgttaccgctggaggactaaagggccctgtggcagctgtcactggaactttgcctcttgatcaggaaaaatgcttcaccagtccgtaaagccaagttgtattttttttattgcccttttttccttctgtatttttaaagaaggatgttaatttttgactatatattttaaaaaaatctaagcagggggacatgcaaaaacaatcatcatccacttggatgtcattttatagattaacactgtgtgcttttgtatggaaaaaatatatataatttaatagtataaaaaataaaatatatattcatttgcacttacgtgaaacacaaactttgctctacaaaatttcgtgtttcttagtgattttaaaatgcatgtattgcatgtaaaggaaaaccattacaattaatgtttatcacacctttatcttggtctttgttgatttgggttttgttggggtttttgttactgtttttaaattacagtaggcttctatatatcctggatttctgaactggtcttgttgacaaggattcccaagaaatggatcttttcactggctgactctcccatatctgcaagagattctgcaggaactgggtgtgcacacggtgttgtagccagttcaggtactgaatatttaggatttggtgaagttcactgtattgctatatttttgtagataaataaaactcaataaattgttaatcattctctttttgctgtatagattcgccacagggttttcacacatcgagagcatgtggataaaacggtacn

SEQ ID NO: 466006 - DNA, 5375 bp, Homo sapiens
cccggcgaggagtgggctggcggcggtagctgtcgcccgcttggttgcgtgaccgcggggtccgcgtccgctccctccacccttcgcccttcgcccttcgcctcgttccggcctccgcggcccagcaacggccgtcatggtgccgtcggcgctccctgcgcggccccgctgagcctcggtgcggcggcgagcgcggtcgagatcgccatgcctacccgagtatgctgctgctgttccgctttgcgtcctcgctacaaacgcctggtggacaacatattccctgaagatccaaaagtaatttgatctacatctactgatccttctctttgctgacccattctgccccccgctgacctccttaaggatggccttgtgaaaactgatatggagaaattgacattttatgcagtatctgctccagagaaactggatcgaattggttcttacctggcagaaaggttgagcagggatgttgtcagacatcgttctgggtatgttttgattgctatggaggcactggaccaacttctcatggcttgccattctcaaagcattaagccatttgtagaaagctttcttcatatggtggcaaagctgctggaatcgggggaaccaaagcttcaagttcttggaacaaattcttttgtcaaatttgcaaatattgaagaagacacaccatcctatcacagacgttatgacttttttgtgtctcgattcagtgccatgtgccattcctgtcatagtgatccagaaatacgaacagagatacgaattgctggaattagaggtattcaaggtgtggttcgcaaaacagtcaacgatgaacttcgggccaccatttgggaacctcagcatatggataagattgttccatccctcctgtttaacatgcaaaagatagaagaagttgacagtcgcataggccctccttcttctccttctgcaactgacaaagaagagaatcctgctgtgctggctgaaaactgtttcagagaactgctgggtcgagcaacttttgggaatatgaataatgctgttagaccagtttttgcgcatttagatcatcacaaactgtgggatcccaatgaatttgcagttcactgctttaaaattataatgtattccattcaggctcagtattctcaccatgtgatccaggagattctaggacaccttgatgctcgtaaaaaagatgctccccgggttcgagcaggtattattcaggttctgttagaggctgttgccattgctgctaaaggttccataggtccgacagtgctggaagtcttcaatacccttttgaaacatctgcgtctcagcgttgaattcgaagcaaatgatttacaggggggatctgtaggcagtgtcaacttaaatacaagttccaaagacaatgatgagaagattgtgcagaatgctatcatccaaacaataggattttttggaagtaacctaccagattatcagaggtcagaaatcatgatgttcattatggggaaagtacctgtctttggaacatctacccatactttggatatcagtcaactaggggatttgggaaccaggagaattcagataatgttgctgagatctttgcttatggtgacctctggatataaagcgaagacgattgttactgcactgccagggtctttcctggatcctttgttatcaccatctctcatggaggactacgaactgagacagttggtcttggaagtaatgcataatctcatggatcgtcatgacaatagggcaaagcttcgagggatcagaataataccggatgtagctgacctaaagataaaaagagaaaaaatttgcagacaagacacaagtttcatgaaaaagaatgggcaacagctgtatcggcacatatatttgggttgtaaagaggaagacaacgttcagaaaaactatgaactactttatacttctcttgctcttataactattgaactggctaatgaagaagtagttattgatctcattcgactggccattgctttacaggacagtgcaattatcaatgaggataatttgccaatgttccatcgttgtggaatcatggcactggttgcagcatacctcaactttgtaagtcagatgatagctgtccctgcattttgccagcatgttagcaaggttattgaaattcgaactatggaagccccttattttctaccagagcatatcttcagagataagtgcatgcttccaaaatctttagagaagcatgaaaaagatttgtactttctgaccaacaagattgcagagtcgctaggtggaagtggatatagtgttgagagattgtcagttccgtatgtaccacaagtaacagatgaagatcgactttctagaagaaaaagcattgtggacaccgtatccattcaggtggatattttatccaacaatgttccttctgatgatgtggttagtaacactgaagaaatcacttttgaagcattgaagaaagcaattgataccagtggaatggaagaacaggaaaaggaaaagaggcgtcttgtgatagagaaatttcagaaagcaccttttgaagaaatagcagcacagtgtgaatccaaagcaaatttgcttcatgatagacttgcccaaatattggaactcaccatacgtcctcctcccagtccatcaggaacactgaccattacttctgggcatgcccaataccaatctgtcccagtctatgagatgaagtttccagatctgtgtgtgtactgatcggcgcatgaagacctcagcatatgatttgtaaagcctaaaaattaaggccaagctgagctttcagggtttacttaatgtgtattaacatacttcttgaaaataatgatggaacatatctttaaccaaatgtttggcataccatattagaagttttggagctatatataatttcgagtactttcaaagatagatttatgccatgttaatttgctttgaggttcctgttgcctttttaagttgaacatgttttggtttcactttattccactgttaagtagtatgttttaaacttttcacaaatgtaatgttttttaaaaagtaagccttcagaggattgaaactgtataaattgtttatctcttaaacatctacacagccgcttagatgtagaatttttgttgttgttttctgcaaaggcagatacatttaaatatattcctagtcctggggctgcaaaactgttcggtggctttttgtccccatgctttagataagctgggataggcaccttgctattcagttactataataatatgtgataggcattcctcatcttcttcacaataataggacatctgttgaatagcattcctcgaatataaccctaaaaacgccatactttaaattgtctggttcttgtaatattgtgtttcctgccaagagtttgaccattctgcttgagaagtgtagagcttactcttggagtaccaaactgtgcaatatttttacatcataagatgtattagtttacaggctgtgctttgaaattatagtagtattttgctgtggctccattaattaaatgagatatatatttagtgcagaaaaaagacatttaaaacagctattagttcacctgtgaagagtctgtacattttgatttctattaagagcacatttatttacatttgtatattattttaaatcctcatagtcaaaaaattctccagatggacttttaatttgtaagatttgaactgtgacttgtatacatctgtttagaatcaattatatttgaaaagctgcctgtgttttaacagtcaagtgtgctaaagtttgtcaatttaagctgcttttgatttcagctaccaagatcacaggtgcactctacacataacactgacagacccataacattacatacatcttagtgaattctatcacatggtaaaatgaacagctttctttgtaactcataaaattctcttaggacatttttataaagtcacctgtttatagttctatcttttcagattccatttctttttacataaaacagcatacatatcaaaaactgtagcctagaatacagtttaatttttggcttttgtttttgtttaaaaaattgcagtgaagaatgggatgtttgtgtttatggctatttgggcacctttagtagaaacagacaaaagtaaggaaacgataataggacaagcatacttgaaaatttctgaatacttaaacaaaagcgcaacatcttgaaaaccagtctagtcattgaaacctatgaaatgacactgaaagatcctgggctgcttcttaaataagtagatcagcaagacttgtttcagagtgacagtggagtcgttaccgctggaggactaaagggccctgtggcagctgtcactggaactttgcctcttgatcaggaaaaatgcttcaccagtccgtaaagccaagttgtattttttttattgcccttttttccttctgtatttttaaagaaggatgttaatttttgactatatattttaaaaaaatctaagcagggggacatgcaaaaacaatcatcatccacttggatgtcattttatagattaacactgtgtgcttttgtatggaaaaaatatatataatttaatagtataaaaaataaaatatatattcatttgcacttacgtgaaacacaaactttgctctacaaaatttcgtgtttcttagtgattttaaaatgcatgtattgcatgtaaaggaaaaccattacaattaatgtttatcacacctttatcttggtctttgttgatttgggttttgttggggtttttgttactgtttttaaattacagtaggcttctatatatcctggatttctgaactggtcttgttgacaaggattcccaagaaatggatcttttcactggctgactctcccatatctgcaagagattctgcaggaactgggtgtgcacacggtgttgtagccagttcaggtactgaatatttaggatttggtgaagttcactgtattgctatatttttgtagataaataaaactcaataaattgaaaaaaaaaaaaaaaaaaaaaaaaaaaatttttggggggccttgggcccttgagaaaagcgtttctctataagaccattccggttggggcgcgcgcggggcgcccagttggcttatgtgtgacactggggccataagcggtggtcccaagggaaatccgcgggtcacatgagcacatatgtggcttgcgggtatctctcaccccattaaaaaaaacggcccgcggggggaacaccgaatgtgttctggaaccaattcccagatagagagttcccggaaggcaccacatcggggtttctatacaccgggggaggtcccaagagaaactctgatattataattatgc

SEQ ID NO: 466007 - DNA, 2814 bp, Homo sapiens
agatcatgtggttcacagagcgaagatgaaggccttggctttagagaatggtttctgtggcaccagaggcattccagtagggtatccagaagtcccctggtgccagcaaaggcttttgctgggggagaaaagagaactgctccgagttgctgggtcctggaagagcactgagaagccacagccacagctgtacgctgcttctgattgtttttcagccgcaagcgaagccaaaggtagaagaaagggaaatgcaatctccagtgaatggcaatattttgttttctctaatcctattcaggtggtgactgtagcaaaaaggaaaaacaggccaacatgcaggatggataaaaaccctgattattaccccaatgaatgccagttggctgaattgaattcaagcccagacttctgagtcttaagtgttgtccacgtccctaatcttcttttgcctttatatttgtgcagactcttgctaacctatctcatggcctctagactttcttttaccacactatggaaacaatgatctttcaaaaaaccaaaatctgatcatgatcatgccattcctatactgaaaacatacaatgttcttcaaaataaaacttaaatagccttcaaaataaaaaaatagccttcaaaataaaacttaaactccttagcacagcatgaaaggcccctgtctgtttcaccagtgtctgcctaatgcctgctatgtagtaagaagcttcataaaggtttgtagaattgagttggccttcaactacctttttcctttttcttaatcacaatttatgacttatctttgcgccacactatgctaggcatggcgttggcattagtaaaggctttctgattcacgggtgagaatattaaactattgttttcccacaaatcatatcccacaaggctattttgatgaacttaaacctctcaaagactggtgtagtggggatggaactaacatgttttagtcttttgtgggatgcagggctgtttttggaagggacaccacacactgatatccttgccagccattaagatggctttgatgttatctgtaggtagttatggaaagctgagttttatttctcagtcagacatttctgtttttgaagctccacttcttaggcatatacctgtgggtctccaaaggaccatgcactcacaactactgtttgctaaaagggcccttggcagcccgtgttctgtccttaagaagccctctgacaagctgtttgagttgcctgagttgcaggccttgccacatgactgatatttaagaatacaactcagcactttaaattatttacaccaactcccaacaaataaccaaccagggagaggtaaatatagggccctaggcattcccattccttcactgccactttaaacagagtttctcctatcttggtgatggattttgaccctggttataacacagcacctcccagagacatttcaaagccttaaaaccaagagaaaacagggattaagagtcaacaaatctgtcctcattttttcctcattttatttatcagagtggcctagctcccctctccaaatccaaagaacaagtgttcttcgaagaatggttatgcattctctgccttgtttcattccacctgagtatgaaagtggtggtggtgatgaacggagggtgaattacgtgcatgtttgtgtatcaagagcattcacaatatataggagggaaggccagaaagctgggctttcacatttaatctcttgtgtcagtgctctatgcccaatcaaaatatcccaattttagacaacttttgacatgtgaggcagtctgctgcaggccctagaggctgcagagatgtgcaagacatagttagaccctccagggacactatgagacatcagcaatttaaaagaagaaaaacttttttcaaaataaaaaatttttattacaaaattttttattgtaaaattaatttgctgtcataaaaattgatataaagtagaaatgtatagcaaagggagtaaaatttctgcatccccacctctaatctcatggacaggcactattaagaattttgctgtagcctttcagaatttttatgtgtatagaaacgtgcattcttatggaattgatgcatattacgctgacggttctctaagctgtatcattacatagagctatatcttatcctcgctttaccttcactggctgcataatattccatcgtgtgtgtgacataatgtcttgtcttggatggacacttcagttctcttttactcctttagaaattgtgttgcagtgaacatccttgttcctttattcttttgcacttgttaaaccagcttctgcttggggaaatcaaggaagatttcagagaaagggtgggatgtttgtagagctggggggcaggaaacagcatgagcaagagtagaaagaagagggtctattcacagctctggatttcattccagcattgcttcttccacatagcttcccctgaccctccctccaagttaggctagaggcaatgtcttgggacgccatagaactctatacttcctctcttaagatgaaaccagaatccatgcctcctagctgattgctaacagatacactaaacatctttgagttttcatgggccccactccctcccacctcctggtctttgcataaactgggtttatttggggggcttggaaatttttcccccattaatccatttctgtagttaactcttactcctcctcaaggttcccattccatcactgcctcttccagatagctttccctcacccttcctccaagttgggttagaggcaatgtctcaggac

SEQ ID NO: 466008 - DNA, 1285 bp, Homo sapiens
ttccaaatgtctcaactgcagcggccaggcgttcctccagaacctcctcccacaggaacttgctacacgtgctggaaatctggcaactggaccaaggaatgcccgcagcccgggattcctaagccgcatcccatctgtgtgggaccccacggaaaatcggactgttcaactcacctggcagccactcccagagcccctggaactctggcccaaggctctctgactccttcccagatcttctcggcctagcggttgaagactgacactgcccgatcacctcggaagccccctagaccatcacggacgccgagcttcagatacgcgcatgaaaggaagattaagaaaaacaaaaaaatgtaaatttactggacactgaatatatactaagtactgcttaagtgatttacatgtcaagattaaaatattttgctttactttaattatcatcatattcttcatccatctttcatttcatcttcatcatgccatttctttctccttcccctgggcctgaaattttatcaagaagacacacttgctgtgtgacttgattaatttacttaagcatgcccactctccttgggcaatgctgagaggtgacagcgtgctggcagtcctcacagccctcactcgctcttggcgcctcctctgcctgggcttccactatgggggcacttgaggagcccttcagcccactgctgtactggaggtgtggagggagaggcgccagcgggaaccggtgctgcgcgcggcgcttgcgggccagctggagttccgggtgggcgtgggcttggcgggccccgcactgggagcagccgaccggccctgccggcccgggaaatgaggggcttagcacctgggccagcggctgcggagggtgtactgggtcccccagcagtgccagcccaccggcgctgcgctcgatttctcacagggccttagctgccttcccgcggggcagggctcgggacctgcagcccgccatgcctgagcctcccacccactccatgggctcctgtgcggcccgagcctccctgatgagcgccaccccctgctccacggcgcccagtcccatcgaccacccaagagctgaggagtgcgggcgcccggcgccggactgcagcctgccatattgctgaaggtttgtgagacacagcctagaagtttgttatcaatcctcattggttgaggctcctcctgctgtagttgaagactgtctactgctaaaaggagagaatatactagaaagaaataaaattacttgatgtatttaattttttctgtt

SEQ ID NO: 466009 - DNA, 1039 bp, Homo sapiens
gctgtggcctgctatgacccgtgcctctctcccccacaggccggctggatcctgcaggcagctgtagccgttccctggccagccgggcagtgcagcgcagcctggccatcatccggcagcgcggcagcgcagggagaagaggaaggagtactgcatgtactacaaccgcttcggcaggtgcaaccgtggcgagcgctgcccctacatccacgatcccgagaaggtggccgtgtgcaccaggtttgtccggggcacctgcaagaaaacggatgggacctgccccttctcccaccatgtgtccaaggagaagatgccggtgtgctcctacttcctgaagggcatctgcagcaacagcaactgtccctatagccacgtgtacgtgtcccgcaaggccgaggtctgcagcgacttcctcaaaggctactgcccctgggtgcaaagccctgaggtggtcagtgccatcacgtccacctcacaggtgactcagagaggtccagcaactttcccggggttgcacagcaccaacacagggcggggtttgaaccatgggaagaaggattaaaagctgtctgatattttaaattggtatttctctgatgtaaactgaggtggaaaaccttttcccatgtttctaaggcctttgtgtcttcgcttctggaaaatctttttggtgatttttggaatctttttgagggaatttataaacataaacaaacataaaaatacatataatgtcctggactttaatctgttagtcacatgtcttctctgtttgtggtttatctttgcatttctttgtgacgtgttgaaaatcagaagttcttgattttaacggacatagttttatagttttctttacattttgcacccttagtgtcttgaataagaaattcttctctacaccagattgtgctcagttgcctctaaatattttgttgtgtttacctttcacattgagactttcatccagctggaggtgattttcttgtgtggtgtgtgcggtgaggtccagtttcattttgccacagcgcctggcctc

SEQ ID NO: 466010 - DNA, 1036 bp, Homo sapiens
ccagtgatgcgggcagcaggcccctcctgcgcacaggccggctggatcctgcaggcagctgtagccgttccctggccagccgggcagtgcagcgcagcctggccatcatccggcagcgcggcagcgcagggagaagaggaaggagtactgcatgtactacaaccgcttcggcaggtgcaaccgtggcgagcgctgcccctacatccacgatcccgagaaggtggccgtgtgcaccaggtttgtccggggcacctgcaagaaaacggatgggacctgccccttctcccaccatgtgtccaaggagaagatgccggtgtgctcctacttcctgaagggcatctgcagcaacagcaactgtccctatagccacgtgtacgtgtcccgcaaggccgaggtctgcagcgacttcctcaaaggctactgcccctgggtgcaaagccctgaggtggtcagtgccatcacgtccacctcacaggtgactcagagaggtccagcaactttcccggggttgcacagcaccaacacagggcggggtttgaaccatgggaagaaggattaaaagctgtctgatattttaaattggtatttctctgatgtaaactgaggtggaaaaccttttcccatgtttctaaggcctttgtgtcttcgcttctggaaaatctttttggtgatttttggaatctttttgagggaatttataaacataaacaaacataaaaatacatataatgtcctggactttaatctgttagtcacatgtcttctctgtttgtggtttatctttgcatttctttgtgacgtgttgaaaatcagaagttcttgattttaacggacatagttttatagttttctttacattttgcacccttagtgtcttgaataagaaattcttctctacaccagattgtgctcagttgcctctaaatattttgttgtgtttacctttcacattgagactttcatccagctggaggtgattttcttgtgtggtgtgtgcggtgaggtccagtttcattttgccacagcgcctggcctc

SEQ ID NO: 466011 - DNA, 1596 bp, Homo sapiens
aagtcaaggctagacccgtgccctggaagtgggaattgtcttgcttgttactccagtgaagaaagagaaggccacaacatcaaagccacacccacaccccaaagggagagggagtcactgcagaagcaggcacaggactgtgtgcaggaggatggaggcgtctgtctccagcctgtgtgagtccgtcgtgaacacttgagcactggggtctttcacgccacctcccttctggaaagcactaagccagcgtagtatacttaccaactgcctctgtctcctgtcaggcaaaatgcatgttcaggggaaggcagcatggtggagttgccagcctgatgcggatgttgattcttctaccaccaccaagggggtgggcccagacccggaaagtgctccccagctggggcacctggtgggacctgggtctagagcagcaaatcaccacaaattccagctcctggagaggcctccagtcaggaacttggagcacctcctctacctcctttggccttttccggggccctaccctacccagggctcagcccagaatcagttcagccttgagtcaaataccccatcttattttcagaaatacagaaggggcaaaagggctccttcaagcctcttccgtaaggacattgatcctaggcatgagagctctgccaccttccaaaaaatcctcacctcctaatactattgtaccaggattaggtgtcagcatacaaatttggtgatgggaggggggacataaacattcagaccctagcagctggcttctccaagcccccattcagagaagagagaaaaagaataatgtttcgctgttctgcatatggagtgcagattcttgcatgtcagcacgggtgagggcagtcctgcccagaagcagagatctagaccaaatgaccacccagttccctttaagctccgagcaagaaaggggatgttctcccattttgcagtggctaaagaaggcaagacagtgacccagctatgctctcccgcagtcagaggcaaggagctcacgaggctggagtcccaactggaccaagaagcgtgttccctgccccttcagctggatggagacatttggagggatgccctgccctagcccacctcactctcaccatgtcaacaggacttctatggaaatatgcgtatgatgagaagcagatctgagttctagaaagggagggaacagcttgtatcaaatggttctctatgccaagaaatgtgctaaagggctctgtgtgtgccatctcatttaaataccttcacaataattctgttggggtagattttattattatgcttacaatataaatttgaaaatggggtgtcaactgcttcactaactggctgggtatccttgagttgagtcattttccctcttggggcttctttctcatctgtgcaataaagttgttggactagatgcttgataagaacccttcaggttcaaatccctgtgaatcatctagtgatactgttgcccaagcagcccaggctgttctagcccatgggaagggtggggtgtgatgggtcaccagcatttccaaaagcaatgagctatgtatgaaggggtctacttaacttttt

SEQ ID NO: 466012 - DNA, 1880 bp, Homo sapiens
cattgaccagagaaatgatcacactgagcttccgaaccacacgatctccgagcttattgctgtatgtgagctctttctatgaggaatacctttcagttatcctcgccaacaatggaatgtttgcagattaggtacaagctagatagacatcaaaatcctgatgcatttacctttgattttaaaaatatggctgatgggcaacttcaccaagtgaagattaacagagaagaagccgtggtcatggtagaggttaaccagagcgcaaagaaacaagtcatcttgtcctcagggacagaattcaacgccgtcaaatctctcatattgggaaaggttttaggtcgttctggaccagcggatgagggagagcccttggttaatgcagacagaagagactctgctgtcatcggaggtaacaaggccctgaatgacctggtgcttgtcattatcgctttagataatgatactattacttagcacaatgggaaatatatgtgtgatagcagtggtgatatttattttgctttgcatcactgccatagccatacgcatctatcaacagagaaagttacgcaaagaaaatgagtcaaaagtctcaaaaaaagaagagtgctaggacagctctaaacagtgagctcgatgtgcaaaacgcagtccatgaaaaccagaaagagcgagtcttctgattggcagctgtggctgtctctatcatcgtgactgtggacttccctgctgttgccatcagggtgcacacaagcaggtgcagtgctgtcacctggctgaagacctgcagcctcggagcctctgggaggtccctttctccctcggtgaaacacagtcctccacatcaatttccaaacaatgaattaggtatggccattcatcactgttcagtagtttccccgtccaaaggctctcttccaaaactgcagtttgatctgtgttaataattgtggggttttagatgagaaaatgactataaagctgtggccctactttattttttaaaaatgacagaacttttgttcagatgtaaaagacaaaattgcactttaatgttttttgttacttgaaaacatatctgggatccctttttttggtcctctgctgatatttataaaacaagaaatgcttcttggactaccttcactggcatttccatagtcctggaatccagagccaagtggcctatctaaaattcacagcccttttattctcctgtgtgatggttaatacaacacagttgaagcctggaaacactaccattatttttggtgtattgctttttctaattgactgtttttaatgattttgatacattttaatgttgaaattaatattgaatgttagctatgaaattttagtattgaattttataatggaacagaacattggtaggtaacaagatgcaagaggatgtcaatacaagattgtctgcctgtttttctttgtaatttgtaattacagtttttgtaacttgtgattatgtttttaactaaatttaccaccagatacaaacactacttcttacacagagttatcctttatttatatcattaagacgtgaatgaaacatcatcctaacttacttccccaagatattgagaggtcatatctgtttttctttatcattcatttctttttctaaaagttgttactgatatgcttttgatttcctatgactctattatgttgtacagaacatcttttcaatttattaaaaaaaatagcttaactgaagatcactaattccttttctaaattttgaactgctctaggcataaatatcattgtgtattatcctttcatctaatcacttttggaatgtaaactgaaggctgttcactccaagttaagttagcatttacatgatgtttattaaa

SEQ ID NO: 466013 - DNA, 582 bp, Homo sapiens
caagagaaaaaactggtaatcttattacagcagatgaatacagttttatttctctctcaagccctgctttgcctgttgcttccatcctttttgactttagtatctaacaggaatggggaggcatattcataaatatctgttacgcaaggtagaaagttacagtaattgtctatcatattgtctatcataacctgttgtaaaagcacagttagctttacatttaataaaggaactgaggaaagtaatcttttttaaaaaaaacccatcttatgtaactcaattaagaaaatgaactatactttaatattaggatcaaaaagttgaataatatttattatatacatctttgtttccttccaaataaaggagaacatggaattgaaggtgttaatgttttcattcaaggatggtatattcaaaggcatgtaacttacggtataaaaatctacattgaaattcagcaacgaagtatatactcagaagcaattgatctcagaaaattataaatattcattttgcctgtccttggaggtagagataatcatcaaacattaataaaacactttatactttgaaaaactg

SEQ ID NO: 466014 - DNA, 652 bp, Homo sapiens
cattgaccagagaaatgatcacactgagcttccgaaccacacgatctccgagcttattgctgtatgtgagctctttctatgaggaatacctttcagttatcctcgccaacaatggaatgtttgcagattaggtacaagctagatagacatcaaaatcctgatgcatttacctttgattttaaaaatatggctgatgggcaacttcaccaagtgaagattaacagagaagaagccgtggtcatggtagagaatgagtacgtatttaagtttaaaacagccagttccatctttttcatggattctgccaattatagatccttccattatgaagaagagtaaagccagcaagttaaccagagcgcaaagaaacaagtcatcttgtcctcagggacagaattcaacgccgtcaaatctctcatattgggaaaggttttaggagaacatggaattgaaggtgttaatgttttcattcaaggatggtatattcaaaggcatgtaacttacggtataaaaatctacattgaaattcagcaacgaagtatatactcagaagcaattgatctcagaaaattataaatattcattttgcctgtccttggaggtagagataatcatcaaacattaataaaacactttatactttgaaaaactg

SEQ ID NO: 466015 - DNA, 339 bp, Homo sapiens
ctttctatgaggaatacctttcagttatcctcgccaacaatggtgaatatcttttgtgtaaagaaaaagagaaccctgagttagaaaaataggactgtaatgacatgggtcttttcagcagtcaaactacaaacgatgagagaaaactgtatgccctccaatgggtttggtttttcagtgcctcccttaatggttattataaaagctagcatttcaagattaaattaagatgcttttctcccattacatgtttgataatttaacggagttgatatgcagttatatttcttattattgataggatgactttaatagtacatgatgactcaaattggtttt

SEQ ID NO: 466016 - DNA, 353 bp, Homo sapiens
ccactgcactccagcgtgggcgacagagtgagaccctctctctaaaaagaaaaaagaaaaaaaattatgatgttttattcttttctctccctaggtgtgatagcagtggtgatatttattttgctttgcatcactgccatagccatacgcatctatcaacagagaaagttacgcaaagaaaatgagtcaaaagtctcaaaaaaagaagagtgctaggacagctctaaacagtgagctcgatgtgcaaaacgcagtccatgaaaaccagaaagagcgagtcttctgattggcagctgtggctgtctctatcatcgtgactgtggacttccctgctgttgccatcagggtgcaca

SEQ ID NO: 466017 - DNA, 539 bp, Homo sapiens
cattgaccagagaaatgatcacactgagcttccgaaccacacgatctccgagcttattgctgtatgtgagctctttctatgaggaatacctttcagttatcctcgccaacaatggaatgtttgcagattaggtacaagctagatagacatcaaaatcctgatgcatttacctttgattttaaaaatatggctgatgggcaacttcaccaagtgaagattaacagagaagaagccgtggtcatggtagagaatgagtacgtatttaagtttaaaacagccagttccatctttttcatggattctgccaattatagatccttccattatgaagaagagtaaagccagcaagttaaccagagcgcaaagaaacaagtcatcttgtcctcagggacagaattcaacgccgtcaaatctctcatattgggaaaggttttagaggctgccggcgcggacccggacacaaggcgggcggcgactagtggcttcactggctgcctctcggcggtgcgcctcggccgcgctgctcccttgaaggcggc

SEQ ID NO: 466018 - DNA, 3122 bp, Homo sapiens
gtcctctggatctggtgtccacagtttctaaccagtgcctgctacgtgaacgaagggatcacctctgagccatggctcatcactctggcagtggctgctggacagccctcacaggtggatccatgtattttgtcattgtgcactggtgccaggtcatcacacactggtgtcaggtcatcacacactggtgccaggtcatggcacactggggccacgtcatcgcacactggtgccaggtcatcacacactggtgtcaggtcatcacgcactggtgccaggtcatcacgcactggtgtcaggtcatgacgcactggtgtcaggtcatcacgcactggtgccaggtcatcgtgcactggtgtcaggtcattgcgcgctggtgtcaggtcatgatgcactggtgtcaggtcatcaagcactggtgccaagtcatcacacactggtgtcaggtcatcacgcactggttccaggtcatcacgcacaggtcttcacacactggattcctggtgttcaaccttgttctcgccctttgcgaatggttccagagctgcttgctgaatcctgggctcagaacctcctctgtgacttaggtcattatgagaacgaatatacataacaaagggtacccctgaaagggcctctgaccccagctgtttagatccatctaaacatgcttgaaaatacacaacgtaaaccatctcccttgttaccttggaaagcagtaaggattctatgcaggttgtgctaaggagatatttaagaaaatttttttccatactaaatgtgttcatttgaaatacagagatcatcttctcatttctataaatgggatctgacaggagaagctcccaaatataagaagtgtttcttccactgcattcaatggaaaatggagcacgctaaacagtgctagtgaaacagacattcgtgtgcacacgcgtgcgtgtgctgtgcgtgcacatgtgtgtattattccacctgcaaaatggaaattcttagaacacctttcagtatacatttcaaataatatcacaattaatgactggatttcagaaaatggcttctttccagatcatttccacattcagtgtaaaaagtgttcttgagctttctgtgcccttgcaggagatgaaggcatgcttgttccctaacagcacatttttgagggaaatccacatttgcatctcactgttggcacccacatctgggatgcccccacagctgccccgacaacccatctctgggctcttgactgcagaggctcggaaacgccatacccttgaccgcagaggctcggaaacgccatacccttgaccgcagaggctcggaaatgcgatacccttgaccgcagaggctcggaaatgccatacccttgcttggctgccctcctggtgctgacggtgcctccgagatgtgaccccgctccagctggtgagtctatggagcacctgctcagtggcttctgagcagagtccggccttctccatactgatgactgctcttcctggagcccgtggcaggtggggctgcaatggctgacccacggccagctgagagtgagagccagcatgctcagatgcatgacgctggcttgggtcccaacggggctgaccccaacccggtgtggacaacctcttctggctctcctctgccctggtcccagtgcagctaacagtgacccagccatgacaacctcctttgccctggtcctcgtgtagctgaccccaacccagtgtggacaacctcctctggctctcctctgccctggtcccagtgcagctgaccctgacccagccggaccaaccacctccggctctcgtccacttggctctacccgtcctttgctataaccaggactgggcaggtttgaaggatgtgccaccaaaggcttcccaaacagaacacgaggagaaggcatcttaataaggcacctcccacgtaagtctgggtgcttggaagtgcaagaaaggccttctgcaagatggcaagcgtagcactcgtgtagttgacagtgtgttggggacaaagactggaacatagatttcttaatgcaaaatgctaaaaggaaatgtagagtgtgtgccagctgggaggcggggagtgagcattgtttgtctggagagcagagggtaaagggggaaaggcattctgggagagaagtttggggaagcagagtgggaaactgtgagggacaccccagacagcttgatgtttatgccacaggcaaaagaaaagtactgcaagttcttaatcagggacttgtgagctgggagctcaggacggtccctgtgcgtggggcctggaggacaaggtgcctgaatgcaggaagtggtgtcctggacacagaccccgagaggctcctgcagacttgagctggtttctcatgagacaccaaagggcttggattttagggacagagcccacaggaatgaggaatgtgttagaggtgagatgattccaaggtgcctaaacttctcccaacaaaggcaagatctatgataggaagaaaaacaggttttggaggttggacctgagtttgatttggacctgctgattctagggcacttccaagaagtctgtgaaagaacaaagcaagtgtgacgggcagggctgtgaacctctgagtgcttcagatgtaaaagtgtggaagacgtcgggctgtgagtgtcacgcagcagaaaggtggaggaggcctctcgggtcggaagtaacatggtgcgcagaaggcagtttgtatgcacagtggagcacatgtgttgatgcctgaaagcccacattgagatcctggctcaacctctcgccaacggtgtcatttggacaaatctcttaatctatgcaacgtacaatgaggacagtagtcacaggacataacttatggagttctgtgaatataagggaatctcctcatctttgccaccggtggggtaccctccccactcatcctgaggtacctgggagcagacagacatgaaacacgcatcaactttgtcactgagaacggcagcatcagctcctttttggaaacaaatcctctacaattccataaagatacacctctttacagtcatttatcagttaaagtcagatgtataaaaatgcatatcctaaaaggaaatgaatataaa

SEQ ID NO: 466019 - DNA, 1228 bp, Homo sapiens
aagaagatttcctttccccagtatatgttattatcagctttgtcgaagatcagttggctgttatttcaaaaaacctgtcttcaacttctaaaattatttctttcacttgatctagtctattgtggaagctttctaatgtattttgtatttccgtcaatgcattatttagtgtcagcgtttctgtttcagttgtggaatgctcaggaccctggattttgtgctttgtctcctagtgggagcaaagccagatggagccagcctggggaaggacgatcatcaggtacttggcagaaagctcaggtgaggggtgacagttgctacactgaagtcctagcaaggggaaagtggggccatccccagtggccacagtctagagcaggggatactgtttccctttctgagaagataatcaatgaccctccaagacttgagaggagtgacctgagtttaggagatagtagaacccacctagatcatggtcgtgccagcaaatccgtgtgaatgccactggattaaaagaaggaagtttagttgaatggttactaccctcattcacaggagcagttatcggcacttccactgaggcaatggcagtgggaaaaggaaggcaaatatttattcacccatccataaactcataaaaattgccaactttacagagaaactgttttttccgtttttgaagaaagcctagcttgtctacctgggagctcttattcaagccttcacttaagctcttgaatcctccaacgaagtgctgctcaaaccttcttgtcccgaattacactgtgttcttggatacacttgcatcccacatacatttattgtgttctaaatgtttctggggttgctgtggtttcaaatacttattgctaatctgcagcagaaagttttaactaaggttactagttaaagggagggaagagacatgatcatgacagattttactgttttatatatggtcacaagttaccaatcaaaccttatatttttcttatttataaaatggaatcattatatacccacctcatgttcttcatatttataaaataggaccattatatacccacttcataagcttgtcatgagaattataaaaactaatacacgttataacatgtagctttcagtgtatcaggtatttaatacatacaattattctttattctccaggatgtcctatcataaacactacattaccattagtctggttagctcatcctatcat

SEQ ID NO: 466020 - DNA, 997 bp, Homo sapiens
aacagactaatacacaaggtttgagaggatggactccagttttggagaagttctactagtacaggaagtgtatacaaaagaatttcgaaacaatccttttttcctgtctgataaggatgatatctatccagttgacactgttgctattggcagaacagacattgaagacttagacctttatgccacatctcgggagaggcgatttcgtttatttgcttctatagaatgtgaagggcagttattcatgactccgtatgattttattttggctgttacaacagatgagcccaaagaaacaccaccagtttggaaaggctcatcgaagctatttcgaaatcttaaagaaaaagagccacatgcagggttcagaatagctttcaacatgtttgacactgatggcaatgagatggtggataaaaaagagtttttggtgcttcaagagatattcaggaaaaaaaatgaaaagagagaaattaaaggagatgaagaaaagcgtgcaatgctgcgtgctgatgacatcacaagtttagtaacagatactacacttcttgtacacttttttggaaagaaaggaaaagctgagctcaactttgaagatttttatagattcatggataatctccaaacagaagttctagaaatagaattcctttcctactcaaatggaatgaataccatcagtgaagaagattttgctcatattcttttacgatatacaaatgtggaaaatacatcagtatttttagaaaatgtgcgttacagtatacctgaagaaaagggcatcacatttgatgaattcaggtcatttttccagtttttaaacaacctagaagactttgcaatagccctgaatatgtataactttgcaagtcgttctatagggcaaggaaatttcagaactcaaccagagacctattcttccggataacgacattgatggagaatgtttcgacccaatcaactgtatacagagacatccttaggcttttgaaattat

SEQ ID NO: 466021 - DNA, 6160 bp, Homo sapiens
tcagctgagtggctgagctgccgagctactaattgcagagagcaggcagatctaggggagccctcgggctgggctcatggcctggatgctgcccctggtctggttccatcctgtctgtggcctcacagcaatcagcattggcagccaaagctcccagggaccgcagggcagtccccacagagccccgggctgctcctgagcttccctggacctagagcctggcctctcctaggccctccttcgcaaacccacccgtcatctctactaagttttccagagctagatgatacgcaaagaccatgcagtctagaagtgtcacctttattttacttggtttgtttgtagtccaaaggctgggaatgggtgggggcgggagcatagatgctcctaacagagaggacacgccgtctcggtgagcccagcgtggcagccttgaccaccacaatgcccaagcagggcctcttgggagcagaaggctgggccacttccctgctcaagcttctggtgatgtcccagaggaaaccaggaggatgtaaatctgttctcaaagaacaggccccgacactaggcctcactgtccaggactgctgggaccaaggtgaaccaagcagcgcatttcctggcagcacacagcagccacggctccacaacactctcagtgggctgctgtgcacctgcctctaccattgcccagctgttccatgccagcctccttgggactgtggtggagcgcccccacctctcccacctgccctacctcagctggtctctggaggagaaaggatgccggtggggaaggagggtggctgggagaaggaggggaaaggaaagcccatgcatctgggcggcgacttctgctctggaaacgctgatctgccagcccaagtgacggatgtattgagttcgtttctgcaggctcttggcctctgcctggtccaagggccaagctacagccaaacatctaacacggccactcccaaattactggctaaatgttcgtctgccagaaaagaggagctcaggaacaaaaccttgggcctgggggcaacttgactcttctcatacactgagagggcaagaaaggtcacgggcttcatttttaagagccaaggaaattgagaaactagacaaacaaccagaaattctcagatagaacttatttataccccctccactttcatcccccaaccttgttctctttccagaggcagtctatggacttgtcaacaactcaggaacaaagagaactctgcccaaggggacggtcatgccctggccccagcactttgctgggggcctggtctgttgtaagcacacaagcatagtttttgaaataatgaatgaatgaatgggtgggtgactgtgtgaatgaggatggttcccagaataaatcctcaagaaaatcttctttggaaagggtgaagtgtggagaagcccgtgacctgtgttagttacattataacagatatcaatgtttcccaccctattgagtgtcccagccttcaaatcaaatcagaaactcctttcaggctcctcggggtgggtagatgagagctgaaggaggaggagaggcaaatagggaagagctgaccaagatgaaggtcagaccttcatgcccacatgagctctacgcacacttcagtccttttcccagactgctcagtgcttccctacccaggcactccctcgggaaacaagggaagatgactacatggagaagataaccaggagcccgaccaggcttttttttttttttttttttttctcttcgaattgctaagtgtagagtgactcataggaactccagacaaagatgacgatggaaaaggagtctagcagatcaggggaggtggttgaggtaaaagaagcgggggtacttgaggttgggagagaatgggaaacatgttttgtaagatttccaagatttttggaggctgttgttaaggactttttcataagacctgttaccctgctggggtttacatcactatttgatctaagccccaacaggacgactacatctgctactaagctgtgttgtaaatgtctttaatttttatatttcatctgaagggagttgttaaagtgagtttacagggtgatggctctttgaataaaagccatcaatactggagcagagctctgtatgacacttaattttcgctctaataagccctcctaaaacattacaagatttaggagggattgtttttcctttcttctttttccctttgacttcctttccctccttgcattatttctctcctctccagctctcgcgctctcctctcttgctttccttaaaggacatacttgaagagaacatttgtgctcagatgacaccacttctctttttaccgccagccagatgtgctcttgacttctgaacaggagaaaggtttctttgaagtttttcaaagactttgcttttatttagaattttttttcccttttctctctctccctggtgtttaactggttgggaagccccaggaggggttttcgcatgggcctcttttcttttcctggggcatgaaaggaatgggatcagaggcacaatgttcccagagagccttctattttctgccccaatgactccaagtattttctggtagagccgctgtccccaggagcaaaaagaagatggctttggattttccctggaaacgcatctattaaatgaacagaatggttctggtagtggtgcaggggtgaagggcacccccatcccgtccctgaacatctccctacccttcctaaggagggcagagagaggtcttcactttcccggccatgctgctgtcatggttgcttaactgctcttgcgtggcactgaaatttgattaaaacaaagatcagtaatgggaattcaggggacgtgtcagaaaaagaatggtaccccaaagtgagagcaggagcccctctgaaagtaatgagaaagctttatctttgcatccctcatagcaccacagcctggcatcctgctcaatatgcttgggccagtttgtgatttttcaggaggactggaaaagtgctaatgctttaggaggtggcagtgacagaaagctggaagacttctctgaagaacaggtgagtctttagcatgacatgctagggcggaggatttggagtctcaagtttccgtcaaagtgccagctgtgtactgagtagctctgtatctccccaggtgaatataagttccagaaaggcaacatccccgccattgtattcccagggccgagaagagtgccagggactccatgggcacatggaaaatgtatatgtcctccatgcatgtgtctgtttcacaatagccatgatttctttggaggaaatgatgctgcaaattcaggagggaggggttttctctcagagtactttcaaagaaaataggaactgggggccaccaaagacttcttatgccacaaaagtatttgtgttttctaaaaaacctctaaggtttttgaggaaaataaatacatttggaattgaggggcttgtttttgttttatgcaaaaatagattaattaaaacccaggagtgtgtgtgtacacgtgggtgtgagcactgttttttgtttgtcttatgtgaagtgtgttcactactacagataatcatagtcaggctcatttgactgactcctaaagacgaaaaccctaagtcagaaccaatcacgttcatatataccacgacccacaagcctgaaatcacaacaccaaccttgggagtgattgggtgggttacaaaaattattctccagtctcttccttccactaatttcttagcagcttctatgttcttaggggcaatgtggatatgtgacttctgacacatgggtatggtcgtactggggccatgtgattagttgaagccaacagaccatgagtggtgttggtcacttttgggtcaagtcagttaaaagtctttgtgtgtatcttccctccctctcttccggtacttcagcatcccatgaggccacgtctttcaaatggtgctgctagaagaccacagagcctctttcaacctgagtccctgagcatgatgtggggcctcttgctaaccagtcttggatgtaaaacatgagcaactcaatttttgtcacgataaatactgagatttcaagattaatttgttatcacagcatggcccagcacatctgattaatgcacccttaatagtctggccaagctatcaaacaaacaaaggctctccttcccaaatgtcttttgcatctattccccttcatttcaatggccaagattcctgtttggaccccaacttctcagtggtatgattacgctaacattccatcagccatcctgctctatttcttcccccatgtagaaatgtcattttccgattccacaccctcaagcatggcttaatatcatgtcactcccttgcttaaactggctctcaataggctgcaaaataaaatgtaaacactgaagccaaccccacaaaaccctccgtgatgaaaactgaacgctgtctttccaccttcttttcttaaattcctgaattaaatgactccctgtccatgatccctcactgcacattgtcacccctctccattgccacttactcctcccagaaggctcgacccttctcatcccacaacccagctgttcctgatgtcaaaggctccagggccaagttctccatgacaagttttctctttgtagccccaccatgtagatgagatcttgcccttatgtgaagtcccacagccctcatcctttcctgtgtcaattaaccccttacacagagcagttttttggtgtgtttcactgagcagttctaggacatctttaactgcaccactctcaccactttcataggagctagcccagtgccatacgtagtagctcaataaacttctgctgaaagaatatatgaagaataagccagtatctcagggacctagcatgattgaagcttactatttgattgcctgtattagcctattgcgtctttaagcctgctattttgagaatatggtttggaaaccactcccagggtgtttgtacaactctagctctggaaattctgattctatagctctagagtgggtctcacgaattcacattttaatacaaaggtctttttaaaaaaaagacattttaaaggtctttgaaggagattctgatgtgagagatctgtaagccacattttgacaaacactagggtgctgtgagtatgtgattgtgaatgctcttagtgtatgagggaaatgcattggtagtttgggtcgctggtgagcaatcctttccagaaatggcaagtacgttttatctcacttgtcaacaccaacgcattggtaggggcgctccagaggactgttttaaggaggtctctggggccacatctggactgcacagggagaagccctatgatggattgatgatgtctgccataggagaggggaatgtggggcctgtgtgccaggtgtctgccgtcactgccagcccattggtctggagacacaggaccaatacttggagatgaacatcaaaggatcatctgagtcctaatccagcctgcaacctgacttcaacttcctcaggtaactgtggcaagcacaaataagatcaagatgtccagtaaaaggcattcctttagaagaagccacaaagttgtcatagtgaacaattgctgttttcatctgcagcctccatcttcctccttcaatggtaccttgagtttcagcaatttacccctcttccattctcttctactctggttccaagtgggcatgggtgggaatgaccacacccccagttccaggggtgggtcctgattggctgaactcaagcagcttatcctatctccccagtgacaggagcaaaagagagagacgcccaggacttgtaggagctgcaggaggaccctctcccttccgcatgaggagaggcatgagggtgtgaactctgaccagctagagtgattttgtaaccaccagataagaaactgcagctgctgaggggccactctgagcagtccaggaatgaagtcaacaccacaaaaggcagacgagcgagatggtgagaaaccaggtcctggggtatcctttgaggcactggaccaagtctgacctgaggtctgtctgactactggactcttcagttatgtgaatgaatacattttcttcattatctaa

SEQ ID NO: 466022 - DNA, 933 bp, Homo sapiens
cccaatttgctaataacctaaaacttttctaaataggaatgcttcaaggcacagtttgcaagtttaagggagcacggctgggcatatccactccctccctgacatcaatgccattcggcatgagattgtgttgccctgggctctgcctctttaagccgtggactggcatttgctcaactgaatttgggcagggacggcaatggagcatcagggaagaaagctgtgggggtggcttcccatcaccaaagaaagacccaaggatcaagactgagcctccaatctcattgtctcctttattccggggaccatttgattttgggtggactctggatcttaccacctggtcacatggaaataccctcggagaggaagagaacatttaccaccttccaataacaacatctagagtcactaccgcagctcctgaatacaaccactcagagtgccctttaaattctgattctcattcctgtccatatattctgatccaggagatctgggatcccagaaatctacactcattaatatcacttcagatgatccagatacatgagaagcaatgataaagaaaacagaatttagcaatgtgtgcagtatattttacttaatcctgcaagcaatgctaaaaggccttctacaattatcatgtcctggaattgcttcagatgctggtgacaggaggagtaagttctcagctggaacaacatttagataaggataaagtctatggtgtggcagatagctgcacgtcgctcttgtctggaagaaaccggtgtaagctggggcttctgtccttacacgaaaccattttatcagacgttaatgtgagtctactcttctcagaattcagtttctcacttctttacctctctgagcttctgaaaatggtccaggctatttgggttcatagatgtcccatagcacagaaatgat

SEQ ID NO: 466023 - DNA, 1057 bp, Homo sapiens
ataggaaaaatgcaggcaggccagcgcctgctcctgaatgcccgtttgagcaatcgtataccctacaaattcagctcgtcactttttttttcctggtggtggcggcaagaagttggacgggtttctggggttggggatgtgtcatggaagaagtggaagttgacgtacaccttcaaagagggatacactcttagtcgacaaaggaaggatggacttgtaacatcattcattgagagctcagatgggaatcatattttggaatttgccctaagacacccagccacccattgctttcctgggtggcacacctctcacaatggatggaagcaccaagttgccctaacaccctctcctaacctcctgactggctcagaacctatcctgtctaagaataacagtgtctgctgaggaagggagagagtttctcagtcagtgtaacatttaccatataaattcctattctgttgacctgcacatttacctcctttgaaagttatggttttgtggttagccgagtgctaaaaacctataggtttcaaacccctcatcattgtaagtttaccaggaggctgaagatgaatagaatcatcaccctagtgaaatccttcagttacctatacctgcaggggctcatcttaggaatcatagaatatctcatagcttaatttttaagtttcacaatgatgtttatttcttaatgcattgtcatagcttgttctaaccttatcaatgtaataatctatttaaatcaaaccaaacttattatacacttcagtttagtctgcttactttacttccatttttttgaggatatattccaagtaataaaattccacatgcagagttcaaataaaggcattgaatcagcccttgctgttctccaggcaaagacatgcttattccagtaactttgccaggtgtacgagtgtctgcagttaacccccttttgttctccaaaggtcttgctttatcacccagcctggagtgcagcgttacggcctcggcttactgcagccacgacctcctaggctcagtgatcctcccacctcagcctccc

SEQ ID NO: 466024 - DNA, 867 bp, Homo sapiens
gaccgtcacatagctgcttctcacacttgggtgtctacaaaatggccacgatatcagttgctatggtaatgggcatcctgcaatccaggcagaaacttcctagtgaccaccggatggcccttggtggagcagtcatctgcagggattcccttccttgggagcccctcgcaggcctgaccactcactttactctcaaaatctgccaaaaggagaactacagagaagccaagcagggaaatggacaggtggcagccaagaaagcagaaccccaactaaagccacgagagggtggtacgtcatggcggaaattcaagcccagaagccttaaacctggccttgacaacatgctgccctctgggttcccttttaatcagccccacaatgccaagttgccaagcaacggatcttttatggtgaatcgccacggagactgatgtaaacaaaatcataaatcccattaccctgctaaatactaggtctgggttagaaagggagcaaaagagctgcttttcaggttaaaagagatcatatgaaacggagtggcaaattcaaattctcctgaggcaaaggcagttaacaccagtatataaggccagcctggtggggaccgaggtgagtgggaagcaatggcctcatctgaaaggggcgtcattggctgctgccacacaggagtgtggactgcaatcaccaggtctcctggacatctaggacattccaaagtttcagcatttgaggttctgcaagaagagttctgttgttgacaccattgggtcaactggagactccacagagttgccacagagctgcagtatggagcattggtttctttcttgagttgtgctaacaaaattaaagatacgaatttaa

SEQ ID NO: 466025 - DNA, 4233 bp, Homo sapiens
  misc_feature (1)..(1): n is a, c, g, or t
  misc_feature (4)..(5): n is a, c, g, or t
  misc_feature (12)..(12): n is a, c, g, or t
  misc_feature (14)..(14): n is a, c, g, or t
  misc_feature (16)..(16): n is a, c, g, or t
ntcnnttttttntnanagagatcaggaggaacaggccgaacgggacaaacgggataaaaaaagaaggccaccactttagtcatggccctcagtcaagcggactttggaggctctggaaaagggaaagcctgggcaaatctaatgcttaatagggcttgcttccagtggtgcctggggcaagcgccagcccatgccatcaccttcacggagccctgggtatgcttgaccactgagggccaggaggttaactgtctcctggacactggtgcagccttctcagtcttaccttcttgtcctggacaactgttctccagatctgtcactatccgaggggtcctaggacaggcagtcactagatacttctcccaggagagacgttctagcaaaagcaggggccattatacacctgaacataggagaaggaacacagtagaatggacacctgaagcagaagcggctttccaggccctaaagaagagcctaacccaagccccagtgttaagcttgccagtggggcaagacttttctttatatgtcacagaaaaaacaggaatagctctaggagtccttacacaggtcctagggaccagcttgcaacctgtggcatatctgagtaaggaaattgatgtagtggcaaagagttggcctcattgtttatgggtagtggcagcagtagcagtcttagtatctgaagccattaaaataatacagggaagagatcttatcgtgtggacatctcatgatgtgaacggcatactcactgctaaaggagacttgtggctgtcagacaaccatttacttaaatatcaggctctattacttgaaggaccagtgctgcgactgcacacctgtgcaactcttaacccagtcacatttcttccagacaatgaagaaaagacagaacgtaactgtcaacaagtaattgctcaaacctacgctactcgaggggaccttctagaggttcccttgactgatccctacctcaacttgtatactgatggaagttcctttgtagaaaaaggacttcgaaaggcagagtatgcagtggtgagtgacaatggaatacttgaaagtaatcccctcactccaggaaccagtgctcagctggcagaactaatagccctcactcaggcactagaattaggagaaggaaaaagggtaaatatatatacagactctaagtatgcttacctagtcctccatgcccaagcagcaatatggagagaaagggaattcctaacttccgagggaacacctatcaaacatcaggaagccattaggagattactattagctgtacagaaacctaaagaggtggcagtcttacactgccagggtcatgagaaaggaaaggaaagggaaataggagggaaccgccaagcagatattgaagccaaaagagccgcaaggcgggaccctccattagaaatgcttatagaaggacccctagtatggggcattgatagcacccatcagatggccaaatcattatttactggaccaggccttttcaaaactatcaagcagatagtaagggcctgtgaaatgtgccaaagaaataaccccctgccttatcaccaagctccttcaggagaacaaagaacaggccattacccaggagaagactggcaactagattttacccacatgcgcaaatctcagggatttcagtatctactagtctgggtacatactttcactggttgggcagaggccttcccttgtaggacagaaaaggcccaagagtcccacatgaaccctcctgagctgaagcaaaggacccagacctgtctgtggagctacttgagccccaaaatgctgcatcccaactgtatccctggtctgtcctggtctccctcttgggccaccctggttgctcctgtcgtgtgggcctggctccaggctgcacacctggctcatcaatgccgaacaagctctgccagctgctgcatgattgttgacactcggcgtgcactggctgtttgaccacatcccggaacactctttgctgaaaccgacaaagtaaaatattcctgaacatataatgtagtactctggggggaaaattaaacattttagtggtatattaaaaatagtaaataaaatttcagaaaatttcagaatatatcacattgcctagtgcaatgacctaatagaccagggagctagcaaacaagaaaccagtattgcaaaagtgaaatgattttcattgtaaacatataaaatgcagttactgtgaacaaatataatccccaaacaataacacttttgttatcagaactctgttaagtaatcaagaacttataaaacaatgatttttttgaaaatgccccctttggagaatacaagcatgccctgtatcggcatagcacttttaaacactttcatgtctctgatcttattatagccttaggatgcatgtgaaactcatgttttcgtagacaaagaggttccctttataagaagcacatctgggactctaatttcaggactttccctccatgtggtggccactcctggagaaatgatgcttgtgcgtgactaataaaaggcaggcttcccacagacacacttttcttgctaagagcctattccttcaggctgttgtattttgttaacagtgacaatgacaagcactaacaggatgctcccgctgtgattgagaatgtgatcttgtcgcctggttctgatggtgtcttggttcccggctggggttttgtgtttaccacgagcgttgcctgctgtcggggagctgcgtgtgtttcacaacaaacagggagccagggagaccaccctgcggggctgccccttccctcagcgctttctgcttgggtcgctggcgtcttgcagtgccttcgttcgtctgtggtgtgaggtgctggtccaggcttacgcgctaacagtgaattagaaggagaaaacgctctgcgagtgcagcggaaggtcaatatggagcctggtttgcttttagaatcttcccaaggccgatgggcttcctcttccctcctgaccagaggctttgatgcccctgccctgggctgcctggttcctgccccgagtcttcagaaagatccccgggcctggagactgtgagttcaggttcagatgccttgcgtggcctgtgaatcctgggtctggtctctgtccccaggccggtgttcagggaccaccttgagcaccaaaggcagcccagtccggctttgactcagctcccagggcggagtcccttgcccagcactgggcaggaggagggcatcctcagggcaaggtctgccatcagcagaccagagccagagcccgcagcccctgagcactttcagattcctgcagcgcagagaggttttccgggagggaagggaggaccctgtggctggagaaatcccgccgcgaacacccagcgaccaggtctacagcagcaccaggtctgtgcttccccctggtggtcacagattttactacacgcggcccacaagtaaaatgagtttctcttcagtggcccggttatcttctgtcgtgtaggaggaagtccagagccacggaaattcggtaaggatcggataagggcaataaaatcgcagctctaaatcttttcatggagttgaagacagacgtttgactgtgggagccatctcatctttataacctggtaaacaatgccagaataaaaacaacaaattcaatgtatttaagtcggtttcgacagtgaggaattaaaattaaatttatttaaactattttgacttttacccaagtttttcttacagttccatctcatttttccctccttacatagtttggggagtagagaacagtctatttttgactcctgtgtaactgacatggacacagaggcctgcggtcccttggaggattagtggcccacgcaggtgtgcagaccacgggtccctcaatcagaagcgggatgtgtggcagggagctttggagagctttcattttggattagtgatttcctgtcgacttttcctcgtttttgtcacagcacactcggaacatttctcatcagctgtgtacactatgtcaggcatttcaaatatgtttctggaagttgtcagtgctgttctctatgaggcctgaaggaaaaattcaatgtttgtagtaaataaagtacaaaaattatatcagctattaagaggatggattatttccaagttgcttagccatattggttgagcgttgaatgcagcaatgatgccaacatattaagcacaagaa

SEQ ID NO: 466026 - DNA, 3820 bp, Homo sapiens
  misc_feature (1)..(1): n is a, c, g, or t
  misc_feature (4)..(5): n is a, c, g, or t
  misc_feature (12)..(12): n is a, c, g, or t
  misc_feature (14)..(14): n is a, c, g, or t
  misc_feature (16)..(16): n is a, c, g, or t
ntcnnttttttntnanagagatcaggaggaacaggccgaacgggacaaacgggataaaaaaagaaggccaccactttagtcatggccctcagtcaagcggactttggaggctctggaaaagggaaagcctgggcaaatctaatgcttaatagggcttgcttccagtggtgcctggggcaagcgccagcccatgccatcaccttcacggagccctgggtatgcttgaccactgagggccaggaggttaactgtctcctggacactggtgcagccttctcagtcttaccttcttgtcctggacaactgttctccagatctgtcactatccgaggggtcctaggacaggcagtcactagatacttctcccaggagagacgttctagcaaaagcaggggccattatacacctgaacataggagaaggaacacagtagaatggacacctgaagcagaagcggctttccaggccctaaagaagagcctaacccaagccccagtgttaagcttgccagtggggcaagacttttctttatatgtcacagaaaaaacaggaatagctctaggagtccttacacaggtcctagggaccagcttgcaacctgtggcatatctgagtaaggaaattgatgtagtggcaaagagttggcctcattgtttatgggtagtggcagcagtagcagtcttagtatctgaagccattaaaataatacagggaagagatcttatcgtgtggacatctcatgatgtgaacggcatactcactgctaaaggagacttgtggctgtcagacaaccatttacttaaatatcaggctctattacttgaaggaccagtgctgcgactgcacacctgtgcaactcttaacccagtcacatttcttccagacaatgaagaaaagacagaacgtaactgtcaacaagtaattgctcaaacctacgctactcgaggggaccttctagaggttcccttgactgatccctacctcaacttgtatactgatggaagttcctttgtagaaaaaggacttcgaaaggcagagtatgcagtggtgagtgacaatggaatacttgaaagtaatcccctcactccaggaaccagtgctcagctggcagaactaatagccctcactcaggcactagaattaggagaaggaaaaagggtaaatatatatacagactctaagtatgcttacctagtcctccatgcccaagcagcaatatggagagaaagggaattcctaacttccgagggaacacctatcaaacatcaggaagccattaggagattactattagctgtacagaaacctaaagaggtggcagtcttacactgccagggtcatgagaaaggaaaggaaagggaaataggagggaaccgccaagcagatattgaagccaaaagagccgcaaggcgggaccctccattagaaatgcttatagaaggacccctagtatggggcattgatagcacccatcagatggccaaatcattatttactggaccaggccttttcaaaactatcaagcagatagtaagggcctgtgaaatgtgccaaagaaataaccccctgccttatcaccaagctccttcaggagaacaaagaacaggccattacccaggagaagactggcaactagattttacccacatgcgcaaatctcagggatttcagtatctactagtctgggtacatactttcactggttgggcagaggccttcccttgtaggacagaaaaggcccaagagtcccacatgaaccctcctgagctgaagcaaaggacccagacctgtctgtggagctacttgagccccaaaatgctgcatcccaactgtatccctggtctgtcctggtctccctcttgggccaccctggttgctcctgtcgtgtgggcctggctccaggctgcacacctggctcatcaatgccgaacaagctctgccagctgctgcatgattgttgacactcggcgtgcactggctgtttgaccacatcccggaacactctttgctgaaaccgacaaagtaaaatattcctgaacatataatgtagtactctggggggaaaattaaacattttagtggtatattaaaaatagtaaataaaatttcagaaaatttcagaatatatcacattgcctagtgcaatgacctaatagaccagggagctagcaaacaagaaaccagtattgcaaaagtgaaatgattttcattgtaaacatataaaatgcagttactgtgaacaaatataatccccaaacaataacacttttgttatcagaactctgttaagtaatcaagaacttataaaacaatgatttttttgaaaatgccccctttggagaatacaagcatgccctgtatcggcatagcacttttaaacactttcatgtctctgatcttattatagccttaggatgcatgtgaaactcatgttttcgtagacaaagaggttccctttataagaagcacatctgggactctaatttcaggactttccctccatgtggtggccactcctggagaaatgatgcttgtgcgtgactaataaaaggcaggcttcccacagacacacttttcttgctaagagcctattccttcaggctgttgtattttgttaacagtgacaatgacaagcactaacaggatgctcccgctgtgattgagaatgtgatcttgtcgcctggttctgatggtgtcttggttcccggctggggttttgtgtttaccacgagcgttgcctgctgtcggggagctgcgtgtgtttcacaacaaacagggagccagggagaccaccctgcggggctgccccttccctcagcgctttctgcttgggtcgctggcgtcttgcagtgccttcgttcgtctgtggtgtgaggtgctggtccaggcttacgcgctaacagtgaattagaaggagaaaacgctctgcgagtgcagcggaagggaggaccctgtggctggagaaatcccgccgcgaacacccagcgaccaggtctacagcagcaccaggtctgtgcttccccctggtggtcacagattttactacacgcggcccacaagtaaaatgagtttctcttcagtggcccggttatcttctgtcgtgtaggaggaagtccagagccacggaaattcggtaaggatcggataagggcaataaaatcgcagctctaaatcttttcatggagttgaagacagacgtttgactgtgggagccatctcatctttataacctggtaaacaatgccagaataaaaacaacaaattcaatgtatttaagtcggtttcgacagtgaggaattaaaattaaatttatttaaactattttgacttttacccaagtttttcttacagttccatctcatttttccctccttacatagtttggggagtagagaacagtctatttttgactcctgtgtaactgacatggacacagaggcctgcggtcccttggaggattagtggcccacgcaggtgtgcagaccacgggtccctcaatcagaagcgggatgtgtggcagggagctttggagagctttcattttggattagtgatttcctgtcgacttttcctcgtttttgtcacagcacactcggaacatttctcatcagctgtgtacactatgtcaggcatttcaaatatgtttctggaagttgtcagtgctgttctctatgaggcctgaaggaaaaattcaatgtttgtagtaaataaagtacaaaaattatatcagctattaagaggatggattatttccaagttgcttagccatattggttgagcgttgaatgcagcaatgatgccaacatattaagcacaagaa

SEQ ID NO: 466027 - DNA, 433 bp, Homo sapiens
tctgagatccaggtagaaagaccaaaaggaaaattaagaacagactctcagacctgccttccctttgcattcaggttggtttcctttttacaactgcccaagtcatgagttcatagggcctggatggctgtaccggattgctctccagctggtctctctgcatccagaaatttctacaacctactggggtaaaatctttctcaaccctgcttttcatcatcacatcttaaatatctcgagttggttccctattgccaaaaaaaatccattgtccatgtagggttcttctgccgaaacgaggaaagagtgagttaaatgttggtaggtgatatagagatagtaattaggcaatataattcgatgttgttgaaagagctgagctatgaaatgcattgtgataaaggggctgcctgtgtaagtaaatgggtataat

SEQ ID NO: 466028 - DNA, 3766 bp, Homo sapiens
ctatcgtgacgctccatgctgtgatgggcagatgtcccaggctagccaaagaactccatcccctgggcctaatgactgattcagccaaggatgcagaatatgatcagaaatctggggccataagaagctggagcagcaaaacacattcacagtgcagccagcccttggctcccagaattcccaaaacaagtgtgctcccttcagaaatacagtccttggaaaagaatttatgccgacaactcatgcgcttaattgaaaatatgctcatagacctcctcgtactttttgagtcacaaaacatcagcaggctctctcatacagaaggaggagaaaacagagtgaaggatctaaaacctgaaaagaggccaaatgattcctcaaaaccacgcaagtacgaagtagcagagcggatctcaaatccaggtctccagtgtcagaaacgctgagtatcactaatctcaagaccttctctctgctatacgagctctggcagagcttgtctccaagggctagacaggaaaaaaaaaatctgggttcaattaaaatatatcaataaagagaactaaaaggagctccaaaacgttgctgcccttctgcgggctgtctgtgtgtaatgccggctccttcactcttttatggcaccatgattgtgttttaccctcccgactgttaactgccaactgttaactgttaactgcccaaggttgccctgctgatgtcatgcctgaccatatgacttgctccagccaatgaaatgtaagcagaagtgacatatgcagcatgacccgtggaagcttcgaagagctattgccaatttccaccctctctctggaaactgtcattagggttagggaaactgtcatgagatctgcatattttagatagaggctgcttgccttatttgggcacctaatgaaaaagacatggaggccaggtgcggtggctcatgtctgtaatcccagcactttgggaggccaaggcgagtggatcacctgaggtcaggagttcgagaccagcctgaccaacatggcaaaaccccgtctgtactaaaagtgcaaacacaaagggaactgcgtggcttgtttctacctgaacattgtcaagtgatttcatcctttgaaacacagttgtgaagtgtgtccagcagtctgagaacaagaagaagaagaaaatctaatccttcagggtgtctgtgtgccagccctgctctcagcacttcccatgtggaactcctttacttctcctaacaactccatgacatgggttagactgtgattgttcccatattgttggtagggaaactgaggcatgcaggtgttacagagctctctcaagtggcaagctttctgggtggttacagagtggcagagctggggtatcccatgatgtcaccacactgctatatggaaaagaacattaatcgagcacctacgtgcttgattctcttaattctgtgactgaactctcaaaacaccctgggttggtttcctttttacaactgcccaagtcatgagttcatagggcctggatggctgtaccggattgctctccagctggtctctctgcatccagaaatttctacaacctactggggtaaaatctttctcaaccctgcttttcatcatcacatcttaaatatctcgagttggttccctattgccaaaaaaaatccattgtccatgtagggttcttctgccgaaacgaggaaagagtgagttaaatgttggtaggtgatatagagatagtaattaggcaatataattcgatgttgttgaaagagctgagctatgaaatgcattgtgataaaggggctgcctgtgtaagtaaatgggtataatgaggtgtaaaactccctttctctctctctttctgcttcataagcctttctgcttctcaagtccagacctgctgtttttggggtttccttccaatttttttgctgcttccctggggccttggctcttgggcctgctgcctcttcccactctacacctttggattccttatctttggctccaccttattgctccattctccaaagacaaatccacaaggcataggattttacagaatatggggttacagaaacagcatagggaagtgtaaaagcctagaagcttcttacagacgcagccccttgtctgtagctcctgactcccacttaaatgtctgttggaagcaccctggggtagcagaacccagctcagaagatggggcttatccaccatgccttttcctaacctgacacccacccagataatcttttcaatatgcaaactagagcgtatcaccccctgctcagagcctttctgtgacctcccattttgcttcccaggactccttgctccttagccaggtctccaggtcctccgtgatcaggtctctgctcttctgcagcctcatctctgccattcttcaccttttgtgctccaacccaatctggttttcttctcatgctttgaacaccccaagtctgtctgcttcaggagcttcgtactggctaatcattcaccacagcatactcccatctatacggctggctcttatattatgggtctcagctaaaatgtcatcccttcaaagagaccttcttggaccacccccgccattctctatcctatttctctcttttattttctttgaagcacttacccactttcagaaactatctggcttgctcatgtgtttgtctctagattgtctacttcccctcctagactgtactctccacaagagagcaaagctgtgtctgttgcattcactgttgtcttcccagaagcaagcagcatgctggagaccctcaaatacatgtgaaatgaagggacaccttgtgttatttcacctgtttccacctggttcccaagtggcaagcttgcattgaggttacaaagtggcaaagctgggatatcacatgatgtcaccatgatgctatatgaaatgtaacattaattgagtacctatgtgaccagttctttaattctgtaagtgaactctcaaaaaaccctagagcactgcgtgttttgaaatatacaaatagtgggaaacgaaatctttgttctggatgcagttataatttggaaagcgaggaaataaattataacaaggggaaaaaacagacacagagggattgaaatgcataacaatagagatgaaacacgaagagtgataaatgaagattgagtgtgcacaccttctggaggagccctgattgagtattttaaaatactactaaagtcatgccgtgtgacttctgaagctagctcctaagaagtccttgcagcttctgcctgcgactcttagaacacttgctttgaaggatgccagatgctgtcttaaaagtctgagcactctgaaaccatcatgctgtgaggaagcccaagctaaccacatgggcaaaaaagatgccctctgactgccaccatttgagacactctaattaagaactgcctcattgagcccatgaggccctgtgaatgataataataaattgtttttaaccactatgtttttggatttgttataagtttatagataacaagaaaaagttatattagcatggtaataaaattatggatatgtgtaagtttggtgttttgtttcttttttttttttacactaagcctatattactgttgtaatttaggaaatcacttgttttcctccagcacttcaatgtaagagtggcactacttagaatgtacttcttaagatatggctgtacatagaacaaattattcaccatgatttccttagcatccaacagaat

SEQ ID NO: 466029 - DNA, 965 bp, Homo sapiens
tattccatgtgtcagtgaagggatgtggggttatggccacctacgtggccacctatgcaagatgacagtttcgctcatagttgagccgtccttgaagaacacccacgttcctcctgttgtttcttctggagtgcggaggcttcgctggggccgcgggcggcagctgacgggcgggcccttccggaggcgccgcgcctggaccgtggccgcaggttgggcagcgccagacgcagagccctgtgccgcttgcgtccccgggcttcctgcccgacaaggacggggggccggacagagagccgtgtcggccgagacccgaatccgggatcaggtttgtgtttctgtggacactgaggtggccacagcggcgctttctctacccaaacctcgcttcctctcgctgaaggggttccagtctcgatcatcagtgaagtccttccacatccatggggcgtccaccaactaggagcttaatcaacacaacgctgtggcctctccagctcagggacgtgcctttcccgtgtcttcttctcacacacaaacgtagcctgcaaggaagacttaagaggccaattaaaaataaaggtcacggcgcatggtgaggagttgctgttcgtaaccgacggaaaaggcttcatacgtgaacacggctggacaagcaaccagaacaggtgcttccccaggatgtccagaaacaagcagagaccgtgaaggacatttaacctcaccaccaattccatgtgtgcccatgaaaacaagattccattgttggctgacagattggcaaagattaatactagccaatgttagcaaagacatgaaaaaatgggccgttacggttcctgcttacttattaaacatttctgtgggccagtttggcaatttgaactgagcgtaactcttttgtactcaaggaactttactgctgatagcctcctgttaaccagaagcctaagcaataatacagt

SEQ ID NO: 466030 - DNA, 2792 bp, Homo sapiens
ctactttcctcctcacttctccagacatcctgctctttcaaccaccgttcctttgctcatgctattccttaggcctggaacagctgaaaaactctgattgtccctaattggatgacattccagaacactctcattagaaggatgcaggactctgattggccaggctcaagtctcaggcccacccctgaggaggaaatgcattctgcttttctaaatcctgactgtgtcaccctccacagctacccgctcccttccccagtgcttagcagctcggaccggttgccttttggcattgaggagaatgggggcacaccgttcctcaccgcagcttcaggaaggcatcaccaccagcaccagcatcagcatcagcaccagcaccactcaaactacagcctctcactgaccctggagaacaaagaggggcctctgaggtccccaaactccagcagcaagtcccttacaaaactgagtccaggaacacctgccttgttcagtgaagccgctgcccatctaaagaagctggaactggaaactgtgaaggctgctggaccctggcctcctctgcacatcaacataaacaaggctgaagaaaagaaagtctcggagaaaactcttcagactccacttttgccttcccctgttgcggatcatgtgaagtgtaacattctgaaagcccagttggaaaatgcttcccgagtgaacatccagggtggaaaggaggaatcaccgtttgtaaatatcaataagaaatccagtcttcaggacgctagtgtaagaagtcctattcctattcgtgtggaaactgcccagccagctgtggaaaagccggaaatcaagcctccccgaagtattggatcctgcaagctggacatctggtggacatctgtttgggaacccccaatccccatccctggtcttcccacccctgcccatcctccgtccactcctcacagcctgtttattattgtaatgagcagagcttcatgtgcttttagtaaccgcagtgatgaagacgacctccctccagacctggccgaggcagtgggagtgaccacatctacaaccacaaacaccacaacggccgccacacaagtctccgtgccgctgccgtcccccaaggtccagaatgtcagctcgcctcacaagtcagaaggcaaaggcctgctgtcccctggggccaagagcccctctgaccgaggaggtgcctttaccctggagccgggtgatcttctgatggatttcacagaagccactcctctggcagagcccgccagcaacccccactgtgcccactctcgctgttctcctccactctctctccccatgaaggaagagaccactggagtttgcatgtaccctccaatcaaaacgaggctgataaaaacattcccggttgatacaatgaacccgtttcctgatactttcaccacagggccacagtttactgcagacttcagagacagtaaattacagtgctgtcctggcccgacttccccgctgatcccagcagcgaccctgaggcctttgacagagaccgtctccacagtgcagaccatttacaccacccggaaacctgtttctctggcagccagtgcagagacactccggcaggaactggagagagagaagatgatgaaaagactgttgatgaccgaactgtgaaattctccccttgtcacctggaagatggcatggtgccttctgtccgtcttctttcttcgggctttgtgtgctcactctagcacagcatacaagtgtgtgctctgttcgcccaggtctccatggttagttgaagccaatttctggcttgacttttatgggaaaagttattttatgtctcctaagcattagagtttttctattactctatgtagttgagacaggatttgataagtctaggaaaagaaagatgggaaaacgggattccttttcagaagtacctgtgtgtatctgttaataaccacaggggttaatatgatgtaggatcttttactatcaatttcaaccatttgattttgtatgattgaaacttgcaccgagctttgactgtttgttaaagagtcatttttaatgaaagaataattctttattgctggtttttcatttacactgataaatacacagatcttataaagtctttaacattcatttgtattcagatgtgagtagaagaactaaaaaaagaaagttacatatcactatgactgaaggtacttcagcttaatctgaaatataatttaacttgtgaactccttggatatgatattatttggaataaacagaatttatcattgaacccaaagtaggaaatgatagcttacattgtctaaaaatccttacaaggttaagatgattcaatatcaagaagattcagaaaattatttctaaagttgatcgattcatgtcgtattgatagaatcttgaccagaagaaattttgctctttttatatagtttcaagaaatgtgtttttaaatttttattaatgcacttgaacaactttgcaggaataaagcaaccccctaaccacaaaatatccctctaaattagttccctagctttctcaatgaatacacacatatttttacatagctatgatcgttgtgtacattctcctttgttttacttctcggcctaacacttgtctcctcttgtcaacacagattctactctcaccaatttaaatgtctttatatccatgttacatgggtaacctcacttcaccccattattagatatttgagttatatctaatttttcactcttataaatagtgctgctatgaatgtctgt

SEQ ID NO: 466031 - DNA, 1176 bp, Homo sapiens
tcttttgttcccatggcagttttgtcttctttcagaagactgtgctccccatcatgcccaccagcgccgtgctgttccccgctgcacttcttgtgctgctttttgaatttgctccttcctcccagtttctgcagttcagcaactcaggctctggcagttctcctaatggcagcagcaacagcccttctcttacctcctggcttccagcattgcccccttggaagtgtgtcttccacttgcggctggatcccggagctccgctccttgtccagagggcagctcccagcccttctcagatggccgggctgctcttggccggggttgagcggtcctgcgccagctccttcagtgtggaggctttcagggagcacgggggagatcagctctgcctgtcggcccgccctgagctgaccacaagggtgtttgcaaaggaagggtgggggcctactcaatgtgaagacaataaggatgaagacctgtaagatgctccacttccactcagtcaatagtcaatatattttgttttccttatgattttcttaataatgttttcttttctcttgcttattttaccgcaagaatatcgtatttaatacatataaaatacaaaatatgttttaattggctgtttatgttattgtaatccaaataaatgttttcttttgtcattgaaacggagaccctaacagagcaagaggcctgaccttcacacctatgtaacccaaggtcacagaaatgctgaggggccatgtgactccagtgaagcaggagtatccatccagccacagagatgggacctgtccaaatgggacctgtctgttccaaaggttattctgcttgaaaatcaggccaggcatggtggctcacaactgtaatcccagcactataggaggccaaggcagatggatggcttgagcctaggagtttgagaccagcctgggcagaatagtgagaccctatttctacaaaaaatacagaaaaatcagccaggcttggtggcatgctcctgtagtccgagctactcggaaagctgaggtgggagagtcacttcagcctgggagatcaagactgcagtgagcagtgatgaaactactgcactccagcctgggtttcagagcaagtccctgtctcagaaagaaaaaaaaaagaaaaaagaaaacaagtcagtattttccc

SEQ ID NO: 466032 - DNA, 2798 bp, Homo sapiens
cccatgcacacttcacaggcacgtgcacacctcacccaccctatgcacacctcacagacccagcacacttcacaggcacgtgcacacatcacagaccgagcacatgtcacagacccatgcacaccccacagacccagcacgtgtcacagacccatgcacacctctcagacccatgcacacctcacagatccagcatactccataagcacatgcacacatcacagacccagacccagcacatgtcacagacccgtgcacacctcacagacccagcacatgtcacagacccgtgcacacctcacagatccagcacatgtcacagacccgtgcacacctcacagatccagcacacgtcacagacccatgcacacctcacagatccagcacatgtcacagacccatgcacacctcacagacccgtgcacacctcacagatacagtacacatcacaggcacgtgcacacctcacagacccatgcacacctcacagacccgtgcacacctcacagacctgtgcacacatcacagacccagcacacttcataggcacgtgcacacctcacagacccagcacatgtcacagacccatgcacacctcacagacccgtacacacctcacagacccagcacgtcacagacctatgcacacctcacagatccagcacacttcataggcacgtgcacacctcacagacccatgcacacctcacagacccgtgcacacctcacagacctgtgcacacatcacagacccagcacacttcataggcacgtgcacacctcacagacccgtgcacacctcacagacccagcacatgtcacagacccatgcacacctcacagacccgtacacacctcacagacccagcacgtcacagacctatgcacacctcacagatccagcacacttcataggcacgtgcacacctcacagacccatgcacacctcacagacccgtgcacacctcacagacctgtgcacacatcacagacccagcacacttcataggcacgtgcacacctcacagacccgtgcacacctcacagacccagcacatgtcacagacccatgcacacctcacagacccgtacacacctcacagacccagcacgtcacagacctatgcacacctcacagatccagcacacttcataggcacgtgcacacctcacagacccatgcacacctcacagacccgtgcacacctcacagatccagcacacttcataggcacgtgcacacctcacagacccatgcacacctcacagacccgtgcacacctcacagatccagcacacttcataggcacgtgcacacctcacagacccatgcacacctcacagacccgtgcacacctcacagatccagcacacttcataggcacgtgcacacctcacagacccatgcacacctcacagacccgtgcacacctcacagatccagcacacctcataggcacgtgcacacctcacagacccgtgcacacctcacagacccgtgcacacctcacagacccagcacacttcataggcacatgcacacctcatagacacattcacacctcacagacccagcacacttcataggcatgtgcacacctcacagacccgtacacacctcacagacccagcacgtcacagacctatgcacacctcacagatccagcacacttcataggcacgtgcacacctcacagacccatgcacatctcacagacccgtgcacacctcacagacccagcacacttcataggcacatgcacacctcatagacacattcacacctcacagacccagcacacttcataggcacgtgcacacctcacagacccagcacacttcataggcacgtgcacacattataggcacgtgcacacctcacagacccatgcacacctcacagacccgtgcacacctcacagacccagcacacttcataggcacgtgcacacatcataggcacgtgcacacctcacagacccatgcacatctcacagacccgtgcacacctcacagacccagcacacttcataggcacatgcacacctcatagacacattcacacctcacagacccagcacacgtcacaggcacgtgcacacttcacagacccagcgcacatcacaggcacgtgcactcactcacatctcacagcatcatcttacatgacggcttcaatcacaggccgccctgcaacgtcaaacaagcatgaaggctgctcccagggtttcgtttgttctattaatgctgaaagtggttaactttcagaaattgactgcactgtcttcttttcatttccccatagattggggaaacattcagcacatactgagtttggaaaccattctccagaaagcctccaaatgcatctggacaggaaggacagtgacagccaattcatttcccatcaaccttcctatcctttcttcttacctaagatctccacttctgcgcagcgtccagtccatcctttcacatggttggaaaaacaagctgaaattaggaccattttttcaaaaaagcaacaataaaaagaaaacacgcaagttggttttctgcccctctggaaactcaggctcaactacgactattctctatttgcttcaggcgcttcaggaaggaaagctgagtccacaacccagggttacgttctgtgcacatcctggtctgtctgccatctcgtgagctccctctcgtgctccccgagctatagacatttgtcagcttagggtggttcggtgtcaggaaggctcctgccaaatgcaacatgggtgtggaaacacagcataggatgggcc

SEQ ID NO: 466033 - DNA, 776 bp, Homo sapiens
ctccaagcaggagccgccgagtgattgatgggccccagcttgaatggaaagtccagattccagcaacacagcttaagagatgaaggttgcttgagcaggaaatccacccatggcccaaagaggaaagatccgctttaaatgcctgggcatatacttccaagaaccagatgtggcctgttccttacacctccctgggcttagatgacagcttgaactctgcggctgatggaattgagcagatgggaatgacctggaatctaacactctacaattcagacacaccactgtccacttgtccctcccttcctgccactggccctgccagcgtaccttgtgtacttcgcaaaggtcactggctcctgttttatgtaatgactgacagacgatctcgcccagctcagcaatgtgaacagacaccttgcatggtgccggtggtgggtgcggttgtttctggatgtcatggaagaggctggggcataccagggctttccccaattgtgcctaaaataaattggctcttgggaggtttctgtgtgcctctgacggttctcgaaaccaactttcttacctatgggaaaacacatcctggtgaagcaaaggtcgtggagggcaccgagtctccttcccggagtgaatagggcctttctcagcataatcaggaggggccctcaaaccaggtggttttctgggcgttggaacagctcaatgccgaggccacaggtgctctctcaaggctacctgttgacggaatgaggaaacctgcaaaaagagtggcc

SEQ ID NO: 466034 - DNA, 3347 bp, Homo sapiens
caggcagtaacaggggttgtctctgggtgggtccctgtctgcattataatcacctgttcatattcaaattaagcacattccatgcacaggcaattcaagtacatgcgtgttgggaagcaccggtggcctcacccaaggctccgcatttgggtgtttgtgtatttcccccctccctgccttgcatgatcggggccactgcactgtcggtcagtatggggcggccctcacactacgccagccagtgcaggtccctggacaaggtgggccccactgggagttgacggacggcagaacatgacggagatgcgcaggaatggcaaagtacgaggggaaaacagacagtgggatatggtgaaaccgtgacggttggtgaatgagactttgatccaatgacattaaagcagatgagccacccaaaactaatatacagtgtctactgcagaagacgtgtgctcttcaccagtctgtggaccaggaaacgagccgctggggatctcagtcgcaagggtgctcaggtggccttggtgcagacactcacagctctcagactgcagagtgtgccggtcctcggagaaggggtgtccttcagggcagtgcttctctggctgatgccacagactggctagtggatggccagactcatcacactgacacccctgttcacctaaaccagatacaaccccttcctgatgcatctgttggtgccaaatcttttttttttttttgtagctttttattattaaaacagtcactgcaattatcaggagtcgtctaatgtacagtgactgctattcctattgctggtgagtgagaatattaataccatctgtagtagtgagacagcaaatatttcccgcctcacaggtgccctggtattttagtgcagaaaatattcttacagttccctggaaagcacgctttataaactcttacacattttcaaaataaagattttttaaaataaacctttttgtctctgacggattttaagtctcataacatgagacgtcagccttgctgcgatacgcagcaccacaccagaagcctccagcaagcgctgtgttctgctgtggttctgagcagcctcgtagtgccatgcagtgctcttcagacatacgctggggctcagggctgtgggcctcagagcacagggagggggcaggtccccatggggaggagcagctgcccctgcacctgcatctaactgacatggatgttggctccccacactgtgagcacctgggtgtttctggctcctttactgctgaaatttaggacagacccaatcgacttagagagctgtctcaggactccttgacaaaccaaatggaggaaggaggggaacagctggcaggccacgtatccctgcaccatagaaaggagggcccaggacaccctggaggacagacacctcctggtaaactcaacaggaaaatccacctcccgggacgcatccccttctcctcgctgccctccctgctgggaagaccctgtcctcaggcggtccatgcgccctggaacgtgggcgtggggacacgggtggtgcagagctgccactggcctagcctcctggcgaaggggcaagctggttcgtggggaccacccgaaggcctggagggatttgggctgaagcccaggccgctcagcgggagtgtgtgctgtggagtccctggtgcagaggctgatgctgaccgtcctgagttcgtggacgagtccacgggtcctgccagcacacctcagcatcgccggtgtttcagcaaagaatccaaagaagaacaggaccatcgcgagccactttccgcctcttcatccccgtccactgaggaaatccaccgaagccctttcacgggaccacggctgtgccatctgggtgagctgggctggcaggtaccccgaaaagcacacagggaatccacaggaaatccacctcagccagggacatatgcacaccccccacatcctgaaggcaactgcagctctcagagaccgagaaacacacaccacaccgcccccaccatggagatcggtggcctcgttcttccggtagcttccaaactcctgtttgatcatgatggtctgtctcttgtgtggcctgacacggttgcccagaggcacgaggaaacagtcgccctgaggcagggcgtgggccgtctgcacacgacggagaatgaaagagaattcaaggagagcggtacagctgggactcggggagttagcgtacttcaaacccaattctgtgatctgagccttctgaggcatccgcagcgccgtctcggcactggcaggggagggcaggggcggccgaggtggcagcgagtcctcgggaactgtgggtgggacctggtgttccccacagtggcagctccactcagggccaggcagcagtcccgccgtcacagcgccctcgggaggctcggtggccttgaagccagctgcccccagaggaggggtgccctgtgctccaggtggggacagagctggggtgagagaacccagactcagaataggatcgttctcgtgatcgtcaagggctgccacgtgcggaatgaggagtggtctcctgctgtgggcaggcctgggggcctcctccaccccgaccttcaggaaccccagattctggtgaaagggcaccgctgcgagagggaggcgggcgccggtcatgggaagggcggggggggtgcagcgaagcagacacattttccctggaggactggggctggcgggaagcgtctctcaactccattccctcatcttcgcagcaggggccggcgtgccgcctcttcagtggttctgtcagtgacacagatgcattgtgtcaaagtgaaaattgctctgggcaaagctcgactggcaaggaggactccaattaaagcttgcgtgggggagacaggcccgaactcagccagagctcagctccccttgaacgaaggacgagagggcttctcagagctggagagagaggggacgctgtgcatttacagcctcattcataactcccaagcccagcacgtgcctgtggagcaggcggaattccaaaagtccaggcacaccctgctgggggccgcagaggacagtgggatcgttgtcacctcccctctagagctgctttcaccattctaaaacatcaggaaaggcatagctcacatgttgctaagaaaaagcattttggaaggtaattgtggttgctatgcatggaaactatgctacgtcttagttttgtaacaaagagtgtttaatgcgtgtctcatttaaaacggttccctattgcagcacgtccttcactgcagttcagaaaatcactctgttgtgtatttacggtgtatttggattaaatatcaagattgtat

SEQ ID NO: 466035 - DNA, 519 bp, Homo sapiens
actctctaattaccaccgctacaggactagtgacacaatagtcctttcccaaaaggagcacctcccagtcactcagattgtgatgacagacgcaggccaaccacattccgaagcagattatacactggggccactgctctgctgcggagatacaagacttctgaaagtatggagaagagaaagtgtgatttttgaaatattcccttctctttttgggagactgagatgggaggatggcttgagccaaggagttcaacacaagcccggacaagatgagtcattttggaattcagcttccttcaacactgagacttcataccttcatttccctgctttccacggagaactcactgctgacgtgtgcttcttttttaagaccacagtttcctctggggtgtttatggagaacctggggatcacagacttcatcaggattgagctgcggggtaggctggccactctggacaagtcacagggtacccattatttagcaataaaagctttaactcaacaaaatgg

SEQ ID NO: 466036 - DNA, 989 bp, Homo sapiens
aaatggttatgttttgcaagttcgccagccagcctggggaaagacgggtccttagctgtgtactcagcagtgggagacagcggccagaggctgagatccaaccctgctcaaggcagaggtgggtcatggtattcaggccaggcctccagaaggtcacactacctcttggtgacactctgtgtcaggtgctgaaatgcaaacctttggacactgactcaacatctggagatattttttctggttcttttggctggtgttctcctacagctctctacgagcagtcttgtgaagcccacaagcaccgagggaacccatccgggctttactatattgatgcagatggaagtggccccctgggaccatttcttgtgtactgcaatatgacagactccgcgtggacggtggtgcggcacggtggccccgacgcggtgaccctccgaggtgcccccagtgggcacccgcgctcggctgtgtccttcgcgtacgcagcgggcgcggggcagctgcgggccgcggtgaacctggcggagcgctgagggcagcggctggctctgctctgcgggacagcgcggcgcccggactcacaagatggaaccccactgagctggtgtgttggaagaaccaatgaaacacacacttactggggaggttctctgcctgatgctcaaaagtgtacttgtggattagaggggaactgcattgattctcagtattactgcaactgtgatgctggccggaatgaatgagtcattttggaattcagcttccttcaacactgagacttcataccttcatttccctgctttccacggagaactcactgctgacgtgtgcttcttttttaagaccacagtttcctctggggtgtttatggagaacctggggatcacagacttcatcaggattgagctgcggggtaggctggccactctggacaagtcacagggtacccattatttagcaataaaagctttaactcaacaaaatgg

SEQ ID NO: 466037 - DNA, 832 bp, Homo sapiens
aaatggttatgttttgcaagttcgccagccagcctggggaaagacgggtccttagctgtgtactcagcagtgggagacagcggccagaggctgagatccaaccctgctcaaggcagaggtgggtcatggtattcaggccaggcctccagaaggtcacactacctcttggtgacactctgtgtcaggtgctgaaatgcaaacctttggacactgactcaacatctggagatattttttctggttcttttggctggtgttctcctacagctctctacgagcagtcttgtgaagcccacaagcaccgagggaacccatccgggctttactatattgatgcagatggaagtggccccctgggaccatttcttgtgtactgcaatatgacagactccgcgtggacggtggtgcggcacggtggccccgacgcggtgaccctccgaggtgcccccagtgggcacccgcgctcggctgtgtccttcgcgtacgcagcgggcgcggggcagctgcgggccgcggtgaacctggcggagcgctgagggcagcggctggctctgctctgcgggacagcgcggcgcccggactcacaagagtcattttggaattcagcttccttcaacactgagacttcataccttcatttccctgctttccacggagaactcactgctgacgtgtgcttcttttttaagaccacagtttcctctggggtgtttatggagaacctggggatcacagacttcatcaggattgagctgcggggtaggctggccactctggacaagtcacagggtacccattatttagcaataaaagctttaactcaacaaaatgg

SEQ ID NO: 466038 - DNA, 491 bp, Homo sapiens
acatccaacctttgaatgtattttgactaggtaatttttttctcctttgttaataaaaatagatttaattttttaaatgtcattttttttgcatctcatcaaatatactgtcatacactataaaaatgatgttgggtcatatgtatcacatgtctgtaattcagaaatgcaaacctttggacactgactcaacatctggagatattttttctggttcttttggctggtgttctcctacagctctctacgagcagtcttgtgaagcccacaagcaccgagggaacccatccgggctttactatattgatgcagatggaagtggccccctgggaccatttcttgtgtactgcaatatgacaggtatgttgataatcgttagatgcatagatcagaatagaccaaggagaaatttacctagttggcagcattattaaaacatgcagtttgatagtgtgtacttgctaagtagaagcattaaatatgtatttatt

SEQ ID NO: 466039 - DNA, 2021 bp, Homo sapiens
aaatggttatgttttgcaagttcgccagccagcctggggaaagacgggtccttagctgtgtactcagcagtgggagacagcggccagaggctgagatccaaccctgctcaaggcagaggtgggtcatggtattcaggccaggcctccagaaggtcacactacctcttggtgacactctgtgtcaggtgctgaaatgcaaacctttggacactgactcaacatctggagatattttttctggttcttttggctggtgttctcctacagctctctacgagcagtcttgtgaagcccacaagcaccgagggaacccatccgggctttactatattgatgcagatggaagtggccccctgggaccatttcttgtgtactgcaatatgacagatgctcagggtcaccgcctggaaagtgctgttagaagctcaaggcctctgattcctctgggcttggtcactgatggagaagctgacataattaaaccactttattttaatagagctgcttcctatcatacctgtgagtctgctttgcctcttgctgctggcctctgccgcccagtgatgcctctcctttgcccgtttctgctcagcagactccgcgtggacggtggtgcggcacggtggccccgacgcggtgaccctccgaggtgcccccagtgggcacccgcgctcggctgtgtccttcgcgtacgcagcgggcgcggggcagctgcgggccgcggtgaacctggcggagcgctgagggcagcggctggctctgctctgcgggacagcgcggcgcccggactcacaaggactagtgacacaatagtcctttcccaaaaggagcacctcccagtcactcagattgtgatgacagacgcaggccaaccacattccgaagcagattatacactggggccactgctctgctgcggagataagtcattttggaattcagcttccttcaacactgagacttcataccttcatttccctgctttccacggagaactcactgctgacgtgtgcttcttttttaagaccacagtttcctctggggtgtttatggagaacctggggatcacagacttcatcaggattgagctgcggggtaggctggccactctggacaagtcacaggctcccacagaagtgacattttccttcgatgtggggaatggaccttgtgaggtcacggtgcagtcacccactccctttaatgacaatcagtggcaccacgtgagggcagagagaaatgttaaaggagcgtctcttcaagttgatcagcttcctcagaagatgcagcctgcccctgctgatgggcacgttcgtttacagctcaacagccagctcttcattgtgtttccgttgtaggtggaacggccaccagacagagaggctttctaggatgcattcggtctctgcagttgaatggggtggccctggatctggaagaaagagccacagtgacgccaggagtggagccagggtgtgcaggacactgcagcacctatggacacttgtgtcgcaatggagggagatgcagagagaaacgcaggggggtcacctgtgactgtgccttctcagcctatgatggaccgttctgctccaatggtaagtgtgaccaaggagcaggttatagggaaagtacatgaaacttaaatagtatgaagaatgcttctggcatttgatattataaagagaggataagattgaattatttgaaatggaataatttctgtaccaaattcctctattgaatttagaagggatatgactgtttttgaaaacttaaggctatcagtcctctctgggtttcttatttagaagatctctgggttaccccagcatctgttcaatgctaatcctctcgaaataatttggttttcaaaactctgtccttgtactgttctaattttaacatcagtaaagcatcattcttatttttgtttttaatttttagagacaacgtattgctattcaagcctctctgttgcccaggccggacttgaactcctaggcttgagcaatcgtctt

SEQ ID NO: 466040 - DNA, 1325 bp, Homo sapiens
aaatggttatgttttgcaagttcgccagccagcctggggaaagacgggtccttagctgtgtactcagcagtgggagacagcggccagaggctgagatccaaccctgctcaaggcagaggtgggtcatggtattcaggccaggcctccagaaggtcacactacctcttggtgacactctgtgtcaggtgctgaaatgcaaacctttggacactgactcaacatctggagatattttttctggttcttttggctggtgttctcctacagctctctacgagcagtcttgtgaagcccacaagcaccgagggaacccatccgggctttactatattgatgcagatggaagtggccccctgggaccatttcttgtgtactgcaatatgacagatgctcagggtcaccgcctggaaagtgctgttagaagctcaaggcctctgattcctctgggcttggtcactgatggagaagctgacataattaaaccactttattttaatagagctgcttcctatcatacctgtgagtctgctttgcctcttgctgctggcctctgccgcccagtgatgcctctcctttgcccgtttctgctcagcagactccgcgtggacggtggtgcggcacggtggccccgacgcggtgaccctccgaggtgcccccagtgggcacccgcgctcggctgtgtccttcgcgtacgcagcgggcgcggggcagctgcgggccgcggtgaacctggcggagcgctgagggcagcggctggctctgctctgcgggacagcgcggcgcccggactcacaagatggaaccccactgagctggtgtgttggaagaaccaatgaaacacacacttactggggaggttctctgcctgatgctcaaaagtgtacttgtggattagaggggaactgcattgattctcagtattactgcaactgtgatgctggccggaatgaatggactagtgacacaatagtcctttcccaaaaggagcacctcccagtcactcagattgtgatgacagacgcaggccaaccacattccgaagcagattatacactggggccactgctctgctgcggagataagtcattttggaattcagcttccttcaacactgagacttcataccttcatttccctgctttccacggagaactcactgctgacgtgtgcttcttttttaagaccacagtttcctctggggtgtttatggagaacctggggatcacagacttcatcaggattgagctgcggggtaggctggccactctggacaagtcacagggtacccattatttagcaataaaagctttaactcaacaaaatgg

SEQ ID NO: 466041 - DNA, 1498 bp, Homo sapiens
aggcctggttcatctggctggtggcccaccagtggaatggattccctggatcctctcacgaccatggaccctctaagatccctgcatgcagtattgtgggctgattatttgccttggaaccaaccaaggcgagagccacttcgtctggaacacaaataccagccggcatcagtcaggtttgataacagaaccacacaccaggacgattaccccataaaaggccttgtgaagaccataagctgtaaacctctggccatgccaaagctctgtaacatccccttggaggatgtgactaactacaagatgagctatgtggcccaccccgtggagaagcgctttgtgcatgaagcagagaagttcaggccctgtgaaatcccctttgaaagccttaccactcaaaaacaatcctaccggggcctgatgggggagcctgccaagagcttgaaacctctagccaggcctcctgggctagacatgcctttctgtaacaccactgagtttcgagataagtaccaagcttggccaatgccccggatgttctccaaagctcccatcacctacgtccctcccgaagacaggatggatcttctgacaacagtgcaggcccattacacatgccctaagggtgccccagctcagtcctgccgacctgcacttcagattaagaagtgcggtcgctttgaaggctcttccaccaccaaggatgactacaagcagtggtccagcatgcgcacagagccagtcaagcccgttccccagctggacttgcccaccgagcccctggactgcctgaccaccactcgggcccactatgtgccccacctgcctatcaataccaaaagctgtaagcctcattggtctggccctcgaggaaatgtccctgtggaaagccagaccacctacaccatcagctttactcccaaggaaatgggcaggtgcctagcttcatatcctgagcctcctggctacacctttgaggaagtggatgctttgggtcacaggatatacaaaccagtttcccaggcaggctctcagcagagcagccatctttctgtagatgattcagaaaaccccaaccagagggagttggaagtgttagcctgattttgaaaaatagtaatttagaaattacacagtacttttaaaagcagacaactgagaattatttgttggacaaaaaagaattccctaaaatgacaaaaaacaaaaaacaaaaaaccttcaccacttccagagcacttgaataaaatgagaatcacttgactcagggaaaatgacatttaatcaccggctaattaactccccttaccttctcctttactgcatccccaccccgtttcaggtcctttactttgtgcttatggaatcaaagttggtctgtgaggttttctctgatccagatgtattttattaatttaatcattgtatgaactgacataatgattaacccttgccaagtatgaagcgccaaagaataaattttattttggggggaatg

SEQ ID NO: 466042 - DNA, 1266 bp, Homo sapiens
atctctgtagccatcactgagaaatctggattttcaagggcctttctctctgttgcccaggctggagtttagcgactcaatcatggctcactgactgcagcatcgacctccggggctcaagtgatcctttcatctcagcctcctcagtagctgagactacagacatggataaaagaaatccctgtaaaaggcagcttaactggatgtttccctccaatggcaaagtgactctcaatgggccaagagatctcattatgttacccaggctggtctcaaactcctgggctcaagcaatccttctaccttggcctctcaaagtgctgcagttacagatgtgagccactgtgcctggcctgatgttaatttataatgctttcctatgaataaactgttaaaacactttagtcaatgtatccaaatctgattggtggcctaaaactgaaccaataaaagataattgcaaatatatttcttattgaaatctccctttcccccaaaggttaagaggattgaggacatttctgaaaaaggaggagtagatagtcaaaatctaggtggaggttgtgtatttgctgattgatgcatttcagaccataatggagaagaccactttgttcattaacaaacgtttccatatcagtgcctgccttttgtggctcatgctgtccatccctgacattttctgccccctctttctttctctcaccccccttgttgtgtactaaatcctttctgcctttaagtgtcactccaaaaccagcttcctgcatgaagccttctcagattcccccttctcccagtttggcttgttctcccacaacaatgctctgatgcactatcttattttaccttcatgaatttctacaacatgcatctgtctccttcactaaattataagctccttgagggcaggactgctcttcttttactgtgtgtccctccttcgttactgaacaatctttatacatctcttgggcaaacacatatatcttaaatctgattgtttacattgctcatgagtataattgttaaatataattgtgtgataaatgtaccaggaagtggatcccctggtctaattgccttgcgaagtattctttcttctctctggggtgaaataagtcaattatattgaaagttagaattgttaaaaagtttataactagtaagggtgattagaagccctaaattcagcaaatgttcagcaaagtatttggtgtttactaggtatctagtatcatgctagtgatgaactaaatagtcact

SEQ ID NO: 466043 - DNA, 1757 bp, Homo sapiens
aacagctgctcacagctcaacttggggatttcaggccacagaatgggggtggttctgtggcagcttaacttcagggatgaagaggcacccatagctccatgcccctggagcaagacacactccaacatagttccagttccaaaatggcataacacagtagccatgcaggccactggggaagctctcgggcctgcatggtgtttacacacacacaaaaataatggcttctcttcagttctacctgcaggtgtcacagtaacagctcttattattcatggcaagaagtactggaatggtggtgtcccaataaggtgccatgttcagagagtggtgaaagctaaagctgaccttataagacctgggaaaaatgagtacgcatcctgtctgagagcaataatatcatgctgtacatacagtaaagtcaggggtttcctctgggaagaggcacataactccaagaaactcaagagggaaatcagggtgacatttataggatactgacctcgtacagacagggtcctttcatgcataactattagcttcattatgtaagagccacctagagtgtagaagagcaataagattaaaagatattgttgttttaattttcactttgcatggtcactttacgttgtccacacaacttattaaagacatggataaaagaaatccctgtaaaaggcagcttaactggatgtttccctccaatggcaaagtgactctcaatgggccaagagatctcattatgttacccaggctggtctcaaactcctgggctcaagcaatccttctaccttggcctctcaaagtgctgcagttacagatgtgagccactgtgcctggcctgatgttaatttataatgctttcctatgaataaactgttaaaacactttagtcaatgtatccaaatctgattggtggcctaaaactgaaccaataaaagataattgcaaatatatttcttattgaaatctccctttcccccaaaggttaagaggattgaggacatttctgaaaaaggaggagtagatagtcaaaatctaggtggaggttgtgtatttgctgattgatgcatttcagaccataatggagaagaccactttgttcattaacaaacgtttccatatcagtgcctgccttttgtggctcatgctgtccatccctgacattttctgccccctctttctttctctcaccccccttgttgtgtactaaatcctttctgcctttaagtgtcactccaaaaccagcttcctgcatgaagccttctcagattcccccttctcccagtttggcttgttctcccacaacaatgctctgatgcactatcttattttaccttcatgaatttctacaacatgcatctgtctccttcactaaattataagctccttgagggcaggactgctcttcttttactgtgtgtccctccttcgttactgaacaatctttatacatctcttgggcaaacacatatatcttaaatctgattgtttacattgctcatgagtataattgttaaatataattgtgtgataaatgtaccaggaagtggatcccctggtctaattgccttgcgaagtattctttcttctctctggggtgaaataagtcaattatattgaaagttagaattgttaaaaagtttataactagtaagggtgattagaagccctaaattcagcaaatgttcagcaaagtatttggtgtttactaggtatctagtatcatgctagtgatgaactaaatagtcact

SEQ ID NO: 466044 - DNA, 3579 bp, Homo sapiens
gctgcgccgcagctccctctagtggcactcttgatttagctaaaggaaacgtggagcatcccattggccatcctccccactctccaattcggctccagaggcccctccagactataggcagctgcccctttaagcgtcgctactcctcccccaagagcggtggcaccgagggagttggggtggggggaggctgagcgctctggctgggacagctagagaagatggcccaggctggggaagtcgctctcatgccttgctgtcccctcccctgagccaggtgatttgggagaccccctccttccttctttccctaccgccccacgcgcgacccggggatggctccgtggcctcacgagaacagctctcttgccccatggccggacctccccaccctggcgcccaataccgccaacaccagtgggctgccaggggttccgtgggaggcggccctagccggggccctgctggcgctggcggtgctggccaccgtgggaggcaacctgctggtcatcgtggccatcgcctggactccgagactccagaccatgaccaacgtgttcgtgacttcgctggccgcagccgacctggtgatgggactcctggtggtgccgccggcggccaccttggcgctgactggccactggccgttgggcgccactggctgcgagctgtggacctcggtggacgtgctgtgtgtgaccgccagcatcgaaaccctgtgcgccctggccgtggaccgctacctggctgtgaccaacccgctgcgttacggcgcactggtcaccaagcgctgcgcccggacagctgtggtcctggtgtgggtcgtgtcggccgcggtgtcgtttgcgcccatcatgagccagtggtggcgcgtaggggccgacgccgaggcgcagcgctgccactccaacccgcgctgctgtgccttcgcctccaacatgccctacgtgctgctgtcctcctccgtctccttctaccttcctcttctcgtgatgctcttcgtctacgcgcgggttttcgtggtggctacgcgccagctgcgcttgctgcgcggggagctgggccgctttccgcccgaggagtctccgccggcgccgtcgcgctctctggccccggccccggtggggacgtgcgctccgcccgaaggggtgcccgcctgcggccggcggcccgcgcgcctcctgcctctccgggaacaccgggccctgtgcaccttggtcccgggcccggctttccttgccctgaactggctaggttatgccaattctgccttcaacccgctcatctactgccgcagcccggactttcgcagcgccttccgccgtcttctgtgccgctgcggccgtcgcctgcctccggagccctgcgccgccgcccgcccggccctcttcccctcgggcgttcctgcggcccggagcagcccagcgcagcccaggctttgccaacggctcgacggaagcaaaggagggcgagcgggccgtcgttcctcacccaaggacccaaggtgcgccaccggaaagcgctgcggtgtcccgaggactctcgcctcgcctgcgcctctgcactggggctgccaaggttccaggaagaggcaggactgcccggcccagccttggaggaagacttctgggcagaagcggaacacaggagcagagacacatagtcttggctccagtttcgtttcagttatgcccaccctttcagtgttcatggatgtgcccctcgcccacaagctagagggcagcttgttaaagacctacaaacaagatgattacccgaacaagatattcttagcctatagaggcaccttcccacagccccatggagtccaggagagatttgtttgcaggctgtctgcagagctcagccctgggggcccaaaccaggcatctggagctccctctgtggttttcctcacagtctgcatgacaaatgaaggccatccctgggtttctctcgtggtgcagaagactcgactacagatttcacaggatccctccctgaattatgagtacttgcccaccatgggcctgaaatcattcatccaggcctctctagcactcctctttggaaagcacagccaagccattgtggagaacagggtagggggtgtacacactgttggtgacagtggtgccttccagcttggcgtccagtttctcagagcttggcataaggatgctcgtatagtttacatcatctcttctcaaaaagcagatcccacatggctgtgtccttgtgatggggaacattatcgactgcaagttgacaccaagtgggtgggcaaagttgatgtccatgataaagagcaagcagatattcccattttttgatattccctgtcaaggtttatacaccagtgacttggaagaagatactagaatcttacaatactttgtgtctcaaggctttgagttcttctgcagccagtctctgtccaaaaattttggcatttatgatgaaggagtggggatgctagtggtggtggcagtcaacaaccagcagctgctgtgtgtcctctcccagctggaaggattagcccaggccctgtggctaaacccccccaacacgggtgcacgtgtcatcacctccatcctctgcaaccctgctctgctgggagaatggaagcagagtctaaaagaagttgtagagaacatcatgctaaccaaggaaaaagtgaaggagaaactccagctcctgggaacccctgggtcctggggtcacatcaccgagcagagtgggacccacggctatcttggactcaactgtaagggtctagggggctggtgtcccccctttctgacctttggcctgtatttgagcattaaacttcactgactaggtgaccagttcctagcttcactccagattttgattctgtcctctggaaaatgggctgctttaaagacacttctggacccccagaagtaccgacactccctatccttcataaaccagcctgggtgcccggtgcagtggctcatgcctgtaatcccaacactttgagaggccgaggcgggtgggtcacctgaggtcaggagttcgagaccagcctggccaacatggtgaaaccccgtctctactaaaaaataaaatatgaaaattagccgtgcatggtggtgcatcctgtaatcatagctacttgggaggttgaggcaggagaatcgcttgaacctgggaggcgaaggttgcagtgagccaagattgcaccattgaactccagcctgggcaacaagagcaaaactccatctcaatcaatcaatcaataaaaaaataagaaaataaaccagcctgggctagaggagaattcgagatggccagtctcgagatctgagaccttgtcatgattttagcccagcaggtggaatacctggtcaggaagaagcacatctatatccccaagaacggtcagattaacttcagctgtatcaatgccaacaacataaattacatcactgagggcatcaatgaggctgtcctcctcacagagagctcagagatgtgtcttccaaaggaaaaaaaaacactgattggaataaaactttagtctttgcaaaaatcttgtgctgattattcatt

SEQ ID NO: 466045 - DNA, 3572 bp, Homo sapiens
gctgcgccgcagctccctctagtggcactcttgatttagctaaaggaaacgtggagcatcccattggccatcctccccactctccaattcggctccagaggcccctccagactataggcagctgcccctttaagcgtcgctactcctcccccaagagcggtggcaccgagggagttggggtggggggaggctgagcgctctggctgggacagctagagaagatggcccaggctggggaagtcgctctcatgccttgctgtcccctcccctgagccaggtgatttgggagaccccctccttccttctttccctaccgccccacgcgcgacccggggatggctccgtggcctcacgagaacagctctcttgccccatggccggacctccccaccctggcgcccaataccgccaacaccagtgggctgccaggggttccgtgggaggcggccctagccggggccctgctggcgctggcggtgctggccaccgtgggaggcaacctgctggtcatcgtggccatcgcctggactccgagactccagaccatgaccaacgtgttcgtgacttcgctggccgcagccgacctggtgatgggactcctggtggtgccgccggcggccaccttggcgctgactggccactggccgttgggcgccactggctgcgagctgtggacctcggtggacgtgctgtgtgtgaccgccagcatcgaaaccctgtgcgccctggccgtggaccgctacctggctgtgaccaacccgctgcgttacggcgcactggtcaccaagcgctgcgcccggacagctgtggtcctggtgtgggtcgtgtcggccgcggtgtcgtttgcgcccatcatgagccagtggtggcgcgtaggggccgacgccgaggcgcagcgctgccactccaacccgcgctgctgtgccttcgcctccaacatgccctacgtgctgctgtcctcctccgtctccttctaccttcctcttctcgtgatgctcttcgtctacgcgcgggttttcgtggtggctacgcgccagctgcgcttgctgcgcggggagctgggccgctttccgcccgaggagtctccgccggcgccgtcgcgctctctggccccggccccggtggggacgtgcgctccgcccgaaggggtgcccgcctgcggccggcggcccgcgcgcctcctgcctctccgggaacaccgggccctgtgcaccttggtcccgggcccggctttccttgccctgaactggctaggttatgccaattctgccttcaacccgctcatctactgccgcagcccggactttcgcagcgccttccgccgtcttctgtgccgctgcggccgtcgcctgcctccggagccctgcgccgccgcccgcccggccctcttcccctcgggcgttcctgcggcccggagcagcccagcgcagcccaggctttgccaacggctcgacggaagcaaaggagggcgagcgggccgtcgttcctcacccaaggacccaaggtgcgccaccggaaagcgctgcggtgtcccgaggactctcgcctcgcctgcgcctctgcactggggctgccaaggttccaggaagaggcaggactgcccggcccagccttggaggaagacttctgggcagaagcggaacacaggagcagagacacatagtcttggctccagtttcgtttcagttatgcccaccctttcagtgttcatggatgtgcccctcgcccacaagctagagggcagcttgttaaagacctacaaacaagatgattacccgaacaagatattcttagcctatagagtctgcatgacaaatgaaggccatccctgggtttctctcgtggtgcagaagactcgactacagatttcacaggatccctccctgaattatgagtacttgcccaccatgggcctgaaatcattcatccaggcctctctagcactcctctttggaaagcacagccaagccattgtggagaacagggtagggggtgtacacactgttggtgacagtggtgccttccagcttggcgtccagtttctcagagcttggcataaggatgctcgtatagtttacatcatctcttctcaaaaagaactgcatggactcgtcttccaggacatgggctttacagtttatgaatactctgtctgggaccccaagaagctatgcatggaccccgacatactcctcaatgtggtggagcagatcccacatggctgtgtccttgtgatggggaacattatcgactgcaagttgacaccaagtgggtgggcaaagttgatgtccatgataaagagcaagcagatattcccattttttgatattccctgtcaaggtttatacaccagtgacttggaagaagatactagaatcttacaatactttgtgtctcaaggctttgagttcttctgcagccagtctctgtccaaaaattttggcatttatgatgaaggagtggggatgctagtggtggtggcagtcaacaaccagcagctgctgtgtgtcctctcccagctggaaggattagcccaggccctgtggctaaacccccccaacacgggtgcacgtgtcatcacctccatcctctgcaaccctgctctgctgggagaatggaagcagagtctaaaagaagttgtagagaacatcatgctaaccaaggaaaaagtgaaggagaaactccagctcctgggaacccctgggtcctggggtcacatcaccgagcagagtgggacccacggctatcttggactcaactgtaagggtctagggggctggtgtcccccctttctgacctttggcctgtatttgagcattaaacttcactgactaggtgaccagttcctagcttcactccagattttgattctgtcctctggaaaatgggctgctttaaagacacttctggacccccagaagtaccgacactccctatccttcataaaccagcctgggtgcccggtgcagtggctcatgcctgtaatcccaacactttgagaggccgaggcgggtgggtcacctgaggtcaggagttcgagaccagcctggccaacatggtgaaaccccgtctctactaaaaaataaaatatgaaaattagccgtgcatggtggtgcatcctgtaatcatagctacttgggaggttgaggcaggagaatcgcttgaacctgggaggcgaaggttgcagtgagccaagattgcaccattgaactccagcctgggcaacaagagcaaaactccatctcaatcaatcaatcaataaaaaaataagaaaataaaccagcctgggctagaggagaattcgagatggccagtctcgagatctgagaccttgtcatgattttagcccagcaggtggaatacctggtcaggaagaagcacatctatatccccaagaacggtcagattaacttcagctgtatcaatgccaacaacataaattacatcactgagggcatcaatgaggctgtcctcctcacagagagctcagagatgtgtcttccaaaggaaaaaaaaacactgattggaataaaactttagtctttgcaaaaatcttgtgctgattattcatt

SEQ ID NO: 466046 - DNA, 2270 bp, Homo sapiens
gctgcgccgcagctccctctagtggcactcttgatttagctaaaggaaacgtggagcatcccattggccatcctccccactctccaattcggctccagaggcccctccagactataggcagctgcccctttaagcgtcgctactcctcccccaagagcggtggcaccgagggagttggggtggggggaggctgagcgctctggctgggacagctagagaagatggcccaggctggggaagtcgctctcatgccttgctgtcccctcccctgagccaggtgatttgggagaccccctccttccttctttccctaccgccccacgcgcgacccggggatggctccgtggcctcacgagaacagctctcttgccccatggccggacctccccaccctggcgcccaataccgccaacaccagtgggctgccaggggttccgtgggaggcggccctagccggggccctgctggcgctggcggtgctggccaccgtgggaggcaacctgctggtcatcgtggccatcgcctggactccgagactccagaccatgaccaacgtgttcgtgacttcgctggccgcagccgacctggtgatgggactcctggtggtgccgccggcggccaccttggcgctgactggccactggccgttgggcgccactggctgcgagctgtggacctcggtggacgtgctgtgtgtgaccgccagcatcgaaaccctgtgcgccctggccgtggaccgctacctggctgtgaccaacccgctgcgttacggcgcactggtcaccaagcgctgcgcccggacagctgtggtcctggtgtgggtcgtgtcggccgcggtgtcgtttgcgcccatcatgagccagtggtggcgcgtaggggccgacgccgaggcgcagcgctgccactccaacccgcgctgctgtgccttcgcctccaacatgccctacgtgctgctgtcctcctccgtctccttctaccttcctcttctcgtgatgctcttcgtctacgcgcgggttttcgtggtggctacgcgccagctgcgcttgctgcgcggggagctgggccgctttccgcccgaggagtctccgccggcgccgtcgcgctctctggccccggccccggtggggacgtgcgctccgcccgaaggggtgcccgcctgcggccggcggcccgcgcgcctcctgcctctccgggaacaccgggccctgtgcaccttggtcccgggcccggctttccttgccctgaactggctaggttatgccaattctgccttcaacccgctcatctactgccgcagcccggactttcgcagcgccttccgccgtcttctgtgccgctgcggccgtcgcctgcctccggagccctgcgccgccgcccgcccggccctcttcccctcgggcgttcctgcggcccggagcagcccagcgcagcccaggctttgccaacggctcgacggaagcaaaggagggcgagcgggccgtcgttcctcacccaaggacccaaggtgcgccaccggaaagcgctgcggtgtcccgaggactctcgcctcgcctgcgcctctgcactggggctgccaaggttccaggaagaggcaggactgcccggcccagccttggaggaagacttctgggcagaagcggaacacaggagcagagacacatagtcttggctccagtttcgtttcagttatgcccaccctttcagtgttcatggatgtgcccctcgcccacaagctagagggcagcttgttaaagacctacaaacaagatgattacccgaacaagatattcttagcctatagagctggaaggattagcccaggccctgtggctaaacccccccaacacgggtgcacgtgtcatcacctccatcctctgcaaccctgctctgctgggagaatggaagcagagtctaaaagaagttgtagagaacatcatgctaaccaaggaaaaagtgaaggagaaactccagctcctgggaacccctgggtcctggggtcacatcaccgagcagagtgggacccacggctatcttggactcaactcccagcaggtggaatacctggtcaggaagaagcacatctatatccccaagaacggtcagattaacttcagctgtatcaatgccaacaacataaattacatcactgagggcatcaatgaggctgtcctcctcacagagagctcagagatgtgtcttccaaaggaaaaaaaaacactgattggaataaaactttagtctttgcaaaaatcttgtgctgattattcatt

SEQ ID NO: 466047 - DNA, 961 bp, Homo sapiens
ctttgcctgtgccttgcctacctgcgtgtgcatccactgtcatctggaccattcctcccccagaatcttccataatctttataggcctggctggattcatctctgacccttctctgccacctgatcttctagccagcatcagacgcaacttggtcatcttttcttaaatacgaccagctagtgggacagatgttgagtcactgtctgggaaaatagggcctaggggcatctgtgaaagttcatcacgtttcagtggggctttctgctggctttcacagaagaatgcaccaatagtgcaggcccagccacagatcagaaccacagagagcctggaaaagtgtcagtttcatatggttcaatctaatatttgaagcatttgcattaaagtcaacagcaagatcaagatggtttttattgctattatgttacattgctttccaggatataaaggcacttatgaaattaataaatcaatgaatgaatttatccatttaaacatcatctatggagtatctggtactggccagacaccggaatggtcttgtaatgcagatacaaacaggtataaccagctagaagtggagatgcctttgggggaagcacgtgactcagggtgcatagctggtgcacatgcgcatattgcaactaaaagcttaggttttggattcaatcaggaagggaagcaaaatgctagctgtggggatcccccaccccaaatgagggttgccggtcggggggtggtggtgaataatggggtctatcatacagtgaatgatgacgatgaaaataatgacaacatttgcatgattcgacatggctgcttctatacaggagggattgaggaaagcaatttggctggaagtggctgctaagagactcttctggaaacttcccttgcacagcatgcactgttcttacctatagtatgcatttgttcatttagggaagctgggggaaatgt

SEQ ID NO: 466048 - DNA, 2584 bp, Homo sapiens
tctgcagcttcactcctgaagtcaggaagcaagtagaaacgggctttttttgggggaggagacatttgcagcccattggacggattccccgccgccctcctcccagaaggtccccactccccgccccgggccctcccccggcttccgcgctgggccgggagcctgggtgggcggggtagcctctctagccttgccttcttggctggaggcacaaaggcattaacttagcgcccggggtctctgccaggctcacgggacagctgcacctctcagcgtctccagctccaggacgcggtcgtcccaactccttccgagtggaaagagtgtaaaacttttgtccgtgcgcgggtggagctcagtaggaccacggcgcgtcctgccccggcttccccagcctcccagcagggttagctgcggtcagcgcactttccacttgggactcccggccagaaatttctcgggaatggagcggtcacagtgtggcagcagagaccgaggcgttagcggccgacctcacttggcccctgggctagtggtggctgcccctccgcccccgtccccggcgttgccggtaccatcggggatgcaggttcccccagcgttcctgcggccgcccagcctctttctgcgagcagcggccgcggccgccgccgccgctgccgccacctcgggaagcggaggctgcccgccggctcccgggctggagagcggggtaggcgcggtgggctgcggctacccgcggacgcccaagtgcgcccgctgtcgtaaccatggtgtggtgtcagcgctcaagggccacaagcgcttctgccgctggcgggactgcgcgtgtgccaagtgcaccctgatcgccgagcgccagcgcgtcatggccgcccaggtggcgctgcgcaggcagcaggcgcaggaggagagcgaagcccgggggctacagaggctcctgtgctcggggctctcctggccccccggtggtcgggcatccgggggcggcggcagagccgagaatccacagtccacgggcggccctgcggcgggggctgcgctgggactgggtgccttgagacaggccagtggttccgcgacccccgctttcgaagttttccagcaagattatcctgaggaaaaacaagaacaaaaagagagtaaatgtgagtcatgccagaatggacaagaagaactgatctccaaatcccatcagctttacctaggatcatcttctaggtctaatggtgtcattgggaaacaaagtatcgggtcatctatttcagaatactccaacaagcctgatagtatcctgtctcctcatcctggagagcaatcaggaggtgaagagagtcccaggtccttatcatcctctgatctggaatcaggaaatgaaagtgaatgggtcaaagacttgactgcgaccaaggcaagccttccgacagtgtcctcaagaccaagagatcctcttgatatccttactaagattttcccaaattacaggcgcagccggctagaaggcattctacggttctgcaaaggggatgtggtccaagccattgaacaggttttaaatggcaaagaacacaagccagacaacaggaacctagcaaactcagaagaactggaaaacacagcctttcagagagcttcaagttttagtcttgctggaattggttttggaactctagctgcagatctggtggagtttgctggaggtccactccagacactttttgcctgggtatcatcagcagaggctgcagaacagcaaagactgctgcctgttctttcctctggaagcttcattccagaggggcacctgccagatgccagccggagctttccttcaggactctcagctgtaggtcttttggagtttgctggaggtccactccagaccctgtttacctgggtatcagcagcggaggctgcagaacagcaaatattagtgaatagcaagcaagtgctgctgcctgatcgttcctctggaagttttgtctcagaggagtacccggccgtgaataccatttacaaagacaaagtatacagacagaatggccatgccgctaacattctccattctgattaacgggctgtctgaagctgcctctatatattcactaatcaaactaattttttgagactacagcatgaatgtctccaaggcagtatggtacttctctacaactttttaaagttatttagaatttaaggttctaagaattaaacaaagaatataaatccactgtttctcattgtatgcattatcgatgcccctttaaaggactgtttttcatgctgaagaatatgggtttctgtaagttatgtaagtaatgagttagcctttctatacattaaaagctgatgcttttaaaattctgcccctttagcattttctgaatatgtagaagctttttgcagtggttggatttatttaaacatattatacacttattaatcatttgtgttgctgggtttaatgtagattgtttctattttggctgttcaattttaaaacacctagtttataaatggagagaccaagtgagcttgaaatggctttgtttcttcatgctgtgtaaggaagttctgtgatgcc

SEQ ID NO: 466049 - DNA, 1192 bp, Homo sapiens
cgccctgctcaccactattaatcttgacttcccttccttgtctgttttggcatcactgtataacccgatatgtatatgcgtgtgcctgcgtgtatgcgtgtgtgtttggggaggtgggtaaagattcaaacttttcgaagtatcaatctagaaattgagtcaggggtctgcatctcatttattattagaaattcagttggaaagcaaaagatgattcaaaaaacaagaccctcaacagcagcttatcaatctggatgtaattttgactctgccaagataatgaaggctaaactgaactgtgagatgagacattctactccattccatcccatttttggaaagatgaggggtaaaatggcaatagcacctgtgcaaacactgagtgatgtttccagaggattgtcaattaggttattttctacctttaatcacatgtactgcgtttttactgagcgggaagcccagaagcaaaagggtagggggaactgtgttagttcgtcccttgcaaactatctccatctgctccgtgctacttaatctgttctaaatgagggaggaacaatgtattatctttattttattgatgaagaaacaaaggcatacagtaattaaataacacctgagatcacacagtcagtcagtcctagaggtgcaattccaaaccagctctaatgggctaagagtttatactcctccctctgctatggggacaatgtggtaatgtaatctactttaagccaaaaggtgctccttggacaatttagaaggtatattgctttaaggtaaaatcttaactgtatatttacttatacagctagtgtttgtgctgttgtttttatcagtatattgacagaaaccgttgaatctgaaggaaaaaaagtgaaaacaaaacaagacatgtttgatgctgtgggaagaaagtattagaagtgaaacctaatcgttcatgacatagaaggcataaacgaagcagcaaactgaggaactgggggaattggggaaaaggtgagcactatgtgcattctcactgatctggcttttccatggttcagggtgtctaataaaatgaatacatgctcagaatgctgcccccctgcctttctttcttgggtccataaatgactctagtgaggtgggaggtaggctcttcattgtttctacttggagccactgactttaaagttttaataaa

SEQ ID NO: 466050 - DNA, 935 bp, Homo sapiens
tatatgtaggaacaaaaaagaaaatcttggccaggtgtggtggctgaggcctggaatcccagcatcttggaagacagagattggcggatcacctgagaagctcagaggatccagaacagcagcctgtcctcgctgggctgttcctgtccatgtgcctggtcacggtgctggggaacctgctcatcatcctggccgtcagccctgactcccacctccacacccccatgtacctcttcctctccaacctgtccttgcctgacatcggtttcacctccagcatggtccccaagatgattgtggacatctaatctcacagcagactcatctcctaggcaggctgcctgactcccatgtctctctttgccatttttggaggcatggaagagagacatgctcctgagtgtgatccctatgacccgtttgtagccatctgtcaccctctatatcattcagccatcatgaacccgtgtttctgtggctttctagttttgttgtcttttttttctcagtctcttttagacgcccaggtgcacaacttgattgccttacaaatgacctgcttcaaggatgtggaaattcctaatttcttctgggaaccttctcaactcccccatcttgcatgttgcgacaccttcaccaataacataatcatgtattcccctgctgccatatttggttttcttcccatctcggggacccttttctcttactataagattgtttcctccattctgagggtttcatcatcagtgatgtacacggtggtcacccccatgccgaaccccttcatctacagcctgagaaacagggatattaaaagtgtcctgcggcggccgcacggcagcacagtctaatgtcaatatctccttatctgttccatgccttttgtagagtaatacctccctaggatatagaacatactgtcatagagtata

SEQ ID NO: 466051 - DNA, 1296 bp, Homo sapiens
tccctacccaattccccttagcctgctatgtggagatacaggaggcttgcacccgccgcggtcccggtgtattttaacgggctcccggggaagcggtgggttcggcctggaggagcggcgtgggggcgccggggccctgattccatcctgggcgggtcggccccgcagccgctgcgctcggaaccccctaggcgccccgcagtacccggcgtccttcctgcctcctcctcgcccctgtcctccgtccgagccccagtcccgccgaccctgccggcgcctccgccctcccgccctcccgccctcggtttcccacgacctcggcgcgacgcgcgcgggatccagtggagactgctttcccataggccgccatccagggcggggaagggagcggaccctcccggctccaggtgcctgggcccccggcggcctgcggaggcctcgccccacgccacccgcccactggcctcgtcttcgcgcggggagaaaagcagcctgattcggaggaacgggttgcttggggcggctcccagctcgagttgtgggccccgccgcgggtgcccttcggaaacgcgctgacaccaggcgaagccgcctctgcccggacgcagcccgacacttggcccgcggggttccccgggacgcctgagagtaatgggcgcgagggggaaagccgaacggcctccctgtgcccggcgcaggcggtgccccctagctgggttcgccgcggcggcgctgcgagcccccgacactgaggacttttggtccaacagtccgacggggcccggtgcgccgttccctccgccctctccccgctccccggcccgcgcgtcttggagggtgggtgaattgtcggaagcactctacgcctggccaacccaaaccaggaacctccgcaccaaacagcccacgttgctgctgctctggggttttaacggccaagggagactggagaaggggtgttctgccttcccattctcttaggcccgtccactccccatccccacagtttggaagtggccttttctgaggactccagcgcaaagcatgtttctccttttgagctgcggaagccttgcttgttcccgccattgggagggcattccatcatctgcagctgccttcctcggtgggccttgtcccttagcgtccacctaggggacattctaagcttcttgagacctgcttgtccaccccaacatgtctcagcatatggctgtgccctaaggggtctttgagggcattttaggagaaaggtgcctttcttcccccttcacgtgaactgcctccatgattgta

SEQ ID NO: 466052 - DNA, 1129 bp, Homo sapiens
aggaaacgtctgaatggcgtcttcttccaataggaggctgtttgatctacactgaaaatccgttatttggtgtagccacctttatctgtcatcttaatgactttatgtctcaactatccttagtattccatgttgaccctaaatgtcaatttatttatcttttgggaaacagtgataactttagacacttggttgcatgtggtgtgtgtgcatcagcagctgtggcaaaccccgaccctgcccgccaccaggagcatggacccctggccagatgctgccgggcaccttattcaggaagtcagcccagcagctgtaggagggcaggagctggtgctcagccccatcccagtggctgcacagtgcccagtgccaggatccctcgctttgggcgcttgtccaggaggaagaagggggtggtgcagtcaagcgggccctggggcaggcctggcccagcgctccgttcttgggagccctgccagcccacaggcccatctgcggcaggcacgtggtgccgcgagaacttggctcagggacggtttttccgccatgcgcagattctcgcctctcgcgggggcgccagggggcagctggttgaggtgcgcatgcgcactggcacctaacggctcttcttcgagtcttctcagaggttggagattccctgtcttctccaacctctgccaagtcttcagagaggttggagtgcgcctgtcggaggtactagaccccagatgaggatctcaggaagatccacaaagctgcgtccaggggaacgaacgtgtggaagctgcagcggagcctcctgctcaagagtaaaggaccggtctgaaacctacaagaacagattctcacactagacgaggagcctgtttttcagctagctgctgcaagggagctggaaatttctcccttcagataggacctagaaggtctgaaagcatctggagaagggtgcggctgggagtagagaaacaggctacagactgaagcaggaggaagcgagagaggaagactcatggaaagccttgttgcgctcgccaaaagagctgccctcgcactcgagagggccatgtttaatgcctacctgaagaaaggtagtaacctctggagcacttgtggcttggggtgaaaa

SEQ ID NO: 466053 - DNA, 3237 bp, Homo sapiens
tctggtttattcagaggatagaggaggcttttggaaattctgctttccagtgaagaaatcttcaggtgtagagaactggttgtcaaacttgagcatgaatcagaagctcctgagggtttctgaaaacacagattactgggtcccctgccagagtttcctattcaaaccaggtccactttcagggctccatgggggctcttcaatgatagttactttaaaaatgctagacttccttcttgttaaaggcaaagacataaaggctgaaccacctggaactgggggtgtggtgatgcaagcacttctcttgccaccaccactgggaccgtgctgggtcagacctgaagccggcctagtactaggtcttgccgaaggcccttcctttcagtgtgagaagcctttccctgtggccaccaccagcagtaatctaagatttccagagaacttttttgcgcagctctctcctctatggtcctctgttctgaaacctctagccactaaggtctcccccgatccttagctctgtcttctcaacttaaagaggaagtttcctgggctccaactggatttttgcttcttgctctgtggccttgaaattctctcaaggcaatcagacaagatatgtaggtttttctattaactctatatcatatctttttttttttgtgactgaagattagccttaaggacagacttggccttgatatgctaaatggagcatgaagaaatttggaaaaattctttctcaagaaaataatctggtttgcgagatattcttattgcacaaaccaagctcatgtcaagagctgaatattacctcctctttctctttgcataccttctgctttaattactaagcttccctcagacaaatagatactgaggacagatttagagtaaaagtcttatactcagaaagttattaaagcacacagtcatcatagaaattaggccattctgcttgacaagagtagcaaaggcttcctatcttgtcatgggtaagttccttggttggccgatctggctgaatttgtttattctctctggaaggatctaccggagtccctcttcccctccccttctggctctcccctccgatgttgcttggtaaagatgctcttcctagggctacacagcattcaaaaccaacttgctattggtgtgcttttagtaaccagggactattttaggggtttactaatcatagagaatctggggacagtcttagggagaagaaacttccttggaaatatatttccctttaaacttagaacagttttgctttatttgctcctggtaaagtccgcatttaaaaataacagtcagctgggcgcatgttgaaatgaacaagtgtttgagtcaacctccacagaaatgtttgaaagattaaaaatattttattggccgcacaatattgcaaggaagacagcaacattgaaattacaagtgtttaattaaatgtctctggattgtgacattaggtcaactagttgagggcaactccattcaactcatgtatatattacatttaatgtggaatgagagcattttaatatgtgtaataaaagataagagtctccaaaagtaagagtgcatagagcctatgaactatcaaaataaccttgtctacactccgtgatggttcttatcacaatgatcattatctctgtacctcacaggtggattctgaatggtgggtcaatgtccataggaaatggctccagttgtctatactgttttctaagcatctggacctgaaccctaaataagaatgtaaaatgaaatactgtattcctcattctatttcttcaaagtttatattgtgttaattttaaaaaagcaaagtttaaaaacttattttccatattaagttatttatatcaaaatgcagagttcaggttctttattgtaaagttggtgtttggtccttagattttcaggccacagaagcccagttctacccacaaataaagataagtttttataaacagtacataattgcattttcttttgttttcaatcgaatttgcacattttgctttcaaattgagtttttgatccttttatattcaatgtaattactgatatatttgagttaaatttatcatcttattttgtgctacttatcccaactgttctatttggatttttttatcattccaatttttgtctgtactatcttcacagttgtaatttttcaattttttaaagtaatttaactacaagtaacaacatgtttttttgtttttgtttttgttttttgccttatcaaacttcagtgttaattgaaaacccttccattgctcgctggcttcctttgttactattgagaagtcagttctcagtctaactgttcttcctttgaaagtaactgcttcttttctgatgctttaagatttttgtctctgtctattgttgtctgaagttttgctgcaatgtctgggtgtgagtttcttataatttattttgcttaggatatatggagattcttaaagttgtagattgatatcgtttttacttttgaaaaattcagagctgttatttcttccaattttatatctgtcccattcccttcacactttctgggctacaacttgtcactgaccacttatgcctcttatccactcttttccaattcttcccttttatttctgtgtgctgcattctggaggatgttttcttcttgtcttccatttaaaaatgttagctacatttcatttgctcttaagcccatcttaattttgagtattatatttttggatttttttcttaatatgtcacattaaattttagagtttccttttcacggatgtttttaagcttggaatttatttcataaatgtaaaaagcatcgttattttgtgaaccatatctgatcatttcaataattcatgttttggaggctttttttgtagcttctctgtcttctgttactcattcagtgatcttgttgccttgtaaacccttatttttcattgtatgatggaaattatattttataagtcatatggaggaagtgctgaggcctgttatgatgatgtctttctcttgagaggatattcatttgctgctgcaaatagcagtgtgtgttatcattccagaaatatcttaatataatgtcagagttgaagtttacttgtactgttaaatgatgcaaaactgactacaattctgtgccagggctggtttcctagcagctactcctcatattgagagtgtggcctttcagattctcagctc

SEQ ID NO: 466054 - DNA, 1146 bp, Homo sapiens
ctaatcagttcattaaagagatgaggtgaaaataaaccacatgtacacgcacaccagataaactgaatgcttccttctgctggggacacgctgtaggtgagcaagtgcaccaaggacaaggcggccactgatgaaaaggaagggaaaagagacttcatttccatacccactaaccatgccaacagaaggctttgtgaagaaggaagtaaaagctatcggtaggagttagaaagaaacatttctagttacaagaacagcagaaaaagacctgaacttcagagtggaccacaaatgaatatgaattaataacacagatctcttttcaaaagccaacacaaaatgaggatgtgttttttgcaaaagcagttgttcttgccactgggcttatgcttgtcattctttcatgtgtcacagccagacctaggaaattccctggaaagtcccctccatcacacacctgcagtttttccatttgagtgtaattctgttggaccttgaaagactttttgatctttgggacgctcttatcaccaaatgtatctttctgcaggaagaagacagaagaaaggggtggactatgagatgggagcctgggtcccaatttcagttcaaccattaccaaccaggtggctttaggcaagtctggtcatttcctttgcctcagtggctttctataaaatggaattctatagggatgatgaaagcgaaaacgttagccactatgcttgctagtgctcaagaaatgattccttcctgcctgcctgcctcagttttccatctgtaaacaaggattcaactagaacatctttgaggttccttgagctctaacactctgtgattctgttggcagcaccttaagaaatttacaacaaacactccattgagtcttaatctattagatcccattcagttctaatagtgttgtgattttgactttgtagcctcatgtttattttctctcttcctgattttttatttatatattctatttaatagtttttgctttttcaagttgtcaccagttctttgtagaataagaaaaaagtataactaactggaggaaagaatgcattcacagaaagccaaggaatgataacactaatgctaatacaatactactgctaataaaaataactgcctttattg

SEQ ID NO: 466055 - DNA, 1112 bp, Homo sapiens
ctaatcagttcattaaagagatgaggtgaaaataaaccacatgtacacgcacaccagataaactgaatgcttccttctgctggggacacgctgtagatgaaaaggaagggaaaagagacttcatttccatacccactaaccatgccaacagaaggctttgtgaagaaggaagtaaaagctatcggtaggagttagaaagaaacatttctagttacaagaacagcagaaaaagacctgaacttcagagtggaccacaaatgaatatgaattaataacacagatctcttttcaaaagccaacacaaaatgaggatgtgttttttgcaaaagcagttgttcttgccactgggcttatgcttgtcattctttcatgtgtcacagccagacctaggaaattccctggaaagtcccctccatcacacacctgcagtttttccatttgagtgtaattctgttggaccttgaaagactttttgatctttgggacgctcttatcaccaaatgtatctttctgcaggaagaagacagaagaaaggggtggactatgagatgggagcctgggtcccaatttcagttcaaccattaccaaccaggtggctttaggcaagtctggtcatttcctttgcctcagtggctttctataaaatggaattctatagggatgatgaaagcgaaaacgttagccactatgcttgctagtgctcaagaaatgattccttcctgcctgcctgcctcagttttccatctgtaaacaaggattcaactagaacatctttgaggttccttgagctctaacactctgtgattctgttggcagcaccttaagaaatttacaacaaacactccattgagtcttaatctattagatcccattcagttctaatagtgttgtgattttgactttgtagcctcatgtttattttctctcttcctgattttttatttatatattctatttaatagtttttgctttttcaagttgtcaccagttctttgtagaataagaaaaaagtataactaactggaggaaagaatgcattcacagaaagccaaggaatgataacactaatgctaatacaatactactgctaataaaaataactgcctttattg

SEQ ID NO: 466056 - DNA, 1879 bp, Homo sapiens
taatccttctgcgttagcttttggcaaatgaaacatgatattcctggatccactcaggcacagtggacacggcatcagagagattggctgcagcccccttgcctgttaccctgcagtgacagcaggtatgctgcaggtatgctgcaggtatcctcgccggcgtgcacaagtcacctccccgtccagatgtgtttgtgagcatgaagattctccacacgggggcctgttcctttgcctggttctcagaggaggagataatgaatttcagtggtacttctgcataaagagggactttgcaaggtgtatttcaggagttaccgattcagaaactggagaagcagaacacaaagagaccttggtcttctctctgaaggctagtggctggacctgcactcagatggcaattcaggtccagttcatgagatcttggactgttttgacaaatgatttggggaaagggatagggagagagttgtcagtaccgatgctgagactgtgagagccatttctgagtggaggtgaggaaaaacggagcgatgaccgtgagggtctttgcgtggcgcctcgagaccacacctgggaacggtgactttggaactggctgacgtgtttatttggtgtgaggtcaactacagctctgagggcaataacatgatcctcataaaacagaccccccaggctgggcctcagcccgcttgctgccaagcaggggtggtggcctaataagtgagacattgctatcaactctctgtaaatggtgggttcattcactctgtggatgacatagcctgttctttgcccttctgtgtcagccccattgattgctttttaaccaccttcttgctttgtgctgcttctttcagatgaaaaggaagggaaaagagacttcatttccatacccactaaccatgccaacagaaggctttgtgaagaaggaagtaaaagctatcggtaggagttagaaagaaacatttctagttacaagaacagcagaaaaagacctgaacttcagagtggaccacaaatgaatatgaattaataacacagatctcttttcaaaagccaacacaaaatgaggatgtgttttttgcaaaagcagttgttcttgccactgggcttatgcttgtcattctttcatgtgtcacagccagacctaggaaattccctggaaagtcccctccatcacacacctgcagtttttccatttgagtgtaattctgttggaccttgaaagactttttgatctttgggacgctcttatcaccaaatgtatctttctgcaggaagaagacagaagaaaggggtggactatgagatgggagcctgggtcccaatttcagttcaaccattaccaaccaggtggctttaggcaagtctggtcatttcctttgcctcagtggctttctataaaatggaattctatagggatgatgaaagcgaaaacgttagccactatgcttgctagtgctcaagaaatgattccttcctgcctgcctgcctcagttttccatctgtaaacaaggattcaactagaacatctttgaggttccttgagctctaacactctgtgattctgttggcagcaccttaagaaatttacaacaaacactccattgagtcttaatctattagatcccattcagttctaatagtgttgtgattttgactttgtagcctcatgtttattttctctcttcctgattttttatttatatattctatttaatagtttttgctttttcaagttgtcaccagttctttgtagaataagaaaaaagtataactaactggaggaaagaatgcattcacagaaagccaaggaatgataacactaatgctaatacaatactactgctaataaaaataactgcctttattg

SEQ ID NO: 466057 - DNA, 2908 bp, Homo sapiens
ggcgtcccactccttctcttcatcctcctccagctcctcctccacgtcttcctccagctcctgctcctctttcttttccagtacctcctcagccccttctcctctgccagcccctcctcccacctccgctcccagcccctcctcctttcccagcccctcaccatccagcccctcctcctccatctcctcctcctctctcagctcctcctcctcccccagctcctcctcctgctcctccttctcctccactcctccttctgctcctccttctcgttcagctcctcctctcccagcccctcctcctcctccagcccctcctcctcatccagccctttctcctctcccagcccctcctctcccagctcctcctcctcctccagcccctcctcctctcccagcccctcctccccagctcctcctccaacagcccctcctcctcctcgcgcagaccctcaccatccagcccctcctccttcagcccctcctccagcccttcctccttcagcccctcctccagcccctcctcctccagcccctcctcctcctccagcccctcctcctccagcccttcctccttcagcccctcctcctccagcccctcctcctcctccagcccctcctcctcatccagcccctcctcctcatccagccctttctcctctcccagcccctcctctcccagctcctcctcctcctccagcccctcctcctctcccagcccctcctccccagctcctcctcctccagcccctcctcctcctcgcgcagaccctcaccatccagcccctcctccttcagcccctcctccagcccttcctccttcagcccctcctcctcctccagcccctcctcctccagcccttcctccttcagcccttcctccttcagcccctcctcctccagcccctcctcctcctccagcccctcctcctccagcccctcctcctccagcccctcctcctcctcttccagttcctattcggggcgggcccagcccctcctcgcggagcgatcgatggcttgggctcgtcgcacacgcctgcccagcctctgcgctcggctcgccaggcctgcggcgctgccatggagacacggcccagcggccgccggccccgccctgggagccccgcagtgcgtcgcgccgctgcccgcatctccgaggcccgcgacgagcggggcctcacgggagctggatgctcggagcagcaaggcggccctgggggccccttccggtcccggggctgacgcctggcggcgtctccgggaacccgcgccctttcaagcgccgctggctcctgtttcacagatggagaccctgaagccccaacaagcagcctccccagcacctcccagtgactgaaaaagctggcactgggcgcccgtctcactctccacccagctcccaggctgccccacgggaccagcacctttggggagagacgagacctgaacaaacgctggggctggatccccagggtgggtcagaacagccgttgccctgaaagctggcccggacagatgcgtgcggggcgtgccaccggagctccttccagcttgcgtctggggccaccatgtcccttcctcagggcactggatccatctcttcaagctcagtggtccaggccatggtggcagaatcaccccccagggtgtgacgcctcgtccctgtcaattccacacagctgcacccggaagagctgtggccgggcgccgctctgacctgtgtgcggtcccctgaatgggtctcaggtgtcttcagaatggtgaggccgcctcatttcctcaccacacaaccctcctgaggacgttgcctgcaaatgggcggaattcctaatttctaccattcagttaaacgagggatccttaagccccaaagctgggaaagctgtccgttaatttagtgcgcgtgggccgtctcagaacagcagggttcccaggagtccagcgggacgggggaggggatgagtggccgtgtccccctggcagagaaggccttgtctgaaggctacgcccgcctccggtacagggacacctccttgctcatctggcagcagcaacagcagaagttggagtcggtgccacctgggacgtacctgagcaggagccgaagcatgtggtactcacagtatggaaatgaggccatcttggtccgagacaaaaacaagctcgagctgtgcaagttcattcgcaaacgtcctagaagtggaactgctgggtcaaagtgcattccccaaatgtcctgccagaggcctggtcggcagcagcctcctgcacagcccgagtcccttctgcgagagtcctggcttgtttgcagcctgcagctgggagatttgaagtcagacttccaggattgccgcatggagctgcagagggagcctagttccagagctgtcattcttcggcgagccgcgctgcacgccagcctccagtctggcagttaaacctcactatgaaaatctgcttttgggattttatttgcatttccattagactgagcgcatcacaagccacttcaggatagactgagccggccgctcccccgacggctcacacaggcagcacctcactgccctgtggctggaggggcattgcaaggagcgccccccagccccaggcacccccggcttagggtgtacgtatcacccagccctgtgctggcagcacgttaccaaccagcctgcgtgaagacctgtcaactgtcgtgtgtgaattccttaaattcggtttaaatagtccattaaagatctgtttagaaaatacctttgaaaacgagggtaactttaaaaaatggaaactttcaaatccatttatatttttattataaacaaaacttaattaaaagtttaacaaactggctgaaaactcaccaagtgtcagactcaccagcaatttaaaaaatgataattta

SEQ ID NO: 466058 - DNA, 2789 bp, Homo sapiens
gacaaaggccacactcagcgcccgaaggaggggtgggggtgttgggaaagcgatgggggccaggactggggccaagtggccctggggatcctcgaggcggctcgacccgggagccaggactggcgccaagtggcccgggtccgggtccgggaagaggcggaggccggcgagggggcggtgcccggggccaacccagctccctccggccccgagggctcccgccccgcgcccctcccgggccctccagccgcgccccgggccggcgcagcgaccgcgcccgctcttccaccggcgtccggccaggaggcgcgaggcccaaggatgcgacccacgacgcgcacacccggctcggcaggctccctgggaaatgaggggccactcgcagggccccgcagagcgagcgcagcgccggagcctcccccatcccaggccgcgcagaccgcggaaccggcgcaccagagcagtgcccgcgggcggcggcggcgcgacccaggctgaggggactttggccaacttcgcgcctcctgaggtcgcgtctcggaggcccggggcgcaccctccagccgcccgcccgcgtcccggagcccggccgccccagccagggcgcctgggccgccgccgctgcgacctccgcgttcagtccgcgcgtcgggcagcgcgaacgccgcctccccggggccctcccgcccgccgggcgctcacctgggacatctgcggccggaagttgatgtccttgaggtcgatggagccgggggagaggttgtgcagcagctggcacagaaggaccccgtcgcgcagcgcctgcgccaggtcgaagaccacggccgagggccacaccacccggtggttgggcggcaggaccttgcaatcgatgagccagcggccgcactgccgccactgctccatggcgcccgcgggcccgaccggctcagggcagtgctcgagccaaagtgcagcggccgcggggcatcccgcccgcgcgcgcgcggggctcagggccggggcggggcttcgcgcgggctgccccaggtcccccgctgcgccgccgtgcgtcccctcctcttcctcctcctactcctcgggctcctctcgggccgccgctcccgcccacgtgcggccgcggggcgggcaacgggcagcgcgccggatctccccgcttcacacacgcaagtgcctgcgggccccgggccgggctccacgcagccagtcgccgcagcgctccccaatccgcgccgccgggcgccgcattctgcgctcggggcgccccgcggccgccgcggctcctgccccgcccgagacaaaggcccggcggggtcgctcgctccgcgcgtcccgggcctgggccgcccgcgtcgccgccgctttgttcgccccacccgcagtccccacgcccggcgctgcgactcgacgactcggcggctcggcggctccacggctccggggcgctgggggcgcagggggcgcggccacggccgggcggggcaggggcggggccggagcactcgcctggcacctccccgtgtcccaagcgccgcccccgcccccccacttcctgccccgctaccgcccgcgaaagttgcggtgggcgggggttgcggcgcaggcccaggtccggccgactttctccaagggcgctcggactttggggagcccttctccctgggggagcgacctcgcccgtggagtgatggccgggcgtccccccgggtgcctttggtcctccgtggaggtcaggaggtggtccctgtcgcgctgggcgccctcgcatggccgttcggtaacgacagactcgggagagggcaccgggctgggccgaagcttactgagcccccttggcccatcaagccgccccggcgggatacccgaggctgaggctgaaggcacacgggcccaggactcccagagccctcttcctgtcctccgccctggccgggggcccataggaagacccccgaccctgcataaaggccaggattccccagcttttggccaaagtcctggccactcgcagctgcccagcgggcagttcctggcgtccagggcggaatgcgtgacatgagtgagggcaggaaggtgctctccggcccaggcccggaggctggggtgcggtgtctgagggctcccaccctggactccggtggaatcctgggcctgtatgagctggggctgcactgcagcccccggaccccttaccccgtggcttccctgcgcaggggccggaacggggatgcgagcgcagagagggtcccctgggcccagggcctccgatggggcaagaagggggcctctgtcctcacggtcctgggcctgcctgctctggccaagaggaccagccaggtctgggacccaggcagccgcccgccaacaatgccatgggtacctgctgccccctggtggtgctgtcaccacggggcacctggctgcacccaggaggggctgcacagaaaatctggggttgaccgttgagaagacccaactcaggagacacagacttcaccacagtggccctgagccactcaggcctccctggttcccaggtcctgatcggcataggacattcaccggccctgtgcacctcccagaatccttggaggctctgagggcaggatggatgtgaatcaaagaacaaaagtttggtggggccaggtacagcagctcaagcctgtagtcccagcactttgggaggctcaggcaggcagatggcttgagtccaggagttcaagaccagcctgggcaacacagtgggtccctgtctcaaaaataaaataaaaggtaaagaaaatggggca

SEQ ID NO: 466059 - DNA, 794 bp, Homo sapiens
  misc_feature (6)..(9): n is a, c, g, or t
  misc_feature (12)..(13): n is a, c, g, or t
  misc_feature (15)..(16): n is a, c, g, or t
ggattnnnntcnntnnttattcatggtgagaacctggtaagctcctggaggtaaaactcacaaatgtgtggggacactcctatgactgggtctccttggagctggactctcagacattctgctgtattccttaatccccaaagctccagagatagatccagtagagtgtttggtggcagataactctgtaacagtggcttggagaatgccagaagaagataataagattgaccattttatactggaacataggaagactaattttgatggacttccacgtgtaaaggatgagcgatgctgggagataattgataatattaagggtactgaatatacactatcaggcttaaaatttgattcaaagtatatgaatttcagagtgcgagcttgtaacaaggctgtggctggagagtattctgatccagtgactctagagaccaaagcacttaacttcaatttggataactcctcatcccatttgaacctgaaagttgaagatacatgtgtagagtgggatcctactggaggaaaaggtcaagaaagtaaaattaaaggaaaagagaacaagggcagctcccagcaagatagacgcagaaggcaggtgatttctgcatttccaactggggtacccggttcatctcattgggactggttggacagtgggtgcagcccatggagggcgagctgaagcagggtagagtgttgtctcacccaggaagtgcaaggggtcagggaattttctcccctacccaagggaagccatgagggacagagcctgaggaacggtgcactcc

SEQ ID NO: 466060 - DNA, 704 bp, Homo sapiens
acatatcggtaccgatgctctctctgtgggggaggtgtccagacccgcagggtgacctgtcaaaagctgaaagcctctgggatctccacccctgtgtccaatgacatgtgcacccaggtcgccaagcggcctgtggacacccaggcctgtaaccagcagctgtgtgtggagtgggccttctccagctggggccagtgcaatgggccttgcatcgggcctcacctagctgtgcaacacagacaagtcttctgccagacacgggatggcatcaccttaccatcagagcagtgcagtgctcttccgaggcctgtgagcacccagaactgctggtcagaggcctgcagtgtacactggagagtcagcctgtggaccctgtgcacagctacctgtggcaactacggcttccagtcccggcgtgtggagtgtgtgcatgcccgcaccaacaaggcagtgcctgagcacctgtgctcctgggggccccggcctgccaactggcagcgctgcaacatcaccccatgtgaaaacatctgtgccaacactgaactagaacgtcctggtgctgtgtttaaggcatgatgggtagaaggaagagagactggagggcacatgaaaataaagcttaacagagaaagtaggcccaagtgcctggggatgggggcacccgacgcaagtctcacttcacactcctgcaaagtcggggagga

SEQ ID NO: 466061 - DNA, 1196 bp, Homo sapiens
gagcttcgggcctttgtgaaaatgtgtaagcaggatccgagcattctgcacaccgaggaaatgcgcttcctgagggagtgggtggagagcatgggaggtaaagtaccacctgctactcagaaagctaaatcagaagaaaataccgaggaagaaaaacctgatagtaagaaggtggaggaagacttaaaggcagacgaaccatcaagtgaggaaagtgatctagaaattgataaagaaggtgtgattgaaccagacactgatgctcctcaagaaatgggagatgaaaatgcggagataacggaggagatgatggatcaggcaaatgataaaaaagtggctgctattgaagccctaaatgatggtgaactccagaaagccattgagttattgacagacgccatcaagctgaatcctcgcttggccattttgtatgccaagagggccagtgttttcgtcaaattacagaagccaaatgctgccacccaagactgtgacagagccattgaaataaatcctgattcagctcagcctcacaagtggcgggggaaagcacacagacttctaggccactggggagaagcagaccatgatcttgcccttgcctgtaaattggattatgatgaagatgctagtgcaatgctgaaagaagttcaacatagggcacagaaaattgcagaacatcggagaaagtatgagcgaaaacatgaagagcgagagatcaaagaaagagtagaacgagttaagaaggctcgaaaagagcatgagagagcccagagggaggaagaagccagacgacagtcaggagctcagtatggctcttttccaggtggctttcctgggggaatgcctggtaattttcccagaggaatgcctggaatgggagggggcatgtctggaatggctggaatgcctggattcaatgaaattcttagtgatccagaggttcttgcagccatgcaggatccagaagttatggtggccttccaggatgtggctcagaacccagcaaatgtgtcaaaataccagagcaacccaaaggttatgaatctcatcagtaaattgtcagccaaatttggagccacgtgagatgtctctagctcctgatccactttggatttcctgtcctccaaccctttcctctgcccaccatgccaagcccatgaagatgatagagagcaatggttacatgggcacgc

SEQ ID NO: 466062 - DNA, 2073 bp, Homo sapiens
ggttgtgcatgagcccagaagtgactgttcacagctgcacccttgaatgcatccgaggagaggcatgacctctaccctatcccatcaccatgagccaaccccacaaacatggctacataggaacgggacaatgtaccccaaaataaaggaagccccggagtggaaccctgggctatcgtgcttctggggaaaggggctgacatggtccctgctgcaggatggtcactgctattacagtggtaccatcacgtaaaggctctgcagccactggacagcagtccttcaccatctgtagacaccccacccaagatggcatgaagacccctcaaagaagagctgatgaaacggatgacctggaaggagatgtttcgacaacttggcacagtaacgatgacgatgtgtatagggcgtctccaattgaccgttccatccttcccactgctccacgggctgctcgggaacccaatatcgaccggagccatcttcccaaatcgccaccctacactgcttttctaggaaacctaccctatgatgttacagaagagtcaattaaggaattctttcgaggattaaatatcagtgcagtgcgtttaccatgtgaacccagcaatccagtgaggttgaaaggttttggttatgctgaatttgaggacctggattccctgcttagtgccctgagtctcaaggaagagtctctaggtaacaggagaattcgagtggacgttgctgatcaagcacaggataaagacagggatgattgttcttttggccgtgatagaaatcgggattctgacaaaacaggtacagactggagggctcgtcctgctacagacagctttgatgactacccacctagaagaggtgatgatagctttggagacaagtatcgagatcgttatgattcagaccggtatcgggatgggtatcgggatgggtatcgggatggccaacgccgggatatggatccatatggtggccgggatcgctatgatgaccgaggcagcagagactatgatagaggctatgattcccggataggcagtggcagaagagcatttggcagtgggtatcgcagggatgatgtctcagaggaggcggggaccactatgaagaccgatatgacagacgggatgatcggtcttggagctccagagatgattactctctggatgattataggcgtgatgtccactcgagctgcttctatctttggaggggcaaagcccgttgacacagctgctagagaaagagaagtagaagaacggctacagaaggaacaagagaagttgcagcatcagctggatgagccaaaactagaacgacggcctccggagagacacccaagctggcgaagtgaagaaactcaggaacgggaacggtcgaggacaggaagtgagtcatcacagactgggacctccaccacatctggcagaagtaagtcagcccaggatgcacgaaggagagagaatgagaagtctctagaaaatgaaacactcaataaggaggaagattgccactctccaacttctaaacctcccaaacctgatcagcccctaaaggtaatgccagcccctccaccaaaggagaatgcttgggtgaagcgaagttctaaccctcctgctcgatctcagagctcagacacagagcagcaatcccctacaagtggtgagggaaaagtagctccagctcaaccatctgaggaaggaccagcaaggaaagatgaaaacaaagtagatgggatgaatgtcccaaaaggccaaactgggaactctagccgtggtccaggagatggagggaacaaagaccactggaaggagtcagataggaaagatggcaaaaaggatcaagactccagatctgcacctgagccaaagaaacctgaggaaaatccagcttccaagttcagttctgcaagcaagtatgctgctctctctgttgatggtgaagatgaaaatgagggagaagattatgccgaatagacctctacatcctgtgcttttctcctagtttctctccaccctggaacattcgagagcaaatcaaaacctctatccagacaagacaaaataaaat

SEQ ID NO: 466063 - DNA, 605 bp, Homo sapiens
tttaatgccaataatcatttataaaaatttcgggctttttgcgttctctttccctctcccaacacggcggcctcagcaaaaaagaagaagaagaaggggaagactatctccctaacagactttctggctgaggatgggggtactggtggaggaaggacctatgtttccaaaccagtcagctgagctgatgaaacggatgacctggaaggagatgtttcgacaacttggcacagtaacgatgacgatgtgtatagggcgtctccaattgaccgttccatccttcccactgctccacgggctgctcgggaacccaatatcgaccggagccatcttcccaaatcgccaccctacactgcttttctaggaaacctaccctatgatgttacagaagagtcaattaaggaattctttcgaggaaaatccagcttccaagttcagttctgcaagcaagtatgctgctctctctgttgatggtgaagatgaaaatgagggagaagattatgccgaatagacctctacatcctgtgcttttctcctagtttctctccaccctggaacattcgagagcaaatcaaaacctctatccagacaagacaaaataaaat

SEQ ID NO: 466064 - DNA, 1920 bp, Homo sapiens
aggaagtgcagaggaaatgcgacactacctttcctggaagacaaggccagtcttggtcgcctagcgctcattctaggcaatccacccaccatgaggggaaacgtggagaagaaggaagcttccctgtctgagacacgaatggaagccaggagctcccaggtcatgcgacctgcccaatcaagcagaaacacgtttggagagagaaacaatcacgacacggatctcgaagaaatgtctccctgacggactgggaagtcatctttgttgaagacattgggcgtcagcgagaggcattgaggcacttgagaaacagaccgtattgtggtgtggcttcatttctcagagaagagccgtgaaaagatacaagcatcttctctgacgtgggtccgctggtctccggcgggacaaagagctcctgtggggctcgtgtcctcgtctgcagtgtgttcatcttgatcctagaaaagagaccgctcaggatggggatatttcaattgctccgggaccgaagaatctcctcacgtgggccaggccttcacacacccaaagcggaaccgcgtcggcgaaaaggattgacaaccggtctcatgacccaggcagagaggcagaaacaggctcaccaaagacaggccaccatgcgagaaacagcttgtggtgcacagggcacattcggccaaggacacacacgcacacgggcacacacacacaaaccgacagagagagggaaagaaacacacagagactgagagacagagagagaagagagaatgggagacacacacacacatacacacacagacacacacacagagtcttatagcaaaggcattgaaagacacacacccaggcaacccctgaggctgtggggttctgctttcgacgagaaagacccttcggtgagagagcaccccaggggcacgcaggccgtcctgtcctcgagatcaccgcgtcacgacttttggggagactcacccccaccaacaccgtccagagaggcctgagggagggattccatgctgccttctccggactctgcgtcgggtttcctcaccctgttcggccctttgtgactcttggcatccggagactttcccctcgacccagtggagccgtcaggccggagcctcagagccttgacacccaagcactgccacggaagtctccccctttgccaagcctgggggactggtttctaagacaaccgtgggaaccactgtgacgggagaaactgcttgtgcttcgcgcatgcgcattggctgggccgactcgttctcccctcctggcagtcaggctgcgtcccctttaaagaacgccaccgctgagaactgaccctcacatctcccttcctgaatttctttagggaaagcaacaaccatccctgtaagccatggaggtgtctgggtactggtattttttcccccaaggagggtcggaggtggctggactttgggaaactgtgcaggagtgggtaggggacaatgcccgctcccaacacagcccagaagccccttccgtctgtctcctggtggctgagagctcgggcaagtggagaggcctaagggagaaaaatgaaaaagcagagtctggcttgagtcgttcggcccttcggcctaaaaccctctcaacagggaagccccgaacaggcgtcggagcggagagagcccacgaggcccagaggctgggggtatcgcagcgtcctccacccggtgttgttttcaaatgcgagggcacccagggctttctgaatgtgcgtgtgtgtgtgtgtgtgtgcgcgcgtgtgtgtgtgtgtgtgctggctttaaataagtgactcagtggatagtgtatttctcttttcagaccaaatgggtcaccggctactgaaaaagaatccagacctctgaaagggttcgtgacaaattttttagaagttctcacgct

SEQ ID NO: 466065 - DNA, 1882 bp, Homo sapiens
aggaagtgcagaggaaatgcgacactacctttcctggaagacaaggccagtcttggtcgcctagcgctcattctaggcaatccacccaccatgaggggaaacgtggagaagaaggaagcttccctgtctgagacacgaatggaagccaggagctcccaggtcatgcgacctgcccaatcaagcagaaacacgtttggagagagaaacaatcacgacacggatctcgaagaaatgtctccctgacggactgggaagtcatctttgttgaagacattgggcgtcagcgagaggcattgaggcacttgagaaacagaccgtattgtggtgtggcttcatttctcagagaagagccgtgaaaagatacaagcatcttctctgacgtgggtccgctggtctccggcgggacaaagagctcctgtggggctcgtgtcctcgtctgcagtgtgttcatcttgatcctagaaaagagaccgctcaggatggggatatttcaattgctccgggaccgaagaatctcctcacgtgggccaggccttcacacacccaaagcggaaccgcgtcggcgaaaaggattgacaaccggtctcatgacccaggcagagaggcagaaacaggctcaccaaagacaggccaccatgcgagaaacagcttgtggtgcacagggcacattcggccaaggacacacacgcacacgggcacacacacacaaaccgacagagagagggaaagaaacacacagagactgagagacagagagagaagagagaatgggagacacacacacacatacacacacagacacacacacagagtcttatagcaaaggcattgaaagacacacacccaggcaacccctgaggctgtggggttctgctttcgacgagaaagacccttcggtgagagagcaccccaggggcacgcaggccgtcctgtcctcgagatcaccgcgtcacgacttttggggagactcacccccaccaacaccgtccagagaggcctgagggagggattccatgctgccttctccggactctgcgtcgggtttcctcaccctgttcggccctttgtgactcttggcatccggagactttcccctcgacccagtggagccgtcaggccggagcctcagagccttgacacccaagcactgccacggaagtctccccctttgccaagcctgggggactggtttctaagacaaccgtgggaaccactgtgacgggagaaactgcttgtgcttcgcgcatgcgcattggctgggccgactcgttctcccctcctggcagtcaggctgcgtcccctttaaagaacgccaccgctgagaactgaccctcacatctcccttcctgaatttctttagggaaagcaacaaccatccctgtaagccatgggttttcatgcggaggaaggagagggctagttgtctgagagggtaactgcttaaggctgcagactaggaaatgggattccaggtttaagatagctcctttctggacctcagtccttcacctagtcacctagtcacagggtggattgcctctaaggatacttaggggaaaaggaaccaaatttgggatggttctccttgctttaagccttgataggagacggggaggccaacccttctctgcagaccgtgatcctcactagacagaggagctccaaacctgcccatctcatcccatgcaccgacggtgcctggcctggctccaaactcccgaaaggaactattttacaggtgccaaaaaggggacagtgttgataataataataaaatgaaacaatctgattggggcattgctggatcagaaaatgtgtgacctttttaaagttaaattgttaaaaaattttaactattaaacattttaaatattaaaaaaaa

SEQ ID NO: 466066 - DNA, 428 bp, Homo sapiens
tgagggaccgtagaggtgtggcaggatagctcctttctggacctcagtccttcacctagtcacctagtcacagggtggattgcctctaaggatacttaggggaaaaggaaccaaatttgggatggttctccttgctttaagccttgataggagacggggaggccaacccttctctgcagaccgtgatcctcactagacagaggagctccaaacctgcccatctcatcccatgcaccgacggtgcctggcctggctccaaactcccgaaaggaactattttacaggtgccaaaaaggggacagtgttgataataataataaaatgaaacaatctgattggggcattgctggatcagaaaatgtgtgacctttttaaagttaaattgttaaaaaattttaactattaaacattttaaatattaaaaaaaa

SEQ ID NO: 466067 - DNA, 1310 bp, Homo sapiens
aggaagtgcagaggaaatgcgacactacctttcctggaagacaaggccagtcttggtcgcctagcgctcattctaggcaatccacccaccatgaggggaaacgtggagaagaaggaagcttccctgtctgagacacgaatggaagccaggagctcccaggtcatgcgacctgcccaatcaagcagaaacacgtttggagagagaaacaatcacgacacggatctcgaagaaatgtctccctgacggactgggaagtcatctttgttgaagacattgggcgtcagcgagaggcattgaggcacttgagaaacagaccgtattgtggtgtggcttcatttctcagagaagagccgtgaaaagatacaagcatcttctctgacgtgggtccgctggtctccggcgggacaaagagctcctgtggggctcgtgtcctcgtctgcagtgtgttcatcttgatcctagaaaagagaccgctcaggatggggatatttcaattgctccgggaccgaagaatctcctcacgtgggccaggccttcacacacccaaagcggaaccgcgtcggcgaaaaggattgacaaccggtctcatgacccaggcagagaggcagaaacaggctcaccaaagacaggccaccatgcgagaaacagcttgtggtgcacagggcacattcggccaaggacacacacgcacacgggcacacacacacaaaccgacagagagagggaaagaaacacacagagactgagagacagagagagaagagagaatgggagacacacacacacatacacacacagacacacacacagagtcttatagcaaaggcattgaaagacacacacccaggcaacccctgaggctgtggggttctgctttcgacgagaaagacccttcggtgagagagcaccccaggggcacgcaggccgtcctgtcctcgagatcacctagtcacagggtggattgcctctaaggatacttaggggaaaaggaaccaaatttgggatggttctccttgctttaagccttgataggagacggggaggccaacccttctctgcagaccgtgatcctcactagacagaggagctccaaacctgcccatctcatcccatgcaccgacggtgcctggcctggctccaaactcccgaaaggaactattttacaggtgccaaaaaggggacagtgttgataataataataaaatgaaacaatctgattggggcattgctggatcagaaaatgtgtgacctttttaaagttaaattgttaaaaaattttaactattaaacattttaaatattaaaaaaaa

SEQ ID NO: 466068 - DNA, 818 bp, Homo sapiens
gaaaccagtccccgaggcttggcaaagcaggagccctctgtggcagtgcttgggtgtcggggctctgaggatccggcctcacctctccacggggtcgacgggaacgtctccggatgccaggagtcgcaaagggccgaccacgatgaggaaaccccaggcggggacgggggaagcagcacgggatcccagcctcaggcctgcccggacggtgttggttggggatcaagatgagtacactgcagccgagaacaagagccccagaggaactctttgtcccacaggagagcagcggatccacgccagagaagatgcttgtatcttttcacggctcttctctgagaaatgaagccacaccacgatacagtcagcaagaggaagccgggaatgggagatggcaacagtccctgtcactggaacgctggcctccctggacaagccaccctttaggaaccccaccccttatgcctgtggcggtggcacggtgctgtatcctgcctgggctctggcctctactctctcctccctctggctctgcctcccctgtttctcaggggcctggatgcctctcgctctggccaaatgccttcaaaaaagatgacttcccagtccgtcagggagacaaacaccacacacacgcacaccaaaacaaagctccgaggggcaccacatagtgcccggggcgccggaaaacagcggtacgcaaagggcccccggcgcaatagacggtccccggaccccggcttcttggcccaacggggagaacgggcggtcccctaaaggggccgataaacgcataggccggtaccgcaaaacgcgag

SEQ ID NO: 466069 - DNA, 1789 bp, Homo sapiens
gaaaccagtccccgaggcttggcaaagcaggagccctctgtggcagtgcttgggtgtcggggctctgaggatccggcctcacctctccacggggtcgacgggaacgtctccggatgccaggagtcgcaaagggccgaccacgatgaggaaaccccaggcggggacgggggaagcagcacgggatcccagcctcaggcctgcccggacggtgttggttgggaccgtattgtggtgtggcttcatttctcagagaagagccgtgaaaagatacaagcatcttctctgacgtgggtccgctggtctccggcgggacaaagagctcctgtggggctcgtgtcctcgtctgcagtgtgttcatcttgatcctagaaaagagaccgctcaggatggggatatttcaattgctccgggaccgaagaatctcctcacgtgggccaggccttcacacacccaaagcggaaccgcgtcggcgaaaaggattgacaaccggtctcatgacccaggcagagaggcagaaacaggctcaccaaagacaggccaccatgcgagaaacagcttgtggtgcacagggcacattcggccaaggacacacacgcacacgggcacacacacacaaaccgacagagagagggaaagaaacacacagagactgagagacagagagagaagagagaatgggagacacacacacacatacacacacagacacacacacagagtcttatagcaaaggcattgaaagacacacacccaggcaacccctgaggctgtggggttctgctttcgacgagaaagacccttcggtgagagagcaccccaggggcacgcaggccgtcctgtcctcgagatcaccgcgtcacgacttttggggagactcacccccaccaacaccgtccagagaggcctgagggagggattccatgctgccttctccggactctgcgtcgggtttcctcaccctgttcggccctttgtgactcttggcatccggagactttcccctcgacccagtggagccgtcaggccggagcctcagagccttgacacccaagcactgccacggaagtctccccctttgccaagcctgggggactggtttctaagacaaccgtgggaaccactgtgacgggagaaactgcttgtgcttcgcgcatgcgcattggctgggccgactcgttctcccctcctggcagtcaggctgcgtcccctttaaagaacgccaccgctgagaactgaccctcacatctcccttcctgaatttctttagggaaagcaacaaccatccctgtaagccatgggttttcatgcggaggaaggagagggctagttgtctgagagggtaactgcttaaggctgcagactaggaaatgggattccaggtttaagatagctcctttctggacctcagtccttcacctagtcacctagtcacagggtggattgcctctaaggatacttaggggaaaaggaaccaaatttgggatggttctccttgctttaagccttgataggagacggggaggccaacccttctctgcagaccgtgatcctcactagacagaggagctccaaacctgcccatctcatcccatgcaccgacggtgcctggcctggctccaaactcccgaaaggaactattttacaggtgccaaaaaggggacagtgttgataataataataaaatgaaacaatctgattggggcattgctggatcagaaaatgtgtgacctttttaaagttaaattgttaaaaaattttaactattaaacattttaaatattaaaaaaaa

SEQ ID NO: 466070 - DNA, 1176 bp, Homo sapiens
ggaaggcggcggaggacagcaaggtggctggccggcaggccaatggcggccaacgccacttccggccgccctccgagcatcgctcttcggcaacccgaagccacaggatggaggagggggatcccagcaaaggtagcgactaaggggacccaagcagaacgggagggcgacgtccggagcggcggcagagccaggggacgctgtgtgaggctggcaaagcggtgttcacctagttctctcgggctccgccgccgccggaggaggacaggaggccggcaaggcgacccccaaatcttcctaggctctgacttccgtctcctaacccccgcaaattccaacccggtcttggaaaatcccgcgagaacgggctcccgaattgtcattgggatctcgcgagaacgaaatcttcctttctgtgggcggagcaatcttcccgatgtctcttccctctgaggccagtagcaggaagggcctcgggagttgcgagtgtcgcgaggtttgaggtcgctcggtgggccgggcgctgtgcgaagctagaaataactgggggcatggagaatgcggtggctgtaaagggccgctgaggcggtggaggcctggcagagagcgtccccgcggtcgcggcttctggcttctctgtggagcttggttcttccgtggtggtgcagcaccccaggaacttcaggaaccagtccttccttggagagctccccgggacagccacgggggccaagtgaaactagcgcgttttcttggatcctacactttatagtgagtcataaatactttaaatacaaagccaacaacatttgctgcaaataaacgtaaaaatactgttaaagtgtaaagtgttttcctccgtaccatctgacgtttctggcggttcgttgaacgcgagagaacgctgagccgtctgcactgagcccgggagcatcttcagggcagcgccgcccacgcgcgaggtgaatgaaggacacggcctcttgacactcccaggcagcacagatagacggatcctggctagaagtgaccccaggatttttttattatcaagagagactagaagaatcatgagacttttcctagttgcctttcaagaatatgaagaaaaaaatggttctcaaagtgggtttgaatgagtattgttccaataaatgaacttatattcatatttca

SEQ ID NO: 466071 - DNA, 1121 bp, Homo sapiens
ggaaggcggcggaggacagcaaggtggctggccggcaggccaatggcggccaacgccacttccggccgccctccgagcatcgctcttcggcaacccgaagccacaggatggaggagggggatcccagcaaaggtagcgactaaggggacccaagcagaacgggagggcgacgtccggagcggcggcagagccaggggacgctgtgtgaggctggcaaagcggtgttcacctagttctctcgggctccgccgccgccggaggaggacaggaggccggcaaggcgacccccaaatcttcctaggctctgacttccgtctcctaacccccgcaaattccaacccggtcttggaaaatcccgcgagaacgggctcccgaattgtcattgggatctcgcgagaacgaaatcttcctttctgtgggcggagcaatcttcccgatgtctcttccctctgaggccagtagcaggaagggcctcgggagttgcgagtgtcgcgaggtttgaggtcgctcggtgggccgggcgctgtgcgaagctagaaataactgggggcatggagaatgcggtggctgtaaagggccgctgaggcggtggaggcctggcagagagcgtccccgcggtcgcggcttctggcttctctgtggagcttggttcttccgtggtggtgcagcaccccaggaacttcaggaaccagtccttccttggagagctccccgggacagccacgggggccaagtgaaactagcgcgttttcttggatcctacactttatagtgagtcataaatactttaaatacaaagccaacaacatttgctgcaaataaacgtaaaaatactgttaaagtgtaaagtgttttcctccgtaccatctgacgtttctggcggttcgttgaacgcgagagaacgctgagccgtctgcactgagcccgggagcatcttcagggcagcgccgcccacgcgcgagtggctagaagtgaccccaggatttttttattatcaagagagactagaagaatcatgagacttttcctagttgcctttcaagaatatgaagaaaaaaatggttctcaaagtgggtttgaatgagtattgttccaataaatgaacttatattcatatttca

SEQ ID NO: 466072 - DNA, 2110 bp, Homo sapiens
ctttgccagcttctgtccacattccttggctttggtcccttcctccatcttcaaagccagtgatatgccatctctctgaaccttccatcctcaagtctaccgctgattgcagctggaaaagattctgagggctcacctgagtaatccaggatcatcttcccatttccaggtctctgcccttgatcacatcagcagaatccttttgccattggctagaagtgaccccaggatttttttattatcaagagagactagaagaatcatgagacttttcctagttgcctttcaagaatatgaagaaaaaaatggttctcaaagtgggtttgaatgagtattgttccaataaatgaacttatattcatatttcatcccctgagtcctggtgtttcaacatccattagaactgaataatcatactgcatatcaaagtttgtgggaaattgctaaagtgtaaaaaatgctcatattgaaaaagaagaaaagctgaaaattaattgtgcttccaactttaaaaaaggacaacaagctaatcctaaagaaactagaataaaaggaaaaaataaacagaagttaaagagtaattttaaaaaatacaatagaaattatcaacgaagccaaaagttgattctttgaaaagattaatgaagtaggcaaaccactggtgagatgaatcaagaaaaatagagaaaagactcaaataaacattaggaatggaaaatagggcaatgctaaagagaattcaaagatcagaaaaatatgggagtatactaaaaacgatttcatgcccaagtgttcaaatctatattgcctttaaaaatatataaaaaaggagccggacactggctcatgcctataatcccagcactttggaaggctgaggtgggtgaatcacaaggtcaagagatcaagaccatcctggctaacacagggaaaacccgtctctactaaaaatacaaaaaattagctgggcgtggtggcacacgcttatagtcccagctgctcaggaggctgaggcaggagaattgcttgaacccatgaggcagaggttgcagcgagcagagatggccccactggactccagccttggcgacagagagagactccatctcaaaaaaaaaaaaaaaaatcaaaaaggaaaagaagcactgaagaaatccataaccgttggagaagcttgaatcagtagttgataatgtccctccaagaaaagaccagatgtaagtgactgtacaggaaagttctgccaaatgtcaaagggaatagataaatatcacataaactcttccagagaatacaagaaaaggaacactccccaacttattttataaacttggttaaatcttgatagcaaaatttaataaggacaccatgacaagtgaaattataagcaaattttacttacagttatatgcaaaagttctaaacaaaatactggacaactgaatctaattttgaataatactagcaagaataataataataacaataataataataataatgcatcatgaccaagttgggtttacctcaagaatgcaaatatagtttaaaactggaaaatctagtagtgaaatttaccacactaagaaataaagaagaaaaattatgtcatctcaacagatcgaaaaattttctaaaatccaaccaaatattagcaaaaaagcaataaaggaaaatttcttaacttaataaagagtatctattcgaaacctgcagcaagcatgatagttaatgatgaaatgttagacactgtctttttaaaaccataaacacaatgatatctgttatcactacttctactcatcattgatcttaaccatttcaataataaaagatactatatataaattatagatattgagaaggaagaccaaaactgctactattcacaaacaatattattattcacctaaaaagcaagagaatatgcaagtaaatctttagaataagagaattcaatatggtttgaggatacaagtgcaatttataaaaatcaactgtatttctatacactagctacacaagttagaaaatataatttttaaaatgtatttttacagtagcaaccaataatatataagaatagctaataattatctaaaaatgtgtg

SEQ ID NO: 466073 - DNA, 2958 bp, Homo sapiens
ggaaggcggcggaggacagcaaggtggctggccggcaggccaatggcggccaacgccacttccggccgccctccgagcatcgctcttcggcaacccgaagccacaggatggaggagggggatcccagcaaaggtagcgactaaggggacccaagcagaacgggagggcgacgtccggagcggcggcagagccaggggacgctgtgtgaggctggcaaagcggtgttcacctagttctctcgggctccgccgccgccggaggaggacaggaggccggcaaggcgacccccaaatcttcctaggctctgacttccgtctcctaacccccgcaaattccaacccggtcttggaaaatcccgcgagaacgggctcccgaattgtcattgggatctcgcgagaacgaaatcttcctttctgtgggcggagcaatcttcccgatgtctcttccctctgaggccagtagcaggaagggcctcgggagttgcgagtgtcgcgaggtttgaggtcgctcggtgggccgggcgctgtgcgaagctagaaataactgggggcatggagaatgcggtggctgtaaagggccgctgaggcggtggaggcctggcagagagcgtccccgcggtcgcggcttctggcttctctgtggagcttggttcttccgtggtggtgcagcaccccaggaacttcaggaaccagtccttccttggagagctccccgggacagccacgggggccaagtgaaactagcgcgttttcttggatcctacactttatagtgagtcataaatactttaaatacaaagccaacaacatttgctgcaaataaacgtaaaaatactgttaaagtgtaaagtgttttcctccgtaccatctgacgtttctggcggttcgttgaacgcgagagaacgctgagccgtctgcactgagcccgggagcatcttcagggcagcgccgcccacgcgcgaggtgaatgaaggacacggcctcttgacactcccaggcagcacagatagacggatccgtctctgcccttgatcacatcagcagaatccttttgccattggctagaagtgaccccaggatttttttattatcaagagagactagaagaatcatgagacttttcctagttgcctttcaagaatatgaagaaaaaaatggttctcaaagtgggtttgaatgagtattgttccaataaatgaacttatattcatatttcatcccctgagtcctggtgtttcaacatccattagaactgaataatcatactgcatatcaaagtttgtgggaaattgctaaagtgtaaaaaatgctcatattgaaaaagaagaaaagctgaaaattaattgtgcttccaactttaaaaaaggacaacaagctaatcctaaagaaactagaataaaaggaaaaaataaacagaagttaaagagtaattttaaaaaatacaatagaaattatcaacgaagccaaaagttgattctttgaaaagattaatgaagtaggcaaaccactggtgagatgaatcaagaaaaatagagaaaagactcaaataaacattaggaatggaaaatagggcaatgctaaagagaattcaaagatcagaaaaatatgggagtatactaaaaacgatttcatgcccaagtgttcaaatctatattgcctttaaaaatatataaaaaaggagccggacactggctcatgcctataatcccagcactttggaaggctgaggtgggtgaatcacaaggtcaagagatcaagaccatcctggctaacacagggaaaacccgtctctactaaaaatacaaaaaattagctgggcgtggtggcacacgcttatagtcccagctgctcaggaggctgaggcaggagaattgcttgaacccatgaggcagaggttgcagcgagcagagatggccccactggactccagccttggcgacagagagagactccatctcaaaaaaaaaaaaaaaaatcaaaaaggaaaagaagcactgaagaaatccataaccgttggagaagcttgaatcagtagttgataatgtccctccaagaaaagaccagatgtaagtgactgtacaggaaagttctgccaaatgtcaaagggaatagataaatatcacataaactcttccagagaatacaagaaaaggaacactccccaacttattttataaacttggttaaatcttgatagcaaaatttaataaggacaccatgacaagtgaaattataagcaaattttacttacagttatatgcaaaagttctaaacaaaatactggacaactgaatctaattttgaataatactagcaagaataataataataacaataataataataataatgcatcatgaccaagttgggtttacctcaagaatgcaaatatagtttaaaactggaaaatctagtagtgaaatttaccacactaagaaataaagaagaaaaattatgtcatctcaacagatcgaaaaattttctaaaatccaaccaaatattagcaaaaaagcaataaaggaaaatttcttaacttaataaagagtatctattcgaaacctgcagcaagcatgatagttaatgatgaaatgttagacactgtctttttaaaaccataaacacaatgatatctgttatcactacttctactcatcattgatcttaaccatttcaataataaaagatactatatataaattatagatattgagaaggaagaccaaaactgctactattcacaaacaatattattattcacctaaaaagcaagagaatatgcaagtaaatctttagaataagagaattcaatatggtttgaggatacaagtgcaatttataaaaatcaactgtatttctatacactagctacacaagttagaaaatataatttttaaaatgtatttttacagtagcaaccaataatatataagaatagctaataattatctaaaaatgtgtg

SEQ ID NO: 466074 - DNA, 1216 bp, Homo sapiens
ggaaggcggcggaggacagcaaggtggctggccggcaggccaatggcggccaacgccacttccggccgccctccgagcatcgctcttcggcaacccgaagccacaggatggaggagggggatcccagcaaaggtagcgactaaggggacccaagcagaacgggagggcgacgtccggagcggcggcagagccaggggacgctgtgtgaggctggcaaagcggtgttcacctagttctctcgggctccgccgccgccggaggaggacaggaggccggcaaggcgacccccaaatcttcctaggctctgacttccgtctcctaacccccgcaaattccaacccggtcttggaaaatcccgcgagaacgggctcccgaattgtcattgggatctcgcgagaacgaaatcttcctttctgtgggcggagcaatcttcccgatgtctcttccctctgaggccagtagcaggaagggcctcgggagttgcgagtgtcgcgaggtttgaggtcgctcggtgggccgggcgctgtgcgaagctagaaataactgggggcatggagaatgcggtggctgtaaagggccgctgaggcggtggaggcctggcagagagcgtccccgcggtcgcggcttctggcttctctgtggagcttggttcttccgtggtggtgcagcaccccaggaacttcaggaaccagtccttccttggagagctccccgggacagccacgggggccaagtgaaactagcgcgttttcttggatcctacactttatagtgagtcataaatactttaaatacaaagccaacaacatttgctgcaaataaacgtaaaaatactgttaaagtgtaaagtgttttcctccgtaccatctgacgtttctggcggttcgttgaacgcgagagaacgctgagccgtctgcactgagcccgggagcatcttcagggcagcgccgcccacgcgcgaggtgaatgaaggacacggcctcttgacactcccaggcagcacagatagacggatccgtctctgcccttgatcacatcagcagaatccttttgccattggctagaagtgaccccaggatttttttattatcaagagagactagaagaatcatgagacttttcctagttgcctttcaagaatatgaagaaaaaaatggttctcaaagtgggtttgaatgagtattgttccaataaatgaacttatattcatatttca

SEQ ID NO: 466075 - DNA, 2918 bp, Homo sapiens
ggaaggcggcggaggacagcaaggtggctggccggcaggccaatggcggccaacgccacttccggccgccctccgagcatcgctcttcggcaacccgaagccacaggatggaggagggggatcccagcaaaggtagcgactaaggggacccaagcagaacgggagggcgacgtccggagcggcggcagagccaggggacgctgtgtgaggctggcaaagcggtgttcacctagttctctcgggctccgccgccgccggaggaggacaggaggccggcaaggcgacccccaaatcttcctaggctctgacttccgtctcctaacccccgcaaattccaacccggtcttggaaaatcccgcgagaacgggctcccgaattgtcattgggatctcgcgagaacgaaatcttcctttctgtgggcggagcaatcttcccgatgtctcttccctctgaggccagtagcaggaagggcctcgggagttgcgagtgtcgcgaggtttgaggtcgctcggtgggccgggcgctgtgcgaagctagaaataactgggggcatggagaatgcggtggctgtaaagggccgctgaggcggtggaggcctggcagagagcgtccccgcggtcgcggcttctggcttctctgtggagcttggttcttccgtggtggtgcagcaccccaggaacttcaggaaccagtccttccttggagagctccccgggacagccacgggggccaagtgaaactagcgcgttttcttggatcctacactttatagtgagtcataaatactttaaatacaaagccaacaacatttgctgcaaataaacgtaaaaatactgttaaagtgtaaagtgttttcctccgtaccatctgacgtttctggcggttcgttgaacgcgagagaacgctgagccgtctgcactgagcccgggagcatcttcagggcagcgccgcccacgcgcgaggtgaatgaaggacacggcctcttgacactcccaggcagcacagatagacggatcctggctagaagtgaccccaggatttttttattatcaagagagactagaagaatcatgagacttttcctagttgcctttcaagaatatgaagaaaaaaatggttctcaaagtgggtttgaatgagtattgttccaataaatgaacttatattcatatttcatcccctgagtcctggtgtttcaacatccattagaactgaataatcatactgcatatcaaagtttgtgggaaattgctaaagtgtaaaaaatgctcatattgaaaaagaagaaaagctgaaaattaattgtgcttccaactttaaaaaaggacaacaagctaatcctaaagaaactagaataaaaggaaaaaataaacagaagttaaagagtaattttaaaaaatacaatagaaattatcaacgaagccaaaagttgattctttgaaaagattaatgaagtaggcaaaccactggtgagatgaatcaagaaaaatagagaaaagactcaaataaacattaggaatggaaaatagggcaatgctaaagagaattcaaagatcagaaaaatatgggagtatactaaaaacgatttcatgcccaagtgttcaaatctatattgcctttaaaaatatataaaaaaggagccggacactggctcatgcctataatcccagcactttggaaggctgaggtgggtgaatcacaaggtcaagagatcaagaccatcctggctaacacagggaaaacccgtctctactaaaaatacaaaaaattagctgggcgtggtggcacacgcttatagtcccagctgctcaggaggctgaggcaggagaattgcttgaacccatgaggcagaggttgcagcgagcagagatggccccactggactccagccttggcgacagagagagactccatctcaaaaaaaaaaaaaaaaatcaaaaaggaaaagaagcactgaagaaatccataaccgttggagaagcttgaatcagtagttgataatgtccctccaagaaaagaccagatgtaagtgactgtacaggaaagttctgccaaatgtcaaagggaatagataaatatcacataaactcttccagagaatacaagaaaaggaacactccccaacttattttataaacttggttaaatcttgatagcaaaatttaataaggacaccatgacaagtgaaattataagcaaattttacttacagttatatgcaaaagttctaaacaaaatactggacaactgaatctaattttgaataatactagcaagaataataataataacaataataataataataatgcatcatgaccaagttgggtttacctcaagaatgcaaatatagtttaaaactggaaaatctagtagtgaaatttaccacactaagaaataaagaagaaaaattatgtcatctcaacagatcgaaaaattttctaaaatccaaccaaatattagcaaaaaagcaataaaggaaaatttcttaacttaataaagagtatctattcgaaacctgcagcaagcatgatagttaatgatgaaatgttagacactgtctttttaaaaccataaacacaatgatatctgttatcactacttctactcatcattgatcttaaccatttcaataataaaagatactatatataaattatagatattgagaaggaagaccaaaactgctactattcacaaacaatattattattcacctaaaaagcaagagaatatgcaagtaaatctttagaataagagaattcaatatggtttgaggatacaagtgcaatttataaaaatcaactgtatttctatacactagctacacaagttagaaaatataatttttaaaatgtatttttacagtagcaaccaataatatataagaatagctaataattatctaaaaatgtgtg

SEQ ID NO: 466076 - DNA, 784 bp, Homo sapiens
gtcacacgtccagaggccgagccgtcgcgtacctaggatgccgcgtggaagccgaagccgcacctcccgcatggcccctccagccagccgggcccctcagatgagagctgcacccaggccagcaccagttgctcagccaccagcagcggcacccccatctgcagttggctcttctgctgctgcgccccggcagccaggtctgatggcccagatggcaaccactgcagctggcgtggctgtgggctctgctgtggggcacacacagggtcacgccgttaccggaggcttcagtggaggaagtaatgctgagcctgcgaggcctgacatcgcttaccaggagcctcagggaacccagccggcacagcagcagcagccttgcttctatgggatcaaacagtttctggagtgtgcccagaaccagggcgacatcaagctctgtgaggatttcagtaaggtgctgaaacatcagcctgactccatgcatgcatcgcctgcaacccagcaattccacttccagaaacacaatctgcaggaattcccacacatgagcgtaagaagactgtccaaagatgtgcattgcagccctgtttataacagaaaagagtggaaacagctttcatctgtaaggaacaggataatagaactggagattaattcatttttatgaaagtatacaagagttaaaatgaattgactgcttctacccggataaatctcagaaacacaatggtgaattaaaaaacaattgaaaatgaaatacacagtagcataccatttgtgtaaa

SEQ ID NO: 466077 - DNA, 2348 bp, Homo sapiens
cgcggcccgccgtcccggattggacggttcgcgggttccccctggaggccaccttctggtcctgctgcggaacgacgggcgggccttggaggcggggagaggagcgtcgggagttgtaggcgatgggcgtggctgctgcggagcgctcgggcctcagcccggatggcggctgcgacgcgcggctgccggccctggggctcgctcctcgggctgctcgggctggtctcggccgcggccgccgcctgggacctggcttccctgcgctgcaccttgggcgccttttgcgaatgcgacttccggcccgacttgccgggtctggagtgtgacctggctcagcacctggccggccagcatctggccaaggcgctggtggtgaaggcgctgaaggcctttgtgcgggacccagcccccaccaagccgctggtcctctccctgcacggctggaccggcaccggcaaatcctatgtcagctccctgctggcgcactacctcttccagggcggcctccgcagcccccgcgtgcaccacttttctcccgtcctccacttcccccaccccagccacatcgagcgctacaagaaggatctgaagagctgggtccaagggaacctcactgcctgtggccgctccctcttcctcttcgatgagatggacaagatgcccccaggcctgatggaagtcctgcggcctttcctgggctcctcctgggtggtatacgggaccaattaccgcaaagccatcttcatcttcatcagcaacacgggtggcgagcagatcaaccaggtggcattggaggcgtggcgcagccggcgggaccgcgaggagatcctcctgcaggagctggagccggtcatctcccgcgcggtgctggacaacccgcaccatggcttctcaaactcgggcatcatggaagagcgcctcctagacgcagtggtgcccttcctcccgctccagcggcaccacgtccggcactgcgtgctcaacgagctggcccagctgggcctggagccaagggatgaggttgtccaggctgtgctggacagcaccaccttcttccctgaagacgagcagctcttctcctccaacggctgcaagacctccgaggattgcgtcttcaacagtgacgagtcagagaatgtcacggcggtggctgaggtgctcctgtattcctggcagatagccgacatctcagtctctgaggtgcctgtggtcctgactaggaagggggtgccaaaagcacccatcaggcctgccgcacctgccctggacagctctgggaaaaggggcttcccaatctcacactggcctgtggcccagaggcttcgcatcaccaaagggaaagacctgcagatcacccccgcccagcccccagcgacccagaccctgaggggtggggctgctagggccctatgtactggggctaaaagccccctggccatgcacaaggtttgtgggcttatttcagggacagggctaggaggggatgagagcagagcagcagctaccatgaagtgcctggagcaagcctcacctcgtcctgggcagccccgcaacagtgttactcccgctctagagccactcgccccaggccacccagctgtcagcagcggggccgaacgcacacctaggccagcggtcttcgacccctgagctttgactaccctgctgccttagcttcctgaggcctggcggaagcaccagggacttacagctcatgctggaggctgaagaggtctggtcaaggtagctgtcagacagggacgccaccttgctaggtatgagctctgattttttctcctatggcaagaaacaggctttgtagttcagatggtaggaggcccgtgcagctgcacctctagaaggccagcagccctgggcccctcggtggtcattctcctgagcttggaggtctttgaaggtgccaggttagagtggggtggggacacgcagaggctaagcctggcaggaaggggagcgaccaggctagacaggcatggtgccgtgagaacggttgtgttgaaggagctgctagcgccttggtttttttcaactgcaaaatgaaaattagttcaggtgtggaacaggcttctgtaaattgtaaagggctgtgccctggggaatgcttacggaggacttgaggagcttctgtaggctttacccccatccattctcccaatacaagtgaagacggagggatggggagagctgctaatgaccatttcactgaacaggaaaccaaagctcagagcccctaagcaacctgtccagggccactcggctaagaagcagagaggccgggtttgaatccaggtctgctggctgccacagccagaccctacctaggctgc

SEQ ID NO: 466078 - DNA, 1638 bp, Homo sapiens
cgcggcccgccgtcccggattggacggttcgcgggttccccctggaggccaccttctggtcctgctgcggaacgacgggcgggccttggaggcggggagaggagcgtcgggagttgtaggcgatgggcgtggctgctgcggagcgctcgggcctcagcccggatggcggctgcgacgcgcggctgccggccctggggctcgctcctcgggctgctcgggctggtctcggccgcggccgccgcctgggacctggcttccctgcgctgcaccttgggcgccttttgcgaatgcgacttccggcccgacttgccgggtctggagtgtgacctggctcagcacctggccggccagcatctggccaaggcgctggtggtgaaggcgctgaaggcctttgtgcgggacccagcccccaccaagccgctggtcctctccctgcacggctggaccggcaccggcaaatcctatgtcagctccctgctggcgcactacctcttccagggcggcctccgcagcccccgcgtgcaccacttttctcccgtcctccacttcccccaccccagccacatcgagcgctacaagaaggatctgaagagctgggtccaagggaacctcactgcctgtggccgctccctcttcctcttcgatgagatggacaagatgcccccaggcctgatggaagtcctgcggcctttcctgggctcctcctgggtggtatacgggaccaattaccgcaaagccatcttcatcttcatcagcaacacgggtggcgagcagatcaaccaggtggcattggaggcgtggcgcagccggcgggaccgcgaggagatcctcctgcaggagctggagccggtcatctcccgcgcggtgctggacaacccgcaccatggcttctcaaactcgggcatcatggaagagcgcctcctagacgcagtggtgcccttcctcccgctccagcggcaccacgtccggcactgcgtgctcaacgagctggcccagctgggcctggagccaagggatgaggttgtccaggctgtgctggacagcaccaccttcttccctgaagacgagcagctcttctcctccaacggctgcaagaccgtggcctcccgaatcgccttcttcctctgactctctgagtggtgtcctcggcccccctgatggccaggccatgcaggaaaggccaggggcctctgtcacaggaacccagagcaccaagtgagatgaacggagtgtcggctaggccacgggacagatggccaggaagggccctggcctctaaactggctcgagagcatcttggccccggccaccttccccagggaaacccctggtcaccccagaacctcactgagccttgacctccccctgcagcctgagccttcttactgtgaattataactcagggactgtggctcgtggcggtgctccctcctcagtctgccacccttgccccttgcctccttggtcgggcaccatacctcctcccctccaccccacaccctgtgtccatatcaagccaggtggagccttctcagtttccagaaatggagggactcaagctgccacttgggcctggttttagatgtttttaattttgtaaaagaaaacaagtataataaactcagctgtgggaccaga

SEQ ID NO: 466079 - DNA, 1372 bp, Homo sapiens
cgcggcccgccgtcccggattggacggttcgcgggttccccctggaggccaccttctggtcctgctgcggaacgacgggcgggccttggaggcggggagaggagcgtcgggagttgtaggcgatgggcgtggctgctgcggagcgctcgggcctcagcccggatggcggctgcgacgcgcggctgccggccctggggctcgctcctcgggctgctcgggctggtctcggccgcggccgccgcctgggacctggcttccctgcgctgcaccttgggcgccttttgcgaatgcgacttccggcccgacttgccggaaggatctgaagagctgggtccaagggaacctcactgcctgtggccgctccctcttcctcttcgatgagatggacaagatgcccccaggcctgatggaagtcctgcggcctttcctgggctcctcctgggtggtatacgggaccaattaccgcaaagccatcttcatcttcatcagcaacacgggtggcgagcagatcaaccaggtggcattggaggcgtggcgcagccggcgggaccgcgaggagatcctcctgcaggagctggagccggtcatctcccgcgcggtgctggacaacccgcaccatggcttctcaaactcgggcatcatggaagagcgcctcctagacgcagtggtgcccttcctcccgctccagcggcaccacgtccggcactgcgtgctcaacgagctggcccagctgggcctggagccaagggatgaggttgtccaggctgtgctggacagcaccaccttcttccctgaagacgagcagctcttctcctccaacggctgcaagaccgtggcctcccgaatcgccttcttcctctgactctctgagtggtgtcctcggcccccctgatggccaggccatgcaggaaaggccaggggcctctgtcacaggaacccagagcaccaagtgagatgaacggagtgtcggctaggccacgggacagatggccaggaagggccctggcctctaaactggctcgagagcatcttggccccggccaccttccccagggaaacccctggtcaccccagaacctcactgagccttgacctccccctgcagcctgagccttcttactgtgaattataactcagggactgtggctcgtggcggtgctccctcctcagtctgccacccttgccccttgcctccttggtcgggcaccatacctcctcccctccaccccacaccctgtgtccatatcaagccaggtggagccttctcagtttccagaaatggagggactcaagctgccacttgggcctggttttagatgtttttaattttgtaaaagaaaacaagtataataaactcagctgtgggaccaga

SEQ ID NO: 466080 - DNA, 1244 bp, Homo sapiens
cgcggcccgccgtcccggattggacggttcgcgggttccccctggaggccaccttctggtcctgctgcggaacgacgggcgggccttggaggcggggagaggagcgtcgggagttgtaggcgatgggcgtggctgctgcggagcgctcgggcctcagcccggatggcggctgcgacgcgcggctgccggccctggggctcgctcctcgggctgctcgggctggtctcggccgcggccgccgcctgggacctggcttccctgcgctgcaccttgggcgccttttgcgaatgcgacttccggcccgacttgccggaaggatctgaagagctgggtccaagggaacctcactgcctgtggccgctccctcttcctcttcgatgagatggacaagatgcccccaggcctgatggaagtcctgcggcctttcctgggctcctcctgggtggtatacgggaccaattaccgcaaagccatcttcatcttcatcagatggcttctcaaactcgggcatcatggaagagcgcctcctagacgcagtggtgcccttcctcccgctccagcggcaccacgtccggcactgcgtgctcaacgagctggcccagctgggcctggagccaagggatgaggttgtccaggctgtgctggacagcaccaccttcttccctgaagacgagcagctcttctcctccaacggctgcaagaccgtggcctcccgaatcgccttcttcctctgactctctgagtggtgtcctcggcccccctgatggccaggccatgcaggaaaggccaggggcctctgtcacaggaacccagagcaccaagtgagatgaacggagtgtcggctaggccacgggacagatggccaggaagggccctggcctctaaactggctcgagagcatcttggccccggccaccttccccagggaaacccctggtcaccccagaacctcactgagccttgacctccccctgcagcctgagccttcttactgtgaattataactcagggactgtggctcgtggcggtgctccctcctcagtctgccacccttgccccttgcctccttggtcgggcaccatacctcctcccctccaccccacaccctgtgtccatatcaagccaggtggagccttctcagtttccagaaatggagggactcaagctgccacttgggcctggttttagatgtttttaattttgtaaaagaaaacaagtataataaactcagctgtgggaccaga

SEQ ID NO: 466081 - DNA, 2221 bp, Homo sapiens
cgcggcccgccgtcccggattggacggttcgcgggttccccctggaggccaccttctggtcctgctgcggaacgacgggcgggccttggaggcggggagaggagcgtcgggagttgtaggcgatgggcgtggctgctgcggagcgctcgggcctcagcccggatggcggctgcgacgcgcggctgccggccctggggctcgctcctcgggctgctcgggctggtctcggccgcggccgccgcctgggacctggcttccctgcgctgcaccttgggcgccttttgcgaatgcgacttccggcccgacttgccgggtctggagtgtgacctggctcagcacctggccggccagcatctggccaaggcgctggtggtgaaggcgctgaaggcctttgtgcgggacccagcccccaccaagccgctggtcctctccctgcacggctggaccggcaccggcaaatcctatgtcagctccctgctggcgcactacctcttccagggcggcctccgcagcccccgcgtgcaccacttttctcccgtcctccacttcccccaccccagccacatcgagcgctacaagaaggatctgaagagctgggtccaagggaacctcactgcctgtggccgctccctcttcctcttcgatgagatggacaagatgcccccaggcctgatggaagtcctgcggcctttcctgggctcctcctgggtggtatacgggaccaattaccgcaaagccatcttcatcttcatcagcaacacgggtggcgagcagatcaaccaggtggcattggaggcgtggcgcagccggcgggaccgcgaggagatcctcctgcaggagctggagccggtcatctcccgcgcggtgctggacaacccgcaccatggcttctcaaactcgggcatcatggaagagcgcctcctagacgcagtggtgcccttcctcccgctccagcggcaccacgtccggcactgcgtgctcaacgagctggcccagctgggcctggagccaagggatgaggttgtccaggctgtgctggacagcaccaccttcttccctgaagacgagcagctcttctcctccaacggctgcaagaccgtggcctcccgaatcgccttcttcctctgactctctgagtggtgtcctcggcccccctgatggccaggccatgcaggaaaggccaggggcctctgtcacaggaacccagagcaccaagtgagatgaacggagtgtcggctaggccacgggacagatggccaggaagggccctggcctctaaactggctcgagagcatcttggccccggccaccttccccagggaaacccctggtcaccccagaacctcactgagccttgacctccccctgcagcctgagccttcttactgtgaattataactcagggactgtggctcgtggcggtgctccctcctcagtctgccacccttgccccttgcctccttggtcgggcaccatacctcctcccctccaccccacaccctgtgtccatatcaagccaggtggagccttctcagtttccagaaatggagggactcaagctgccacttgggcctggttttagatgtttttaattttgtaaaagaaaacaagtataataaactcagctgtgggaccagaggactgttgctaagacttttaattgctctggaaggaggcagctggctgagtgccagtgtggggaggtgggtagaactcatcccctccccagcaagaagggagggtctggatggtcccttcagacagcttcatagtaggtgaggtcctgatcaacctcagttttgctgagacttgggctgggtccccaggtggactcggccttgctggaagttgagctcatgccctggctcttgccctgggcaccctcagccttgctggacctctggccctggccttgggcatactcagtcttgctgaggctccagtttgagtcatagaaagcctcagtcttggtggaacttcggagcagtcccctgcttcggccctgggtggcatcaaccttgctgggtctccagctccggccacgagcagccttgacctttctgggcctctgccttgggctccgggtggtcttggtcttgctgggctcctgccttgggccctgggtggcctcaatctcgctggagctctgcctctggccctgagtggcctcagtcttgctggagctctgcccctggccctgggtggccctggtcttgctgga

SEQ ID NO: 466082 - DNA, 1068 bp, Homo sapiens
  misc_feature (1015)..(1015): n is a, c, g, or t
  misc_feature (1022)..(1022): n is a, c, g, or t
cgcggcccgccgtcccggattggacggttcgcgggttccccctggaggccaccttctggtcctgctgcggaacgacgggcgggccttggaggcggggagaggagcgtcgggagttgtaggcgatgggcgtggctgctgcggagcgctcgggcctcagcccggatggcggctgcgacgcgcggctgccggccctggggctcgctcctcgggctgctcgggctggtctcggccgcggccgccgcctgggacctggcttccctgcgctgcaccttgggcgccttttgcgaatgcgacttccggcccgacttgccggaaggatctgaagagctgggtccaagggaacctcactgcctgtggccgctccctcttcctcttcgatgagatggacaagatgcccccaggcctgatggaagtcctgcggcctttcctgggctcctcctgggtggtatacgggaccaattaccgcaaagccatcttcatcttcatcagcaacacgggtggcgagcagatcaaccaggtggcattggaggcgtggcgcagccggcgggaccgcgaggagatcctcctgcaggagctggagccggtcatctcccgcgcggtgctggacaacccgcacccgtgagtctggctcagcagccccctcccgggcagcttcaccccacacccaggggccaggctctcccggggtctcatgctttgcccactgacccggcagttctgagcctggctttggcactcccagctttgtgactttgggtgagccttacagcccctgagtcctacacccagaaggcggctgagggaactgaggccagcatttttcctcctgcccctgggggtttggggccggcttctcccctcttgtgaagcacaaagtcccctccccacctacccttcctgcagatggcttctcaaactcgggcatcatggaagagcgcctcctagacgcagtggtgcccttcctcccgctccagcggcaccacgtccggcactgcgtgctcaacgagctggccantggctgncaaggtcgtttcaggtggtggagcccttttccgaaagaggttctcg

SEQ ID NO: 466083 - DNA, 1153 bp, Homo sapiens
  misc_feature (1153)..(1153): n is a, c, g, or t
cgcggcccgccgtcccggattggacggttcgcgggttccccctggaggccaccttctggtcctgctgcggaacgacgggcgggccttggaggcggggagaggagcgtcgggagttgtaggcgatgggcgtggctgctgcggagcgctcgggcctcagcccggatggcggctgcgacgcgcggctgccggccctggggctcgctcctcgggctgctcgggctggtctcggccgcggccgccgcctgggacctggcttccctgcgctgcaccttgggcgccttttgcgaatgcgacttccggcccgacttgccgggtctggagtgtgacctggctcagcacctggccggccagcatctggccaaggcgctggtggtgaaggcgctgaaggcctttgtgcgggacccagcccccaccaagccgctggtcctctccctgcacggctggaccggcaccggcaaatcctatgtcagctccctgctggcgcactacctcttccagggcggcctccgcagcccccgcgtgcaccacttttctcccgtcctccacttcccccaccccagccacatcgagcgctacaagaaggatctgaagagctgggtccaagggaacctcactgcctgtggccgctccctcttcctcttcgatgagatggacaagatgcccccaggcctgatggaagtcctgcggcctttcctgggctcctcctgggtggtatacgggaccaattaccgcaaagccatcttcatcttcatcagcaacacgggtggcgagcagatcaaccaggtggcattggaggcgtggcgcagccggcgggaccgcgaggagatcctcctgcaggagctggagccggtcatctcccgcgcggtgctggacaacccgcaccacatggttctcaactggcatcatggaaaggctctagagagggtgccttctccgtcagggacagtcgcatggtgtcaagagtgccagtggcttgagcacggtgaggtgtcagtggtggagcactttctgaaaaggagtttctcaggggagaagggccggaggttctgattgtgggtggccttggggtggaggtggttttgaccattgtatagtgttggaagaaggggagagaggcgaaaaattaaggaaagggcgctctctcaacaaatgn

SEQ ID NO: 466084 - DNA, 716 bp, Homo sapiens
cgcggcccgccgtcccggattggacggttcgcgggttccccctggaggccaccttctggtcctgctgcggaacgacgggcgggccttggaggcggggagaggagcgtcgggagttgtaggcgatgggcgtggctgctgcggagcgctcgggcctcagcccggatggcggctgcgacgcgcggctgccggccctggggctcgctcctcgggctgctcgggctggtctcggccgcggccgccgcctgggacctggcttccctgcgctgcaccttgggcgccttttgcgaatgcgacttccggcccgacttgccgggtgaggcgccagggagcccggagcgaggggcgggcggacgcgggcagacgcgggagcgctgggagccctgggagcccggctggcgccggccagagaagctgaggacccagagggtgggaccgaggggcggggcccgcagacttgggagggtggagggtacccgttgaggtccaggaggccctgccaacctggagagaggcctcagccagcagaacccttggtggaagttcttgggcctccccggaatggcctggccgtcaaaggagaagtgcagtgcgccttggggatgggcggggtctgcggctgaccccgttgacagctcgcatttagagctgagtgcaatctagaggaccgcctggtgggggcgctgccgagctgaatcaggcccgaaggtggctctttt

SEQ ID NO: 466085 - DNA, 2617 bp, Homo sapiens
  misc_feature (786)..(786): n is a, c, g, or t
cgcggcccgccgtcccggattggacggttcgcgggttccccctggaggccaccttctggtcctgctgcggaacgacgggcgggccttggaggcggggagaggagcgtcgggagttgtaggcgatgggcgtggctgctgcggagcgctcgggcctcagcccggatggcggctgcgacgcgcggctgccggccctggggctcgctcctcgggctgctcgggctggtctcggccgcggccgccgcctgggacctggcttccctgcgctgcaccttgggcgccttttgcgaatgcgacttccggcccgacttgccgggtctggagtgtgacctggctcagcacctggccggccagcatctggccaaggcgctggtggtgaaggcgctgaaggcctttgtgcgggacccagcccccaccaagccgctggtcctctccctgcacggctggaccggcaccggcaaatcctatgtcagctccctgctggcgcactacctcttccagggcggcctccgcagcccccgcgtgcaccacttttctcccgtcctccacttcccccaccccagccacatcgagcgctacaagaaggatctgaagagctgggtccaagggaacctcactgcctgtggccgctccctcttcctcttcgatgagatggacaagatgcccccaggcctgatggaagtcctgcggcctttcctgggctcctcctgggtggtatacgggaccaattaccgcaaagccatcttcatcttcatcaggtggggcccggctttgcagtgggcacagtgngggggccacttctcagaggttcagctctacagccttagcctgtgctcccagcagaatccagttccccatgggcttagctgggctttcccagtgccctccgccactctcagagatgacattgtcattccgcctggttgatttccctttggacattctcagcaaattctgggctcagtctttttgatcgccacttctttgtggaagccctgccaggtcaagaagttttccctcttttgtggtgaggaggacacaggcctgggaaaaataggaacagagttcttgtcctttagtcccagctctcagaatcctcgctgtgtttcctcaggcagcatggctccgcctctctgagcctctgtctctgcttctgaacagcggggccaataatgatgccccgatgccttcctggaagttcagtgagggaaagtcagttgagggacacaaaagtgttttgtaaactataaagtacgtggcatgtgtaggtgaattacaggggccatggatgtggacaccatggagggggaagtggagcgttttcagtggagttggctcctccccgcactgagccatgttcctatgtcaggtggcagcggggaagcgagggtccaatcctgccctgcgctagtcctcatctgagtctcagcctgggtcccccatggttttagcaacacgggtggcgagcagatcaaccaggtggcattggaggcgtggcgcagccggcgggaccgcgaggagatcctcctgcaggagctggagccggtcatctcccgcgcggtgctggacaacccgcacccgtgagtctggctcagcagccccctcccgggcagcttcaccccacacccaggggccaggctctcccggggtctcatgctttgcccactgacccggcagttctgagcctggctttggcactcccagctttgtgactttgggtgagccttacagcccctgagtcctacacccagaaggcggctgagggaactgaggccagcatttttcctcctgcccctgggggtttggggccggcttctcccctcttgtgaagcacaaagtcccctccccacctacccttcctgcagatggcttctcaaactcgggcatcatggaagagcgcctcctagacgcagtggtgcccttcctcccgctccagcggcaccacgtccggcactgcgtgctcaacgagctggcccagctgggcctggagccaagggatgaggttgtccaggctgtgctggacagcaccaccttcttccctgaagacgagcagctcttctcctccaacggctgcaagaccgtggcctcccgaatcgccttcttcctctgactctctgagtggtgtcctcggcccccctgatggccaggccatgcaggaaaggccaggggcctctgtcacaggaacccagagcaccaagtgagatgaacggagtgtcggctaggccacgggacagatggccaggaagggccctggcctctaaactggctcgagagcatcttggccccggccaccttccccagggaaacccctggtcaccccagaacctcactgagccttgacctccccctgcagcctgagccttcttactgtgaattataactcagggactgtggctcgtggcggtgctccctcctcagtctgccacccttgccccttgcctccttggtcgggcaccatacctcctcccctccaccccacaccctgtgtccatatcaagccaggtggagccttctcagtttccagaaatggagggactcaagctgccacttgggcctggttttagatgtttttaattttgtaaaagaaaacaagtataataaactcagctgtgggaccaga

SEQ ID NO: 466086 - DNA, 1658 bp, Homo sapiens
cgcggcccgccgtcccggattggacggttcgcgggttccccctggaggccaccttctggtcctgctgcggaacgacgggcgggccttggaggcggggagaggagcgtcgggagttgtaggcgatgggcgtggctgctgcggagcgctcgggcctcagcccggatggcggctgcgacgcgcggctgccggccctggggctcgctcctcgggctgctcgggctggtctcggccgcggccgccgcctgggacctggcttccctgcgctgcaccttgggcgccttttgcgaatgcgacttccggcccgacttgccggaaggatctgaagagctgggtccaagggaacctcactgcctgtggccgctccctcttcctcttcgatgagatggacaagatgcccccaggcctgatggaagtcctgcggcctttcctgggctcctcctgggtggtatacgggaccaattaccgcaaagccatcttcatcttcatcagcaacacgggtggcgagcagatcaaccaggtggcattggaggcgtggcgcagccggcgggaccgcgaggagatcctcctgcaggagctggagccggtcatctcccgcgcggtgctggacaacccgcacccgtgagtctggctcagcagccccctcccgggcagcttcaccccacacccaggggccaggctctcccggggtctcatgctttgcccactgacccggcagttctgagcctggctttggcactcccagctttgtgactttgggtgagccttacagcccctgagtcctacacccagaaggcggctgagggaactgaggccagcatttttcctcctgcccctgggggtttggggccggcttctcccctcttgtgaagcacaaagtcccctccccacctacccttcctgcagatggcttctcaaactcgggcatcatggaagagcgcctcctagacgcagtggtgcccttcctcccgctccagcggcaccacgtccggcactgcgtgctcaacgagctggcccagctgggcctggagccaagggatgaggttgtccaggctgtgctggacagcaccaccttcttccctgaagacgagcagctcttctcctccaacggctgcaagaccgtggcctcccgaatcgccttcttcctctgactctctgagtggtgtcctcggcccccctgatggccaggccatgcaggaaaggccaggggcctctgtcacaggaacccagagcaccaagtgagatgaacggagtgtcggctaggccacgggacagatggccaggaagggccctggcctctaaactggctcgagagcatcttggccccggccaccttccccagggaaacccctggtcaccccagaacctcactgagccttgacctccccctgcagcctgagccttcttactgtgaattataactcagggactgtggctcgtggcggtgctccctcctcagtctgccacccttgccccttgcctccttggtcgggcaccatacctcctcccctccaccccacaccctgtgtccatatcaagccaggtggagccttctcagtttccagaaatggagggactcaagctgccacttgggcctggttttagatgtttttaattttgtaaaagaaaacaagtataataaactcagctgtgggaccaga

SEQ ID NO: 466087 - DNA, 864 bp, Homo sapiens
  misc_feature (7)..(7): n is a, c, g, or t
  misc_feature (9)..(9): n is a, c, g, or t
  misc_feature (85)..(85): n is a, c, g, or t
ggaaggntntggccaaaaccggcgggggcccccccggggaagaccctcccttcaaggaacttggaacccgggtaatctccccccncgggttcctggacaaacccgcaccatggcttctcaaactcgggcatcatggaagagcgcctcctagacgcagtggtgcccttcctcccgctccagcggcaccacgtccggcactgcgtgctcaacgagctggcccagctgggcctggagccaagggatgaggttgtccaggctgtgctggacagcaccaccttcttccctgaagacgagcagctcttctcctccaacggctgcaagaccgtggcctcccgaatcgccttcttcctctgactctctgagtggtgtcctcggcccccctgatggccaggccatgcaggaaaggccaggggcctctgtcacaggaacccagagcaccaagtgagatgaacggagtgtcggctaggccacgggacagatggccaggaagggccctggcctctaaactggctcgagagcatcttggccccggccaccttccccagggaaacccctggtcaccccagaacctcactgagccttgacctccccctgcagcctgagccttcttactgtgaattataactcagggactgtggctcgtggcggtgctccctcctcagtctgccacccttgccccttgcctccttggtcgggcaccatacctcctcccctccaccccacaccctgtgtccatatcaagccaggtggagccttctcagtttccagaaatggagggactcaagctgccacttgggcctggttttagatgtttttaattttgtaaaagaaaacaagtataataaactcagctgtgggaccaga

SEQ ID NO: 466088 - DNA, 2035 bp, Homo sapiens
cgcggcccgccgtcccggattggacggttcgcgggttccccctggaggccaccttctggtcctgctgcggaacgacgggcgggccttggaggcggggagaggagcgtcgggagttgtaggcgatgggcgtggctgctgcggagcgctcgggcctcagcccggatggcggctgcgacgcgcggctgccggccctggggctcgctcctcgggctgctcgggctggtctcggccgcggccgccgcctgggacctggcttccctgcgctgcaccttgggcgccttttgcgaatgcgacttccggcccgacttgccgggtctggagtgtgacctggctcagcacctggccggccagcatctggccaaggcgctggtggtgaaggcgctgaaggcctttgtgcgggacccagcccccaccaagccgctggtcctctccctgcacggctggaccggcaccggcaaatcctatgtcagctccctgctggcgcactacctcttccagggcggcctccgcagcccccgcgtgcaccacttttctcccgtcctccacttcccccaccccagccacatcgagcgctacaagaaggatctgaagagctgggtccaagggaacctcactgcctgtggccgctccctcttcctcttcgatgagatggacaagatgcccccaggcctgatggaagtcctgcggcctttcctgggctcctcctgggtggtatacgggaccaattaccgcaaagccatcttcatcttcatcagcaacacgggtggcgagcagatcaaccaggtggcattggaggcgtggcgcagccggcgggaccgcgaggagatcctcctgcaggagctggagccggtcatctcccgcgcggtgctggacaacccgcaccatggcttctcaaactcgggcatcatggaagagcgcctcctagacgcagtggtgcccttcctcccgctccagcggcaccacgtccggcactgcgtgctcaacgagctggcccagctgggcctggagccaagggatgaggttgtccaggctgtgctggacagcaccaccttcttccctgaagacgagcagctcttctcctccaacggctgcaagaccgtggcctcccgaatcgccttcttcctctgactctctgagtggtgtcctcggcccccctgatggccaggccatgcaggaaaggccaggggcctctgtcacaggaacccagagcaccaagtgagatgaacggagtgtcggctaggccacgggacagatggccaggaagggccctggcctctaaactggctcgagagcatcttggccccggccaccttccccagggaaacccctggtcaccccagaacctcactgagccttgacctccccctgcagcctgagccttcttactgtgaattataactcagggactgtggctcgtggcggtgctccctcctcagtctgccacccttgccccttgcctccttggtcgggcaccatacctcctcccctccaccccacaccctgtgtccatatcaagccaggtggagccttctcagtttccagaaatggagggactcaagctgccacttgggcctggttttagatgtttttaattttgtaaaagaaaacaagtataataaactcagctgtgggaccagaaaaccaaaacaaaaaaaaaccacaaaaaaaaaaaaaaacacaaacacaaacaaacaaaagcacagcaaccagaacacaacaaacacaaaaaaaaacaaacggggggcggaagcagaaacacacacacccagggggaggacaacagagagacgaacaccaccgcaaaggctagcaacacgaagggcccccacaaagaggaagagaacaaaataacggagaaagcagagagcagacacaagaaaaaacacgagcagacgacaagagcacaaaagagaacagaacggaaagacactagcgaacagagagcgcccacaacgcagacgagagggcagaacaaaaagagggggacacacagcgaccgagagaagcaaaagagaacgccacgaggggcgaacga

SEQ ID NO: 466089 - DNA, 1473 bp, Homo sapiens
gagccaccatgactggcctgcaacggcatcttgaatgctgcatccttgggggatggggtgaggtgaggaacagaatgctcttcctcacatggcagaagagagaaaggggcaagagagggccaaacttgcccttttataatagcaccaatcctacccatgaaggtgacgccctctgtggtaatgaggagagttcaccaaagtccatctccaactcaggcatgtctggatccaacccgttttgggggctgagctccttcctggaactttttgaaacaagaactgaaggtgcaacagttacacatgcggaaaacctggggcccctgggttatgatatgactttgcacatttgggtgattagttctgtggtacttagaaagattctctccttgaccaaactctactcagactcctctgagctcttttacaaattaattttggcaagaatcctgctaagtcaaaagccagtctggaagctctgagattccttcctcaccttggtctattttgctattattacttgtgattggattacgaaattgttgtagtgtgttctccagctctatcaggtcagttatgttcttttctataatggctattttgcctgtcaactcttgcattgttgtattatgaatcttagctttggcttcctgagatggagtttcatcattctcctgaatgatcttcattcctatccatattctgaattctatttctgtcatttcaatcatttaagcctggttaaaaacccttgatcgagaactaatgcagtcattaggaggaaagaagatactctctggctttttgagttgtcagagttctttcactggttctttctcatctttgtgggctgatgttctttcagtcttttaagttgttgtcttttagattttttttttcttttatcctgtttgatgaccttatgggtttgattgtggcataaggtgggttgagttgactggcttcgttactggaagattttagggggccaagactcacctcaggactcctggactgcatgctctaactctgggggacttatatcaggccctagctttgttctctggctccttgacgttaggaacctgctgtgctggaggggctgtggtgctcccagaccaaaggtcacaacactctgatgggaggtcccagccaaagcactttgtagggtggtggcagcaggatccatcctcatttgcatgtgttagcagcagtggcaatggaagcacactgtggtccatgctcatcagttgcagcatggtgccagcgggtgccagttctctgcaggtgcgagcctctctgtggacattcacagaagtggccatggtagtatggcatgggggtgggtggaggcccctccagcagttgtgtgcacattcatgccagttgtggtgttagcacaggggtgggacgctgatgaccgcaggactgtgtgcaccctctgtgtgtattcatgctggtggtgatggccactca

SEQ ID NO: 466090 - DNA, 1452 bp, Homo sapiens
taacttgggtcacaccccctaactgatcctcctctagagaccggaaatgggccaggggaccatccatcaaagccgccctggacgctgggccagactgcccgccgccggcaccgaccgggtctctccatatcgcattagcgtggggcgagggctcagtgcggcactggctgctgagggagaggcacctattctttgttgttattattgttgttgctttcatctgattttaattgttttatgttttttgaataagaaatacacgtacatggttcaaaactcaaaaggcaccaaaagttatacagtgacaaactcggatagatcccctcatgggaacctatggatctatggcatatctatggatatgccaccccatggcaactgtcctttccccttcatagcatacatcaccctgaattatagctgcctgtttatgtatgtgtcttctgcaccagccacattgggggttgtggttgatgctgtgaggtcattcctgccttattcaacttcatgtccaaatcttctaatggcaaaacaaaacatggtggccaagtctcagagtccaggcatccctcccatagcccatagccaacttcggtttgatgtaccagcatcaggcactgctcaagcttctgagcacagcatcccctctgcctgcaaacttttccctccagcactttctgcttggggaattgctgttcctctttcaaaaccaacccagttccaccccaagtaatggtgcagtgggatctttacctctctgggccacagtcttctcatctgtaaaatgaggataagatactaggaggggttgagggtctgggaaggtttcatgagacagcttgtcagtgaccagcacagggtaggtccccagcagtggctgtttccttctctgtagtctaaccataagccttcctgctgtgccttcctgcactgcctcttaattctgctttcaaaggagctagtggcagtgaccctcgccccttaaagaaactctcaggagagcattgttcctcattcatttgtccaaattctctctcttcctctgggaaaccctgaaaaagagggataacaaagctgaactggagccccaacctgctctgtccccacctcctctgcacccaggtgagccagtcagggtggcaacagaaaataaatgacacattcgagagggtttcactgaagggtttagtgatgtggcagtttctaaagccatagatcagatgaagaaaactaataagggctagtgtggcaccaggatagaaatatctctaccaaagcccatgccaactgggctcacgggacacaggagagaggccactcagcaaagctgtgaccaaggaggaaacacaaccaccaccagagctgcaagcaggcaaaaaggggggctgacagggaatggaggaaacaaataccctgactcctctctcccccttctcagccgggaactctatt

SEQ ID NO: 466091 - DNA, 1088 bp, Homo sapiens
tgaagacagcaaggattgtctttgggttgggaggagtgagaaacagatgatgggtagtggtagtggcttaataacggccatatttgctaaacaggatctagattcttgtcacttaaaaaagtgcgggaaggactggccaagtggaagtctaccacgcgatgctcgtggactgactgaggagtacccagcccggagcgcgctcagcctgtggccggcctcctcaccaaggggtaggcaggtgcccagaatgctggaggatgcccggcgcccacccatccccgggtaccgacctgagcctcccgtaccttacctcactcaacagcaggctgcagccgctccgctttacggcactcacagcaaccgccgcaaaagccgccgtcaagtgctgagcggcggaggctggcttggttcctgctgggacgttcccacggtccagccccagcctcggctttcctgtgactcttgtcgcatcctcaccgccagaagttcactgagccctggcgattcctcgcttttataatctagccacttagccaaagcccttttttatctcttgcctaattgacaactacagcagcgcactgaggcaatctgagagtttaagttctgaaacgctttcgacagcggaagatgaactggaggcagcagctgagccgttttccaagcccgttaaatgtgaacttctgataaacgagtggtttttttaaaatttcctatgcacatacaagcttactgttgaagtcctctcatccaatgcactcagaacgggactgtaagtccagctgctgtgtatcatcacctcagcccgattggtcctcggccacacttcacttcagcttctgataggtcctgggccaagctaagcagcatctatgaatcatttcacctcctgactggtcccgggccaagccgagtcacgcattcgccaagacagcccccagactaagcacattccttccccttccgtccataaaaacctggaccccagcctcatgatgggcactcccgttcgggaccccctctctgctggcagagagctttcttctttcaccttattaaactttcactctaacctcacctttgtgtcc

SEQ ID NO: 466092 - DNA, 823 bp, Homo sapiens
tgaagacagcaaggattgtctttgggttgggaggagtgagaaacagatgatgggtagtggtagtggcttaataacggccatatttgctaaacaggatctagattcttgtcacttaaaaaagtgcgggaaggactggccaagtggaagtctaccacgcgatgctcgtggactgactgaggagtacccagcccggagcgcgctcagcctgtggccggcctcctcaccaaggggtaggcaggtgcccagaatgctggaggatgcccggcgcccacccatccccgggtaccgacctgagcctcccgtaccttacctcactcaacagcaggctgcagccgctccgctttacggcactcacagcaaccgccgcaaaagccgccgtcaagtgctgagcggcggaggctggcttggttcctgctgggacgttcccacggtccagccccagcctcggctttcctgtgactcttgtcgcatcctcaccgccagaagttcactgagccctggcgattcctcgcttttataatctagccacttagccaaagcccttttttatctcttgcctaattgacaactacagcagcgcactgaggcaatctgagagtttaagttctgaaacgctttcgacagcggaagatgaactggaggcagcagctgagccgttttccaagcccgttaaatgtgaacttctgataaacgagtggtttttttaaaatttcctatgcacatacaagcttactgttgaagtcctctcatccaatgcactcagaacggcttaagcctgccacaggggcctatcatgcatgcatgtggacaactcagtctgcac

SEQ ID NO: 466093 - DNA, 3965 bp, Homo sapiens
gtaccagcagctggaggatttgtttggtagcacctgggggatggctctgtcccgggcgcacttaggcgggctgtgcggagcgctttaccttccacagtgtccggcacacgcatccttttcgacatcatcacttgacctgctgcaataggtaacctacctggctctctcgcatcccgttatcagcgtcaagaagatttgcacgtaggcctttaaagccagccaccagccccgggcgccttcctctcactaaccccatgctgcctttccaaacggaagatgaacttagcaattctaggcgctgcctgtgtactagacaagtcttgctgtgttgcccaggccggagtgcagtggtgcaatctctgctcagtgcaacctctgcctcctgggttcaagtgatcattctgcctcaggctcctgactaattgggattacaggcatgcaccaccacaccagctaatgtttgtattttcagtggagacggggttttaccatgttggccaggctggtctcaaactcctgacctcaggtgattcgcctgcctcggcctcccaaagtgctgggtttacaggcgtgagccaccgcccggcctcatgtcatcaaaagaagagaaaacagaggcacaagagaagatgaccacagaagacagaggcagaggctggggttatgctaccacaaaccggagaatgccaaggattgctggcaaccaccaggagcctggggagaggcgtggaacccctcctccctcagaggccccagaaggatccaaccctgctaataccttgattttagacttcccacccccagaactgtgagaaaataaatttctagctgctttaagccatctagtgtgtggtactttgtttgttacaacagccctaggacactaatgcagcttgagtcagttactttgtcaccaggttggtggcagctgttagctctcaacagaggccagtttcttccccacgaaagcaggcagcatgctcctagggcaaccatactctcccctcagagcaaaagaagtagtaaatgcatgcttgacagtggacttgtgggtttgcaacaggttatgattagcaacttgatcacaactatatttaagattcttgtaattgggattggtctgtacagcattctaagttttgataaacagctttggaaatttatatggaagacaattaacattttcttgtatcaacatggacttgtgacttccataaacttaattttcattgtttcctttgatgataacttgtcaaagacagagtacccatacttattccaaaatagaagtcttgatgaataggcacatttgcaaattgtagggaattcacgcacatcacaggaagtctcaaaattaaaatccttctgatacggtttggctgtgtccccagccaaatctcatcttgaattgtagttcccataatccccacgtgtcatgggagagacccagtgggagggacctggtgggaggtaattgaatcatgggggctgttagccccatgctgttctaatgatagaaaaccagagacctttgttcacttgtttatctgctgaccttccctccactattgtcctatgaccctgccaaatccccctctccgagaaacacccaagaatgatcaataaaataaataaataaataaataaataaataaaaagaaaaacatcatccaaagagcacaagagaattgtaactcacattgtgcaattttaccattgtcctcatattcaggatcaaggatacagattgatggagaaaaggtagtgtctcactggattaattcattgttggatgggaaaggacgaaatttctcttaatgacttcactattgctagaggttttactgatgtacagaagagttaacatagcaagcctgattgcgatgttggccttgggctggtgtctgggaacttggatttgaagcgtgtccccaccattccctaactgacaagggtggcccattctgcctagactatacaaacagtgtggtttatgctgaacacctgccttcctttggggggtctggaattttggtacacgctaggcagagggtgccttatgtgactagaccctagtaaaactttggatgttgagactctaatgggtttccctctaataagcagaaacattgaatgcttactgctggggaaatatattttcattgctgaaggaagagtgcactgtgcaattcctcgtggagggagggggcagtaggatgcctgcccatggatttccccaggctccacctgagtctttctccctcctcattacattgccgtaataaaccttagccatgaatacaactatagtctgggtcccgtgagcccttccagtgactctccaaacataaggtaagtaatccaaatcagcaggtcctactcacccttacccttcccacataattcacaaaccaaggtaataagacctcaaataaggaatgacgcctgtttcacagttcagcatgaccaacagctgatatctaaacaatgcccccaagctggcaagtaaaacccaaacataacccaaagccatctgtgggtggctcctctgcccttccgaggtctgattaaattggaacaaatccaagttctatgttccatgatagtccaaagttctcccacaatgcctgtgagctccctgggcttgcctcctcctgcgtcctgctagctatttttaaatgtgagctctattttgttccaagatcattaggatatttagccccttcaccaatttccacaagaaaattaattcattccaatattcagaggttccttttttatttcttagccagtgattaaggaatccattatgtaacccagagccattctctctactcttttcttaatttttccttctaaaatggggagttccattttcttaatttttcattctaaattggggagttccaaattttttttctctctctctcttaggcaaagcagttcatgtccttcctggaagttttagtatctgccagtactgatgcccagtttgcattttaaaagctccttctagctgctagatgctgaaaagactgaaaggaggcaaggggataggcaaagggaccagtatcaggttattttaggagatgatggtggcttgaaccaggtagtggcaaagctcgtaaagacaagtgcatgaataggaatattttggaggagatgctgcagtacttgcttatagattggattgtaggtgaccagtttgaaattcagctaaaccagcagctatggtccctcatccccaacaacgatgtgagaaggcttgtttctcatgttatccggaccttgaagacggactgcactgagacccatttgcaactggcctgtgccaagctcatctctaggacaggcctcctaatgaagcttctcagtgagcagcaagaattgagaactgtatcaatgacagcatggaagcccagaatgaacagaaagagcagaagtcgaatgagggtgctacaataataaaatgctaattttattgccggtttttatgtgcagattgtcttagatttggccaatggaagctcctttaaggtggtttctgtgttccttttgacacatcccttactctttcgtgtttccatcatattttgcacactttcttactgactgacgcaaaaggatgtttcagggtttttttgtactttcgttgcccttgtctcagcccagccatccatcaagaggcagaagtcccaccacagaattacagcagacgctacccaagtggagacaggagggtagaaggagaggctggaaggggaagctaggatgagatgacattccaagacgtgcagcatgtttgcatgccagaaatgacatcgctgataggggtttacagaaatctcattagtaaccttccctaagtttgttcttacctacaaaaggaatctacttcacctgtactggaaagctgaaagtgcagggggccgaaggcccgtgggacatgaccaactcagcattcc

SEQ ID NO: 466094 - DNA, 599 bp, Homo sapiens
ccgcgacatgactctttctctctccaaacctgtttctgctggattgggcaggtctgataagcctggaacacttggcttccatgcgtgtctcagacagggaagcttctttggtctccttgtttcacctcatcggcctgggtaccggagggagggaggcgggcagaggaggggagatgggcacccccagtctttccatcctcctcattcgtctaggggcacccgaatcccctattccttatttcccctatcactcaggcactggcagggtcctttgcccactcctgttggccgctgcggctccaaagcgagctgggcagatgtgcctgacacaggtttgaccaggcaactgaaaagacatccctaagagaagacaaagcaaaggtatgaaaggaacacacgtccctgactgactaggaggaacagagctgcctgctatctggaacaacttcctcccagactaagtgagaaataaacttctgttttctatatgctactgtgtttgggggcctttgtgttatagaagttttgctgtcatcctttccaattcaccttctcacaccagatatttcaaattaaaaagattatatcaggccaggtgc

SEQ ID NO: 466095 - DNA, 1199 bp, Homo sapiens
gctttttatttgttttccctttaggtttttgtccctctcttaaagtgaatggtcacagagccatgagcaggtggaagatgcaggtggaggcatcttccctgtcaccgttggtatgtctggttgaaacctgcaacaagtgcggctgccgcctgggattccgggctgtgtcccttccctatctgtgctgggacagcatccttgcacagcctgactttgcagccaagtcctttaactacaaagagcctactggaaacagcttctccatggccgacttgcatcagccacacaagagcctctctgtgggcctggaacaggggcacctggaaacaaggccctgggaagccagagctgagctggagaaagacctgcccggggaggcacatttgaacctcagctatggcaatcccctgcccctctccctcagcatgttcccctcctgcctatgcccccaacctgtggtttggaaactgtcagcctcaacctagttgtggctaggaaaagtctggctaatagacacaaaaatggtttttaaaatattttaaagcatggggcttcctgttcccactccagctgttgggctgcctgggacacgttctctccccttctgcccctggtgtgccgtttgcatagcttgcgaggaagctggctgcctcaccctaatcttttattatgcagttgggttctctacctggctgacgccatgttgcctgcttcttcactgtgcatgtggagcctgaggggaatgtttcaaggaagaggggacaagcaagtcagcatctggaggaatggaggcagcactgtgttgcatggctccagagaacaccactctctttgtgttctatgcaacatgcccacgagttatgcattgcagcacctggccataaatcatcaccaaccctatggatgaagcaacaccccagggagggtggagaagtacaggggaaggagccagggcccccatgaaacaaacatttcttccaggaatttcccaagcccagaccattgcatgaaaagagaaataaaatactcttttgtttccatcacattgtttttggtctcagttggagcagcagaccctatattgcaacaaacagactcaatcaccctcattattaggaaagttggttaagatgctgaccccttattcccccagtgccatacctggctctgcaaagcacacaccactgtgggcatttagc

SEQ ID NO: 466096 - DNA, 1139 bp, Homo sapiens
cctcaatgggtgtgaagcgcagaatgggaaggcaaggaactaatgcaggtggtgactttaagttgaagccaacactcatttactatttccaaagtcccagggcagttaagaactctgctaaatcaactctgcctgtgctctgtaaatggaacaacgacacctggacggctgcatatctggtttacaccatggttcaaggggtacatgtgcaggtttattacatgggtaaattgcatgtcacaggggtttggtgtacagataattttgtcacccaggtggtcaagatattgatattctcagaagtttggaagaagttggttccaaccctcacaaatgactttgaaaggtttaacacttcagtggaagaagtcaccgcacatgtggtggaaacagcaagagaactagaattagaagtggtgcctcaagatgtgactgaattgccgcaatctcatgatcaaacttgaatggatgaggagttgcttcttatggatgagcaaagaaaatggcttcttgaaatggattctactcctggtgaagatgctgtgaacgttgttgaagtgacaacaaaggacttagaatattacataaatgtagttgataaagcagcagcagggtttgagaggactgactccaatttgaaagaagttctactgtgggtataatgctgtcaaacagcatcacattctatggagaagtcttttgtgaaaagaaaagtcaatcaatatgacaaagttcactgttgtcttattttgagaaattgccacagccaccccagccttcagcaatcatcaacatcaaagcaagaccctccattagcaacaagattatggctcgctgaaggctcagatgatcattagcattttttagaaataaagtatttttaaattaaggagaggtgcccgatgagctcccagtcatgtggttcagggcgggctctggaagactcacagaggagactcctccgagaaaccaagaaggtttctgtccaagtcgggatctgctctgctcaggatgctcctccaacacacacagtgaaaaactgagcacctagagagcaacaccaaaaacccatggccaataatggagagccaaatcaggagagcattcagcaaagcaattcttgctgtagaaggaacagc

SEQ ID NO: 466097 - DNA, 1564 bp, Homo sapiens
tactttggaagccgattgaggcaagatttctgagacaagttctgaggtttccaagacagactttagcttttctaaatcattttttaagtgctatgtaaaggattacagcattcaattctccagtagtccaacagcatcatggtggagcaagagggattatcctgtgggcatcctccggaaaactgtatatacccaaaaggattgaagatcggtatacatggatatgcatacaccattcacaacggctaaaaggtagaaacaacccaatgtccatgaatggatgaatggataaacaagttgtgtgatatatcaatacagcagactattactcagccataaaaaggaatgaagttctgataaatgtgaccatgtggatgaaccttgaaaatattatgttaagtgaaagaagccagacaaaaggtcaaatattattattattccatttatatgaaatatccagaataggcaaatccatagagacagaaagcagattggtggttgccaggggctaagggagtagagaatggggagtgactgcttcatggtacagggcttccttttggggtggtgaaaatgctctgcaactagacagtagtgacggttgcacaacattgtaaatgtactaaatgtcacaaattgttctgtttaagtggttaattctatgttattgaatttcaccttaattttaaaaagagaaagaaagaaaaagaggaagcagaaggctctaaagagaatgtatgtccagagagccctgagcagccccaccaccaccgctggcctagctaccatcacaccccgggaggagccgcagctgccgcagccggccccagtcaccatcaccacaaccttgagcagcgaggccgagacccagcagccgcccgccgcttgccgctcgccgccccccgccctcagcgccggtgacaccacgcccggcactacgggcagcggcacaggaaacggtggcccgggaggcttcacatcagcagcacctgccggcggggacaagaaggtcatcgcaacgaaggttttgggaacagtaaaatggttcaacttaaggaacggatatgctttcatcaacaggaatgacatcaaggaagatacatttgtaccccagactgccaaaacgaagaataaccccaggagatgctatccacgtcgtaggggtcctccacccaattaccagcaaaactaccagaatagcgagagtgggggaaagaacgagggatgggagcgtgctccccaaggccaggctcaaccacgccggccctacagcagggatatagaccacgattccgcaggggccctcctcgccaaagacagcctagagaggacggcaatgaagaggataaagaaaatcaacgaggtgagacccaaggtcagcagccacctcaacgtcggtaccgccgcaacttaccgacgcagacacacagaaaaccctaaaccggccagaaaagaaaaccctaaaccacaaggtggcaaagagacaaaagcagccgatccaccagctgataattgagaattagtccgctcccgaggctaagcagggcggggctgagtaaattcc

SEQ ID NO: 466098 - DNA, 2642 bp, Homo sapiens
agcagcagcatttggcgtagaaggaggggaacaacaggatataatgttgtgcacaaaagcacatgcacaattagtagtggtcactgccctgactctggcctccctggactcatacatgcctggatatggagagcctgtgctccacgtgatgtctgctactgggcttgcaatgtttcctccaagtatggtttgttacataggtatacgtgtgtcatggcggtttgctgcacctattgatgcatcctctaagttcctgcccctcatcccccaaccctcaacaggtcctggtgtgtgttgctctcctcgttgtgtccatgagttagttctcaatgttcagctcccacttatgacgacagggttgggaaaattccggttgctcttcttgtctgtgatatacggtagaagggttggtcctggtttggtccacctgccagcggagtttaaagtttccgaggctcagaggaacacaatgacttggatcaaacagcctaaatgggaagaaggacatttttgctgcatcaaggaagccgttaaactcctgctaagctaactagctcttttttatgggtccatgcacacgaccgaactcctctttcactgaccagagattatttctgacaacccaggatatcccgaaagcttggaggcatatggctggaaaatgaaacgacccaggacatcgtttctggctgcatcattattttgtgtcgcgtagtaccagatgggcagtcagtgagcggcgcagggatgtgaacggacggttttataatgtgaaaattttcccttggtaaagctaaaacagatttaatttccctctcttttctttcactacttccccctctttattccccctctgtctgcaatatcagtgaactcaactttgcagtgaggtggccaaaaagagagagaatgaggagatcttgatcatcttagtgtcggaggagtcgcagcggactgggaactgcagctgcgaccccccgcgtcctgtgcggatttcagggctgataccgcataggcggttatggaaaggacggtacaccggagcggcggaggatagagaccctggcccccggagaggtctgctgatttcgcagcagccttcgaagccgtggctgcctttcatctgctgcgttttattactattatcgccgttccggaaaagtcatggaagacagcccgctgccagacctcagagacatcgagctgaagctggggcgcaaagtacccgagagtctagtgcgctctctccgtggggaggagccggttcccagggaaagggacagggaccctgcggggggagcggtggtggtggcggcggcggcggcggctgcagtagcagcagcagctactgcagcttccctccctccttgtcgtcctcctcttcgtcctccccaacctctggctccccacgaggtagccactctagcgccctggagaggctagaaaccaagcttcacctcctcaggcaagagatggttggacaaaaatttaaggacaacccttaggtacataatggagaagctggaaagtggaagtcatcttgatgagtttgcaaaatagatgaaaagataaaatggaaaagatgacaaaccaacaggtcaggggatgcctgataccgtatcacaaagatcagacatacgtgtggagactaacaggtaaaactattttccacaagaaaatttattgcacaaggaattaagaatgttgctaactctgcaaattaaggacttaatatgagggacgaagacatcaaggagatgaggaaattttattcctaaccatgtcttctgtaattttgcccatggaatgttaatatattcacttaatctaataaataaatcttgttgaaacatattttctttctcagtagctcactgatagcacatcaaagataatactgtcattttgctggacactcagacacaatttagagtatttatatataacttgaaaacagtaacatttccaaaaaccgatgaaccccaccctgtcccaaggaatgattggtatgtatgtgaagatcattttctgacaaaaataattacgttccacttaggatgcacaaccatgttgtcctgtagagaagtcacaagttttgtgagaatttttaaactgatgatgtttatttccatggtaacaatttcaaaacattaaacatgttaaactgtatttttgtttaccataagccttcccaggaggaacaagcactaaacacagtctctggcttaggatttggatgaacatattcaaaagccatctgcttcccagcaatcataatcataccctttccttttggccactatcaccaagatctccagtagtacttcctctcagtccacaagaactgccatgagcagttaaaggttctcctgacacgaccagttcaagttttagagctcaataatattcatgatgtaggagtatcaagagcttttcattggtagcattttagttccccaagagattctgttcaggataaaacttagaccttaggggaaagaaaagctgtcctcctgtagatgcgaatggctctttcaataatcaccttcagtttccttgaacattttttgtttttgttaacaagtatttaactacttactctatttgttccttttattcaaactacaaagcaatgtactggt

SEQ ID NO: 466099 - DNA, 2611 bp, Homo sapiens
agcagcagcatttggcgtagaaggaggggaacaacaggatataatgttgtgcacaaaagcacatgcacaattagtagtggtcactgccctgactctggcctccctggactcatacatgcctggatatggagagcctgtgctccacgtgatgtctgctactgggcttgcaatgtttcctccaagtatggtttgttacataggtatacgtgtgtcatggcggtttgctgcacctattgatgcatcctctaagttcctgcccctcatcccccaaccctcaacaggtcctggtgtgtgttgctctcctcgttgtgtccatgagttagttctcaatgttcagctcccacttatgacgacagggttgggaaaattccggttgctcttcttgtctgtgatatacggtagaagggttggtcctggtttggtccacctgccagcggagtttaaagtttccgaggctcagaggaacacaatgacttggatcaaacagcctaaatgggaagaaggacatttttgctgcatcaaggaagccgttaaactcctgctaagctaactagctcttttttatgggtccatgcacacgaccgaactcctctttcactgaccagagattatttctgacaacccaggatatcccgaaagcttggaggcatatggctggaaaatgaaacgacccaggacatcgtttctggctgcatcattattttgtgtcgcgtagtaccagatgggcagtcagtgagcggcgcagggatgtgaacggacggttttataatgtgaaaattttcccttggtaaagctaaaacagatttaatttccctctcttttctttcactacttccccctctttattccccctctgtctgcaatatcagtgaactcaactttgcagtgaggtggccaggactgggaactgcagctgcgaccccccgcgtcctgtgcggatttcagggctgataccgcataggcggttatggaaaggacggtacaccggagcggcggaggatagagaccctggcccccggagaggtctgctgatttcgcagcagccttcgaagccgtggctgcctttcatctgctgcgttttattactattatcgccgttccggaaaagtcatggaagacagcccgctgccagacctcagagacatcgagctgaagctggggcgcaaagtacccgagagtctagtgcgctctctccgtggggaggagccggttcccagggaaagggacagggaccctgcggggggagcggtggtggtggcggcggcggcggcggctgcagtagcagcagcagctactgcagcttccctccctccttgtcgtcctcctcttcgtcctccccaacctctggctccccacgaggtagccactctagcgccctggagaggctagaaaccaagcttcacctcctcaggcaagagatggttaacctcagagccacagacgtcaggctcatgcgccagttgcttgtaatcaatgagagcatcgagtccatcaagtggatgatcgaagaaaaagccaccattaccagcagaggcagcagcctcagtggcagcctgtgcagtttgttggagagtcagagcacctccttacgtggcagctacaacagcctacacgatggcagtgatgggctggatggcatttccgtgggaagttatctggacacgttggcggatgatgtcccaggccatcagaccccttcagacttggaccaattcagtgacagctccctcatagaggactcacaggcactacacaagcgtcctaaattggattctgaatactactgctttggctagtgacagttttttgcatgggactggtgtgcaatgaacttgtatttatccttcttctccgctgctatatttttggtgtgatttttattttaataagatgacctttttaaaagaagctgattttgaaactgcttaatggtattgctgttgctcctaatacttctcatctgagctgatttatttttctctgttacatctctattttttatttattacaatgattttctcccttcttttacagtagcacaaacaaagtagggggaaaagaataagcaataattatgtttttgcttttgttttcagagcaatgggtcagggattacaagaaaaactttgctaaattttacaataaaccaaagtctgataacaaaaaaaaaagctgcttgcgtccttaaatgacttaaggtttcatcttccagaagatattgagatatattactgtttgcatatcaggttgaacaaaatgcttggaacaaaattaagcattatttctagaccacaacattctagtgtataatcaaccatactgttagtcacacacgcccacatgacaatcatctgaaagtccccaactatacacattctgttcaaccaactcacccttgtgttggtactttagattaacattttgtcatcagtgattctaactcaaatcatatgtttatttgtgtaataaaatgtattattctcccaaatttcaaggaataattgagattaagtatggaggccattcaaggcaaaaatgtcctaaatttaattgcattttgagattttgttggcatttacttgtatgtattttgtgattctgataggatgta

SEQ ID NO: 466100 - DNA, 1245 bp, Homo sapiens
ggcctttcgagagtgtaaaatggctggaatatctttcttctctctttgtccataggttaacctcagagccacagacgtcaggctcatgcgccagttgcttgtaatcaatgagagcatcgagtccatcaagtggatgatcgaagaaaaagccaccattaccagcagaggcagcagcctcagtggcagcctgtgcagtttgttggagagtcagagcacctccttacgtggcagctacaacagcctacacgatggcagtgatgggctggatggcatttccgtgggaagttatctggacacgttggcggatgatgtcccaggccatcagaccccttcagacttggaccaattcagtgacagctccctcatagaggactcacaggcactacacaagcgtcctaaattggattctgaatactactgctttggctagtgacagttttttgcatgggactggtgtgcaatgaacttgtatttatccttcttctccgctgctatatttttggtgtgatttttattttaataagatgacctttttaaaagaagctgattttgaaactgcttaatggtattgctgttgctcctaatacttctcatctgagctgatttatttttctctgttacatctctattttttatttattacaatgattttctcccttcttttacagtagcacaaacaaagtagggggaaaagaataagcaataattatgtttttgcttttgttttcagagcaatgggtcagggattacaagaaaaactttgctaaattttacaataaaccaaagtctgataacaaaaaaaaaagctgcttgcgtccttaaatgacttaaggtttcatcttccagaagatattgagatatattactgtttgcatatcaggttgaacaaaatgcttggaacaaaattaagcattatttctagaccacaacattctagtgtataatcaaccatactgttagtcacacacgcccacatgacaatcatctgaaagtccccaactatacacattctgttcaaccaactcacccttgtgttggtactttagattaacattttgtcatcagtgattctaactcaaatcatatgtttatttgtgtaataaaatgtattattctcccaaatttcaaggaataattgagattaagtatggaggccattcaaggcaaaaatgtcctaaatttaattgcattttgagattttgttggcatttacttgtatgtattttgtgattctgataggatgta

SEQ ID NO: 466101 - DNA, 1396 bp, Homo sapiens
accacaaagcaacagcattttctactagcttggagataaggaaagttgcaccagtgggcctcaaaaagagaaaataatttcattaaattaacttcacagttgcttttgatttgcttcaaagtaggctaggagatttctatcactccgacaggaatgatggaaattatttctatcattctatcgtttagttattatagagttctatcatttagtgattgttattttttaggttggacaaaaatttaaggacaacccttaggtacataatggagaagctggaaagtggaagtcatcttgatgagtttgcaaaatagatgaaaagataaaatggaaaagatgacaaaccaacaggtcaggggatgcctgataccgtatcacaaagatcagacatacgtgtggagactaacaggtaaaactattttccacaagaaaatttattgcacaaggaattaagaatgttgctaactctgcaaattaaggacttaatatgagggacgaagacatcaaggagatgaggaaattttattcctaaccatgtcttctgtaattttgcccatggaatgttaatatattcacttaatctaataaataaatcttgttgaaacatattttctttctcagtagctcactgatagcacatcaaagataatactgtcattttgctggacactcagacacaatttagagtatttatatataacttgaaaacagtaacatttccaaaaaccgatgaaccccaccctgtcccaaggaatgattggtatgtatgtgaagatcattttctgacaaaaataattacgttccacttaggatgcacaaccatgttgtcctgtagagaagtcacaagttttgtgagaatttttaaactgatgatgtttatttccatggtaacaatttcaaaacattaaacatgttaaactgtatttttgtttaccataagccttcccaggaggaacaagcactaaacacagtctctggcttaggatttggatgaacatattcaaaagccatctgcttcccagcaatcataatcataccctttccttttggccactatcaccaagatctccagtagtacttcctctcagtccacaagaactgccatgagcagttaaaggttctcctgacacgaccagttcaagttttagagctcaataatattcatgatgtaggagtatcaagagcttttcattggtagcattttagttccccaagagattctgttcaggataaaacttagaccttaggggaaagaaaagctgtcctcctgtagatgcgaatggctctttcaataatcaccttcagtttccttgaacattttttgtttttgttaacaagtatttaactacttactctatttgttccttttattcaaactacaaagcaatgtactggt

SEQ ID NO: 466102 - DNA, 2665 bp, Homo sapiens
agcagcagcatttggcgtagaaggaggggaacaacaggatataatgttgtgcacaaaagcacatgcacaattagtagtggtcactgccctgactctggcctccctggactcatacatgcctggatatggagagcctgtgctccacgtgatgtctgctactgggcttgcaatgtttcctccaagtatggtttgttacataggtatacgtgtgtcatggcggtttgctgcacctattgatgcatcctctaagttcctgcccctcatcccccaaccctcaacaggtcctggtgtgtgttgctctcctcgttgtgtccatgagttagttctcaatgttcagctcccacttatgacgacagggttgggaaaattccggttgctcttcttgtctgtgatatacggtagaagggttggtcctggtttggtccacctgccagcggagtttaaagtttccgaggctcagaggaacacaatgacttggatcaaacagcctaaatgggaagaaggacatttttgctgcatcaaggaagccgttaaactcctgctaagctaactagctcttttttatgggtccatgcacacgaccgaactcctctttcactgaccagagattatttctgacaacccaggatatcccgaaagcttggaggcatatggctggaaaatgaaacgacccaggacatcgtttctggctgcatcattattttgtgtcgcgtagtaccagatgggcagtcagtgagcggcgcagggatgtgaacggacggttttataatgtgaaaattttcccttggtaaagctaaaacagatttaatttccctctcttttctttcactacttccccctctttattccccctctgtctgcaatatcagtgaactcaactttgcagtgaggtggccaaaaagagagagaatgaggagatcttgatcatcttagtgtcggaggagtcgcagcggactgggaactgcagctgcgaccccccgcgtcctgtgcggatttcagggctgataccgcataggcggttatggaaaggacggtacaccggagcggcggaggatagagaccctggcccccggagaggtctgctgatttcgcagcagccttcgaagccgtggctgcctttcatctgctgcgttttattactattatcgccgttccggaaaagtcatggaagacagcccgctgccagacctcagagacatcgagctgaagctggggcgcaaagtacccgagagtctagtgcgctctctccgtggggaggagccggttcccagggaaagggacagggaccctgcggggggagcggtggtggtggcggcggcggcggcggctgcagtagcagcagcagctactgcagcttccctccctccttgtcgtcctcctcttcgtcctccccaacctctggctccccacgaggtagccactctagcgccctggagaggctagaaaccaagcttcacctcctcaggcaagagatggttaacctcagagccacagacgtcaggctcatgcgccagttgcttgtaatcaatgagagcatcgagtccatcaagtggatgatcgaagaaaaagccaccattaccagcagaggcagcagcctcagtggcagcctgtgcagtttgttggagagtcagagcacctccttacgtggcagctacaacagcctacacgatggcagtgatgggctggatggcatttccgtgggaagttatctggacacgttggcggatgatgtcccaggccatcagaccccttcagacttggaccaattcagtgacagctccctcatagaggactcacaggcactacacaagcgtcctaaattggattctgaatactactgctttggctagtgacagttttttgcatgggactggtgtgcaatgaacttgtatttatccttcttctccgctgctatatttttggtgtgatttttattttaataagatgacctttttaaaagaagctgattttgaaactgcttaatggtattgctgttgctcctaatacttctcatctgagctgatttatttttctctgttacatctctattttttatttattacaatgattttctcccttcttttacagtagcacaaacaaagtagggggaaaagaataagcaataattatgtttttgcttttgttttcagagcaatgggtcagggattacaagaaaaactttgctaaattttacaataaaccaaagtctgataacaaaaaaaaaagctgcttgcgtccttaaatgacttaaggtttcatcttccagaagatattgagatatattactgtttgcatatcaggttgaacaaaatgcttggaacaaaattaagcattatttctagaccacaacattctagtgtataatcaaccatactgttagtcacacacgcccacatgacaatcatctgaaagtccccaactatacacattctgttcaaccaactcacccttgtgttggtactttagattaacattttgtcatcagtgattctaactcaaatcatatgtttatttgtgtaataaaatgtattattctcccaaatttcaaggaataattgagattaagtatggaggccattcaaggcaaaaatgtcctaaatttaattgcattttgagattttgttggcatttacttgtatgtattttgtgattctgataggatgta

SEQ ID NO: 466103 - DNA, 2611 bp, Homo sapiens
agcagcagcatttggcgtagaaggaggggaacaacaggatataatgttgtgcacaaaagcacatgcacaattagtagtggtcactgccctgactctggcctccctggactcatacatgcctggatatggagagcctgtgctccacgtgatgtctgctactgggcttgcaatgtttcctccaagtatggtttgttacataggtatacgtgtgtcatggcggtttgctgcacctattgatgcatcctctaagttcctgcccctcatcccccaaccctcaacaggtcctggtgtgtgttgctctcctcgttgtgtccatgagttagttctcaatgttcagctcccacttatgacgacagggttgggaaaattccggttgctcttcttgtctgtgatatacggtagaagggttggtcctggtttggtccacctgccagcggagtttaaagtttccgaggctcagaggaacacaatgacttggatcaaacagcctaaatgggaagaaggacatttttgctgcatcaaggaagccgttaaactcctgctaagctaactagctcttttttatgggtccatgcacacgaccgaactcctctttcactgaccagagattatttctgacaacccaggatatcccgaaagcttggaggcatatggctggaaaatgaaacgacccaggacatcgtttctggctgcatcattattttgtgtcgcgtagtaccagatgggcagtcagtgagcggcgcagggatgtgaacggacggttttataatgtgaaaattttcccttggtaaagctaaaacagatttaatttccctctcttttctttcactacttccccctctttattccccctctgtctgcaatatcagtgaactcaactttgcagtgaggtggccaaaaagagagagaatgaggagatcttgatcatcttagtgtcggaggagtcgcagcggactgggaactgcagctgcgaccccccgcgtcctgtgcggatttcagggctgataccgcataggcggttatggaaaggacggtacaccggagcggcggaggatagagaccctggcccccggagaggtctgctgatttcgcagcagccttcgaagccgtggctgcctttcatctgctgcgttttattactattatcgccgttccggaaaagtcatggaagacagcccgctgccagacctcagagacatcgagctgaagctggggcgcaaagtacccgagagtctagtgcgctctctccgtggggaggagccggttcccagggaaagggacagggaccctgcggggggagcggtggtggtggcggcggcggcggcggctgcagtagcagcagcagctactgcagcttccctccctccttgtcgtcctcctcttcgtcctccccaacctctggctccccacgaggtagccactctagcgccctggagaggctagaaaccaagcttcacctcctcaggcaagagatggttaacctcagagccacagacgtcaggctcatgcgccagttgcttgtaatcaatgagagcatcgagtccatcaagtggatgatcgaagaaaaagccaccattaccagcagaggcagcagcctcagtggcagcctgtgcagtttgttggagagtcagagcacctccttacgtggcagctacaacagcctacacgatggcagtgatgggctggatggcatttccgtgggaagttatctggacacgttggcggatgatgtcccaggccatcagaccccttcagacttggaccaattcagtgacagctccctcatagaggactcacaggcactacacaagcgtcctaaattggattctgaatactactgctttggctagtgacagttttttgcatgggactggtgtgcaatgaacttgtatttatccttcttctccgctgctatatttttggtgtgatttttattttaataagatgacctttttctcatctgagctgatttatttttctctgttacatctctattttttatttattacaatgattttctcccttcttttacagtagcacaaacaaagtagggggaaaagaataagcaataattatgtttttgcttttgttttcagagcaatgggtcagggattacaagaaaaactttgctaaattttacaataaaccaaagtctgataacaaaaaaaaaagctgcttgcgtccttaaatgacttaaggtttcatcttccagaagatattgagatatattactgtttgcatatcaggttgaacaaaatgcttggaacaaaattaagcattatttctagaccacaacattctagtgtataatcaaccatactgttagtcacacacgcccacatgacaatcatctgaaagtccccaactatacacattctgttcaaccaactcacccttgtgttggtactttagattaacattttgtcatcagtgattctaactcaaatcatatgtttatttgtgtaataaaatgtattattctcccaaatttcaaggaataattgagattaagtatggaggccattcaaggcaaaaatgtcctaaatttaattgcattttgagattttgttggcatttacttgtatgtattttgtgattctgataggatgta

SEQ ID NO: 466104 - DNA, 1004 bp, Homo sapiens
tatatctgacaagatggtattggcagggccggtttcttcaggagcctctctccttggcttaaccactcacctacccgctaaactacatccaagaagagtccaaaagaccctttaccaaggcagtgagaaatataattgtaaagggagtcacagcatcctgaaagggatcctcagtgaagctcttctctgtacaccagtaatgacagttagaacagttgcaacagaactaaagctcccagaatccaattggatgctgggttgcagggtggttagagctataggcaatcttacctatgttcaaactttgaagggtatttttagatctaagagatctgggtctttaaagtcagtcttggccagaatcaggctgcaaatgccaaagcaagagatgtcagcaatgagttgcaggtctttgccaaacagagcatcatctggcagtgaaaggagagcagaagaggggattttgaagtcttcctgcacacttccgacaacttgattgaactggacgcccttggaagttcatggcatcgcctataacagagtctgtgtaggcaaaaccccagcctatgctggaatttaactcttaaaaagcaacctaagtagaacacaagattgtaaactctaaggagattctaacaccaaaagaaagtatgacttgagccaatgaaatgccaaaatccagttctagctgacaacgtcagtagtggaggacagacttccacttgccatttgaggaaaaagcatgtggattcatgagcataacagcagataccccactaccaattaccaaatcctgtgcacattcctgttctccagtcaccttttctccataaatgtttgtggtataaaatgaaaaccttcccaaatattaaccagtcaacctttattctctgatttctttctctaaactagtgatgccttcattttcagtgtcactgacttgcacctaacagttcccagcttatgttgtaggtgctatctcatcttaaactgatcctgttctc

SEQ ID NO: 466105 - DNA, 1208 bp, Homo sapiens
tacgttctgtcctcctgcagccatctaaaatcagccagaaaggtttaggatcccatttcctgttcttgcatcggctgtccaagctgctgttcctctctccgcagtaagagggtgtttctctccctgttcaagaggagcaccaacacttgaggacagtatcatccctagaccttggcaagagagaccactgagtgaggcatccatggaacccaaggaagaggcctacgaagaacctgcagtcaccttctagaccattctccctcaccaaactgtcccctccagagagctgaggactggatcttcccatgctgacacctccagtgggaaagaaaattctagattcagctctgggtgtccaagtcattatgaaggcatatttgtcaaggtggaagaaaaggacatattctatttagcagtttgtaagtttgatcgataactttaaaatatttggacctatggtgtgggtgccacttgcctcttaatcagtgttgggcaggggccgaagggcaggcaggggggtgttgggcccaagggggccagctggatttggctcttgtctctgccccgggcctgactccctgctgccaatgcctgtggtctggatgcacttgctgcgaattgcccaggtggcagtggtggagcagagtctgctgggagacacagcaggaaacatacagcatcatggggtcccagaaagtgaaaatgcctgagaaggcgctgggagtgactggggacagccagatgaaggtccagttctggtgtcgggtccctgaggagggagctctgtggactggctccgtagcacatgctcctggggcttgcctggcaccggtgcagggatcaaggtgtgacaagcacaaggaagagagagcccggcaccacagcaggagggcccagcatcagagggaccgggggaagatccagaacctctgcggtagccacctcatccggtatacccgggctcccggggcactcacgggccagcgcttcctggggggtgtgttcacacttctcactgggggtcttgagtgtcactctttgacctctggtatctacacccacaagctcctttggctccttgtgtcactcatagctgactgagcagcaccctggggttccacatggaaatgggagacagttcctttgttttgagctttctgtttcaatgtctgctgtgccttctcacatccctgacttcaccacatgga

SEQ ID NO: 466106 - DNA, 462 bp, Homo sapiens
ctgtgcaggtgtgtggtgatctgctccttagagatatgtggaattttccggtaacgacgctaattagtatatcctcgtgtccaccaccacataggattccaaacatctggtttataatcctggctctgcactaaatggctatgtggcctcagttttctcacctgtaaaatcaagagcctggaacaagtacagttgactctgaacaagtcaggtttgaactgcatgggtccactcatatgaagatttctttcaacgaaagctaccccgagtgtgcctgcctttcctgcctccccttccacctcctgcacctctaccatccctgccacccctaagacagcaaggccagtctcttctctctccccctcctccttcagcctattcaacttgaagatgacaaggatgaagagctttatgatgatctacttccccttaatgaacagtaaatatattttttcttcctta

SEQ ID NO: 466107 - DNA, 1099 bp, Homo sapiens
cactacttataatgcctaatacaatatgaatgctcttcggggaggggggaagtatcgcaagaaaacaggaacactgaaagacatgggctccttctcagatcttagagaacaaaagaaagaactaaatggagatctctcctacaataaaccagggacggaacaaacaacagcagcagcggtcgcagggaaacagaatctgtgttggcgtgcagggagcaggcagcgtctgcaaagtagcgctggcaaccacaacagagaggccagcaacaggaggagcaggaggagccctggaacaagtacagttgactctgaacaagtcaggtttgaactgcatgggtccactcatatgaagatttctttcaacgaaagctaccccgagtgtgcctgcctttcctgcctccccttccacctcctgcacctctaccatccctgccacccctaagacagcaaggccagtctcttctctctccccctcctccttcagcctattcaacttgaagatgacaaggatgaagagctttatgatgatctacttccccttaatgaacagctggagtgcaatggtgtgatcttgtctcactgcaacttctgcctcccaggttcaagtgattctcctgcctcagcctcccaagtaactgtgatttcaggtgcccgccactacacccggctaatttttgtatttttagtagaggcggggttttgccatgttggccaggctggtctcaaaactcctgacctcaggagttcggcctccgaaagtgctgggattacaggcatgagccactgtgcccggcctagaaaactggtgtttccaacaagtcctttggtgctgctggtgctactgcgggccttctgaggagactttgagaaccgctgcatcaggattatcagcctggtaactcctggccgaagaaatgcacacccttcatttggctaaaagaaagaatttccaatattcataaagaaaacacaacttgtgggttctccaagcaggagaggaaaaatcatgttccagtctattcctgtaactaatgaagggctcaggtttcaaagtttacaccatagttttagggacacagaaatttaaaagcgaatgtcc

SEQ ID NO: 466108 - DNA, 372 bp, Homo sapiens
tgcttttccaaaataccttttttcagagtcatcaccatgaggggctgggacacgtgggcaatggagacttggctggagaggccagcctggaaggtctccaaaggagggccctacagatgtgtttcgaggaacaaagtgtccacaaacttcctgtgcctgccaggtagaagttatttgcacacacatccttcctccgcacaaattgtatccacccccatgcataattgtaggcctcctcctccacattgactgttaggaatcattaaaactgtccctgaaaacagaggtaatcttcacctgttgtgcagagggtaaagaaagtttttttccagtgctttttggggaattgttccgtgttccttactctagatg

SEQ ID NO: 466109 - DNA, 988 bp, Homo sapiens
  misc_feature (44)..(44): n is a, c, g, or t
cccaatctcactcctccccctctccccacaacccccgcccttanagcaacatgaggggctgggacacgtgggcaatggagacttggctggagaggccagcctggaaggtctccaaaggagggccctacagatgtgtttcgaggaacaaagtgtccacaaacttcctgtgcctgccaggaccgtcactcccaatgtgaagaaaagggggaaagacctggaaaagacatttgcagcaaaggaacagttttgttagggcctgtggcccgcaggttccagcgtggcagcctccgaatgagatttcccttctatgactttacccccaaaaaatcattgagagacacaagtaagtatgcggaacttcgtccagctggctgcttgggcagctgtagccacgttttctcttctcctggtgctcgctggctttgcttcctcctccatgtcttatccatcctatgtaaggtattgtgtttccaagatagaggagcctttgccccccaacaacgagttccaccctgcagaggcaacagcaaaggcacaaagacatgaagtcagttgcaggctctgcattgtgtttccttcctccaagccccagggaatggagcctccaccatttggtgtttggctagttacagcggcaagagtcagaagagcagctgagtcacacagtggttacaaaagttcccacccaacagtgacacaggtcacttccactcatcatccatcgacggtggaggacatgcccgacttcaaggagggaggggcaggaagaaggggaacggaaatgggtggtgatcaaccctgctgtgtttccaggaagagtgaatgagtgaagtcaccataggtgaagggggtggcaaggctctctaggaggagaaagcagcttagtcaaaagttgagagatgtaggtgaagatgagtattttcaggaaaagcagtgagtgactggctagaggagaatgtggggagtcagacacaagcttgggctcacc

SEQ ID NO: 466110 - DNA, 3633 bp, Homo sapiens
accacttccttaagcagctttccctgccaattccactcgcagcctgccagagcgcagctagagtttctgggcagaggagggagaagcaccccgcccatccccgccggcgcctcgcctacgtcactgcttcgagccgcagaccccctccctccttcccggtcgcggtagctttgacagagcgcaatggcggcaaccgcgtctgcaggggtgccggcgaccgtgtcagaaaagcaagagttttaccagcttctgaagaacctgatcaatccaagctgtatggtgcggaggcaagcagaggaaatctatgaaaatatcccaggatcctcatccaagggtgagggctgcagcctgtactacacttggacagatggctacagattttgcacctaatttccaaaagaaatttcatgaaacagtgattgcagctctgttacgtaccatggaaaatcaaggtaatcagcgtgtgcaatcacatgcagcttctgctcttattatttttattgaagactgccctaaatcattgctagttctatatgtggatagtatggtgaaaaatctacattccgtcttggtgattaaacttcaagagttgattcggaatggaactaagttggctttggaacaacttgtgacaaccattgcatcagttgcagatacaatagaagaaaaatttgtcccatattatgatatattcatgccctcactaaagcacattgttgagcttgctgttcagaaggaactcaagcttctgagaggaaaaactatcgagtgcattagccatattggtcttgctgttgggaaggaaaaatttatgcaagatgcatcaaatgtgatgcagctgttgttgaagacacaatcagacttaaataatatggaagatgatgaccctcagacctcttacatggtttcagcatgggctagaatgtgtaaaattcttggaaaagattttcaacagtaccttccactggttatcgagcctcttattaagactgcttcagctaaacctgatgttgctctcttagacacacaggatgtggaaaatatgagtgacgatgatggctggcaatttgtaaatcttggagaccagcagagttttggaattaaaacttcaggacttgaagcaaaagcaactgcttgccaaatgttggtttactatgctaaggagttaagggaagggtttgtggaatatacagaacaagttgtgaagctgatggttcctttactgaaattttatttccatgacaatgttcgagtggcagcagcagagtccatgccttttctcctggaatgtgcaagaattcgtggcccagagtatcttgcacagatgtggcaattcatatgtgaccccttaatcaaggctattggtactgaaccagatacagatgtgctctcagaaataatgaattcttttgcaaagtccattgaagttatgggagatggttgccttaatgatgaacacttggaagaactgggaggaatactgaaagcaaaacttgaagggcactttaaaaaccaagaattgagacaggtgaaaagacaggaagaaaactatgatcaacaggttgagatgtctctgcaagatgaggatgaatgtgatgtttatattctgaccaaagtatcagatattttgcactcattatttagtacttataaggaaaagattttaccatggtttgaacaactacttccattaattgtaaatctaatttgttcaagtaggccatggccagacagacagtggggattgtgcatatttgatgacatcatagagcactgcagtccaacttcatttaaatatgtagaatattttcggtggccaatgctactaaatatgcgagataacaaccctgaagtcaggcaagctgctgcttatggcctgggtgtcatggcacagtttggtggagatgattatcgttctttatgttcagaagctgttccacttctggtaaaagttattaagtgtgcaaattccaaaaccaaaaaaaatgtcattgctacagagaactgtatctcagcaatagggaagattttgaagtttaagcctaactgtgtaaatgtagatgaagttcttccacactggttatcatggcttccactgcatgaagataaagaggaagctattcagactttgagttttctctgtgacctaattgaaagtaaccacccagttgtaattggtccaaataattccaatcttcccaaaataatcagtataattgcagaaggaaaaattaatgagactattaactatgaggatccttgtgccaaacgcctagctaatgtcgtgcgtcaggtacagacttctgaagatttatggttggaatgtgtatcacaacttgatgatgaacagcaggaagccttacaggagttgctaaattttgcttgaagcactttaatataacttgaatattatctattataaaagtaactacaaataagtgttgtgaatagattttattataaatcagagaactgttttctccctgctaagcagtttatagttcttctccatgtttctccagaattaatcagtgttagtcctctgtttatctcgcatgttttatcttccaaacacagaccttggtgataacctgtgcttcaaactgtcttaaacaatgtttgtcacctttcccctagttgatgtaaagtatataaattgttgctatttgtttgaactattattgatgctagccaagcagtatacttgatgtgaagatgtcatgctatcacaatatgctaagagctcacaaaaataagatagaatttccaggacaaacatctttggaattgtgagtgaaggatatagtggcaggcttgtccctctttaattaatactcttggtatttgtggtgatgggaggatgctgttactaggagagttttgagatactgcagtggatgtgggatgtatatgaacttcttcataatgtactcctgggaactgggtaggacatatccatattgtagttcccaaggtgtctggttgagagttagagaacttttaaatttctttagccagacaggtctctatttttttaagttatccaggactccaagaaccatagttactgaaaagggagtcctgatacatctaatattggtagcatgtaacagtgtttgacaaagagtaagtaagcagtattcttgggagtcagtgttatgtgtttcagcagagtattattttgtatatgtatgccattttctccctgcaaagcagctcaacaagagaaaaagctctagttatagggcttaaattgatttctatttcaaataatttcctaagagattctagagtagaactgaagagtattctattggaaaagtgaaaggaaagaaatgtaattttctttgaacatgaaaaagaaaacaactttgagagtagtcatttagcagtagatgtgcattattatgagaaaacagttctataagtccagggttaattatattaattggaatgtcagtctttaatgtcgagcttattgtagggtagaaaagagctttctactcagctaacgattactcattgatccaaaacttaaatacatctataatttcctggggctattgtgagtactgtgtatgtatttagcaaatatttaagacctagtaagtgctcaataaattgtagctgtta

SEQ ID NO: 466111 - DNA, 490 bp, Homo sapiens
tgtttcagcagagtattattttgtatatgtatgccattttctccctgcaaagcagctcaacaagagaaaaagctctagttatagggcttaaattgatttctatttcaaataatttcctaagagattctagagtagaactgaagagtattctattggaaaagtgaaaggaaagaaatgtaattttctttgaacatgaaaaagaaaacaactttgagagtagtcatttagcagtagatgtgcattattatgagaaaacagttctataagtccagggttaattatattaattggaatgtcagtctttaatgtcgagcttattgtagggtagaaaagagctttctactcagctaacgattactcattgatccaaaacttaaatacatctataatttcctggggctattgtgagtactgtgtatgtatttagcaaatatttaagacctagtaagtgctcaataaattgtagctgttattgctgttgttgtttgta

SEQ ID NO: 466112 - DNA, 3718 bp, Homo sapiens
accacttccttaagcagctttccctgccaattccactcgcagcctgccagagcgcagctagagtttctgggcagaggagggagaagcaccccgcccatccccgccggcgcctcgcctacgtcactgcttcgagccgcagaccccctccctccttcccggtcgcggtagctttgacagagcgcaatggcggcaaccgcgtctgcaggggtgccggcgaccgtgtcagaaaagcaagagttttaccagcttctgaagaacctgatcaatccaagctgtatggtgcggaggcaagcagaggaaatctatgaaaatatcccaggatcctcatccaagggtgagggctgcagcctgtactacacttggacagatggctacagattttgcacctaatttccaaaagaaatttcatgaaacagtgattgcagctctgttacgtaccatggaaaatcaaggtaatcagcgtgtgcaatcacatgcagcttctgctcttattatttttattgaagactgccctaaatcattgctagttctatatgtggatagtatggtgaaaaatctacattccgtcttggtgattaaacttcaagagttgattcggaatggaactaagttggctttggaacaacttgtgacaaccattgcatcagttgcagatacaatagaagaaaaatttgtcccatattatgatatattcatgccctcactaaagcacattgttgagcttgctgttcagaaggaactcaagcttctgagaggaaaaactatcgagtgcattagccatattggtcttgctgttgggaaggaaaaatttatgcaagatgcatcaaatgtgatgcagctgttgttgaagacacaatcagacttaaataatatggaagatgatgaccctcagacctcttacatggtttcagcatgggctagaatgtgtaaaattcttggaaaagattttcaacagtaccttccactggttatcgagcctcttattaagactgcttcagctaaacctgatgttgctctcttagacacacaggatgtggaaaatatgagtgacgatgatggctggcaatttgtaaatcttggagaccagcagagttttggaattaaaacttcaggacttgaagcaaaagcaactgcttgccaaatgttggtttactatgctaaggagttaagggaagggtttgtggaatatacagaacaagttgtgaagctgatggttcctttactgaaattttatttccatgacaatgttcgagtggcagcagcagagtccatgccttttctcctggaatgtgcaagaattcgtggcccagagtatcttgcacagatgtggcaattcatatgtgaccccttaatcaaggctattggtactgaaccagatacagatgtgctctcagaaataatgaattcttttgcaaagtccattgaagttatgggagatggttgccttaatgatgaacacttggaagaactgggaggaatactgaaagcaaaacttgaagggcactttaaaaaccaagaattgagacaggtgaaaagacaggaagaaaactatgatcaacaggttgagatgtctctgcaagatgaggatgaatgtgatgtttatattctgaccaaagtatcagatattttgcactcattatttagtacttataaggaaaagattttaccatggtttgaacaactacttccattaattgtaaatctaatttgttcaagtaggccatggccagacagacagtggggattgtgcatatttgatgacatcatagagcactgcagtccaacttcatttaaatatgtagaatattttcggtggccaatgctactaaatatgcgagataacaaccctgaagtcaggcaagctgctgcttatggcctgggtgtcatggcacagtttggtggagatgattatcgttctttatgttcagaagctgttccacttctggtaaaagttattaagtgtgcaaattccaaaaccaaaaaaaatgtcattgctacagagaactgtatctcagcaatagggaagattttgaagtttaagcctaactgtgtaaatgtagatgaagttcttccacactggttatcatggcttccactgcatgaagataaagaggaagctattcagactttgagttttctctgtgacctaattgaaagtaaccacccagttgtaattggtccaaataattccaatcttcccaaaataatcagtataattgcagaaggaaaaattaatgagactattaactatgaggatccttgtgccaaacgcctagctaatgtcgtgcgtcaggtacagacttctgaagatttatggttggaatgtgtatcacaacttgatgatgaacagcaggaagccttacaggagttgctaaattttgcttgaagcactttaatataacttgaatattatctattataaaagtaactacaaataagtgttgtgaatagattttattataaatcagagaactgttttctccctgctaagcagtttatagttcttctccatgtttctccagaattaatcagtgttagtcctctgtttatctcgcatgttttatcttccaaacacagaccttggtgataacctgtgcttcaaactgtcttaaacaatgtttgtcacctttcccctagttgatgtaaagtatataaattgttgctatttgtttgaactattattgatgctagccaagcagtatacttgatgtgaagatgtcatgctatcacaatatgctaagagctcacaaaaataagatagaatttccaggacaaacatctttggaattgtgagtgaaggatatagtggcaggcttgtccctctttaattaatactcttggtatttgtggtgatgggaggatgctgttactaggagagttttgagatactgcagtggatgtgggatgtatatgaacttcttcataatgtactcctgggaactgggtaggacatatccatattgtagttcccaaggtgtctggttgagagttagagaacttttaaatttctttagccagacaggtctctatttttttaagttatccaggactccaagaaccatagttactgaaaagggagtcctgatacatctaatattggtagcatgtaacagtgtttgacaaagagtaagtaagcagtattcttgggagtcagtgttatgtgtttcagcagagtattattttgtatatgtatgccattttctccctgcaaagcagctcaacaagagaaaaagctctagttatagggcttaaattgatttctatttcaaataatttcctaagagattctagagtagaactgaagagtattctattggaaaagtgaaaggaaagaaatgtaattttctttgaacatgaaaaagaaaacaactttgagagtagtcatttagcagtagatgtgcattattatgagaaaacagttctataagtccagggttaattatattaattggaatgtcagtctttaatgtcgagcttattgtagggtagaaaagagctttctactcagctaacgattactcattgatccaaaacttaaatacatctataatttcctggggctattgtgagtactgtgtatgtatttagcaaatatttaagacctagtaagtgctcaataaattgtagctgttattgctgttgttgtttgtacctctattgtgtctggaacttcttttactttagaattttcccaatccattccctactcattcatatt

SEQ ID NO: 466113 - DNA, 588 bp, Homo sapiens
atggcggcaaccgcgtctgcaggggtgccggcgaccgtgtcagaaaagcaagagttttaccagcttctgaagaacctgatcaatccaagctgtatggtgcggaggcaagcagaggaaatctatgaaaatatcccaggtctgtgtaagactaccttcctcttagatgccgtcagaaatagaagagcaggttatgaggtgagacaaatggctgccgcactgctacgacggcttttgtcctctgggtttgaggaggtttatccaaatctgcctgctgatgttcagagagatgtcaagattgaactgattctggctgttaagttagaaacacatgctagcatgaggaaaaaactttgtgatatttttgcagtgctggccaggaatttgatagatgaggatggcactaaccactggccggaaggtctgaagtttcttattgattcaatctactccaaaaatgtggttctatgggaagttgcacttcacgttttctggcactttcctgggatttttgggacccaagagcggcatgatttggatatcatcaaacggttgttggaccagtgtattcaagatcaagaacatccagca

SEQ ID NO: 466114 - DNA, 1409 bp, Homo sapiens
  misc_feature (3)..(4): n is a, c, g, or t
  misc_feature (6)..(8): n is a, c, g, or t
  misc_feature (12)..(12): n is a, c, g, or t
  misc_feature (15)..(16): n is a, c, g, or t
agnnannngatntcnnagaaagtgtctagtgtgtgttggtgtaagacacctggtatctttaggcagcatgagtcctttgtaattactacaggttctgcaaagaactattactcttggcaaggactttattgacattccctttagcaaacagagactcggtgatgttcacggccaccagctctcaggaaaggctgttgtgggcagcaacacagctggacattcctttgcttactgatgggagattcataaggatacttgctcttggagcccacctgccctgctgggaggtgctgggaacacctggagagccatgtgcagctgtgtggccagcaatcccagctttgttcccagccagctgccagacctgggagtgaggaagccttccagaagaccccagcctagtccccatctgacagcgacctcatgagatatcctgagtgagatctacccagccgagcccaataaacccatgaaaacatcagagtgcacaggtgatgaatcctgttgggactgggcccttcccttcaagacagtgggctctcttctggcccaacatgtgtctagaaatgttcaggagctagagcctggaatggaggcctcaggactctgcctggtgccctatcatattatggctgagctggcatccaagttgcaagacaaagttctctttactcttccctcttctctcctcaagcagagtaaaggaatatctcccagagctgcgagctgtactgcctggagcattctctttgcctctccagctggtgtctcactacatcatgtgcccccaagtccactggctctgaacccagcacagtatcaggacttgcccaggaattatagtccttatggcctagattgccttgcaagtttatttaggacccagagaactttagtccacagaggacacaaaagaagctttcaggtcatttatgtggctcttgagctagcaatttgaatttctaagatgcatcattctctttcgccactttgtccagcaacattaggagtaaacagccaactcattatattaataagatatgcaaaaatgttcagaagtattacatacacagttacccagctccttgttttttataagtggtcgattaggagtattcaatagaggtatttagtgtatctctattgacagatcacatcgtagactatcagtgttctccttagtactgaaaatagagtcattactgtctatacatctaatcagtatattcattttctaggtggtagaaatttgatctccactgtcagtacatctgagtaatattctgttattaaatgaatggattattatttatatcattgcaatgtcttcaccaagttgtcactttattaaaattaggattcttggtggtagccaaaggcttgcttttgacacaggttggttgctagga

SEQ ID NO: 466115 - DNA, 2720 bp, Homo sapiens
tcaaaagccctggagggtcggacatgagactggcatctgaagtggagatccagtctctcaagattctactgtttcccaagaggagaactcaaaagaggataaaatggtcactgtttgtcccaatactgagtcctgtggccgtaagacaaggaactgtggcagccaccagaagcaggaagaggcaaggaacagattatcccccagagcctctgaagggagcacagccctgccaacacctagatctcagacttctggcctccagaactgtgagagaacaaattcctattttgagtcaccaaggttatgggaatttgttacagctcccagaggaagatgaatcagctttagataaaataatagaaaggtgcctcagggatgatgatcatggcttgatggaagaatcccagcaatattgtggcagctcagaggaggatcacggtaatcagggaaattcaaaaggaagagtcgcacaaaacaaaactcttgggagtggcagtaggggtaagaaatttgacccagataaaagcccctttggacataatttcaaagaaacttcagacttaattaaacatctgagagtctacttgaggaagaaatctcggaggtataatgaaagcaagaaacccttcagttttcattcagaccttgttctgaaccgcaaggagaaaaccgccggagaaaagtcacggaaatctaatgatggtgggaaagtcctgagtcactcttcagctcttactgaacatcagaaacgtcagaagattcatttgggggataggtcccaaaaatgcagtaagtgtgggataatctttattagaagatcaactctttctaggagaaaaacccctatgtgtgagaaatgtcggaaagattcatgtcaagaagcagccttaaataaagatgagggaaatgagagtggagaaaaaactcataaatgtagtaagtgtggaaaagcctttggctatagcgcctcactcaccaaacatcggagaattcacactggagaaaaaccctatatgtgtaatgaatgtggaaaagcttttagtgatagttcatcgctcacaccacatcatagaactcatagtggagagaaacccttcaaatgtgatgactgtgggaaaggtttcaccctaagtgctcacctcattaaacatcagagaattcatactggagaaaaaccttataaatgtaaagactgtgggagaccctttagtgacagttcatctcttattcaacatcagcgaattcatactggagaaaaaccctatacatgtagcaattgtggaaaatccttcagtcatagctcatccctttccaaacatcagagaattcatactggagagaaaccctataaatgtggcgaatgtggaaaagcctttaggcagaattcatgccttacccggcatcagagaattcacactggagaaaaaccatatttgtgtaatgattgcggaatgacttttagccattttacgtctgtgatttatcatcaaagacttcattcaggagaaaaaccctacaaatgtaaccagtgtgagaaagccttcccaacccattcactgctaagtcgtcatcagagaattcatactggtgtaaaaccttataaatgtaaagaatgtgggaagtccttcagtcagagttcatctcttaatgagcaccaccgaattcatacaggagagaaaccctatgagtgtaactattgtggtgcaacctttagtcgaagctcaatccttgtagaacacctaaaaattcataccggaaggagagaatatgaatgtaacgaatgtgagaagacatttaaaagtaattcaggcctcattagacatcggggatttcactctgcagagtaatcctggaactacattaaagtggggggaatttaattcaaattgtcagttactgaaaccctgggatgtaaacttacagtattgatcagtagctgcagctttcgtaaattggcagttaggaaaaatatccttttgcccattcatccctcttcttttcaaggatggcaacgactggtaaacagtaattagttggtaaagtcactggaaagggaagaatgcaaaatgattctgaggccagacgaattggaaaagctcttttcttcaggggatttctctctgatttcttctactaccatgtagtgtgatggagagaacttgactgcagtcacataacttggattctgtcccagtttgccaaccaacttgctgtatacaccttggacaagtcatttgacctttcagaattttattttcgtcaccagcagaatgaagggatgggattaatgatttttgccttttttggttttttagttttttattggtatcctgataatctctgaagctgtggacataagttatttttttttatttgtcattactttcaagtttctctagtaaaaaatacaataccactattcaggatgctggacttcttttcttttttttttcttttttttttttcaatttttcttttttgggatggagtctcactatgttgcccagactggtcttgaactcctgggctcaagtgatccttccatctcactttcctgagtagctgacattacgggtacactccatcaagcctggttcctaggatgctggacttctagcttagtgagaatgcagtatactttttgaaaacttcgtgcaggaatccctcaaatgctgtaactaggaatggcctcaagtgactaccatattaagttgctctac

SEQ ID NO: 466116 - DNA, 1412 bp, Homo sapiens
tcaaaagccctggagggtcggacatgagactggcatctgaagtggagatccagtctctcaagattctactgtttcccaagaggagaactcaaaagaggataaaatggtcactgtttgtcccaatactgagtcctgtggccgtaagacaaggaactgtggcagccaccagaagcaggaagaggcaaggaacagattatcccccagagcctctgaagggagcacagccctgccaacacctagatctcagacttctggcctccagaactgtgagagaacaaattcctattttgagtcaccaaggttatgggaatttgttacagctcccagaggaagatgaatcagctttagataaaataatagaaaggtgcctcagggatgatgatcatggcttgatggaagaatcccagcaatattgtggcagctcagaggaggatcacggtaatcagggaaattcaaaaggaagagtcgcacaaaacaaaactcttgggagtggcagtaggggtaagaaatttgacccagataaaagcccctttggacataatttcaaagaaacttcagacttaattaaacatctgagagtctacttgaggaagaaatctcggaggtataatgaaagcaagaaacccttcagttttcattcagaccttgttctgaaccgcaaggagaaaaccgccggagaaaagtcacggaaatctaatgatggtgggaaagtcctgagtcactcttcagctcttactgaacatcagaaacgtcagaagattcatttgggggataggtcccaaaaatgcagtaagtgtgggataatctttattagaagatcaactctttctaggagaaaaacccctatgtgtgagaaatgtcggaaagattcatgtcaagaagcagccttaaataaagatgagggaaatgagagtggagaaaaaactcataaatgtagtaagtgtggaaaagcctttggctatagcgcctcactcaccaaacatcggagaattcacactggagaaaaaccctatatgtgtaatgaatgtggaaaagcttttagtgatagttcatcgctcacaccacatcatagaactcatagtggagagaaacccttcaaatgtgatgactgtgggaaaggtttcaccctaagtgctcacctcattaaacatcagagaattcatactggagaaaaaccttataaatgtaaagactgtgggagaccctttagtgacagttcatctcttattcaacatcagcgaattcatactggagaaaaaccctatacatgtagcaattgtggaaaatccttcagtcatagctcatccctttccaaacatcagagaattcatactggagagaaaccctataaatgtggcgaatgtggaaaaggtttcaccctagggcctcacctcattaaacatcagagattc

SEQ ID NO: 466117 - DNA, 3363 bp, Homo sapiens
  misc_feature (2)..(2): n is a, c, g, or t
  misc_feature (4)..(5): n is a, c, g, or t
  misc_feature (7)..(7): n is a, c, g, or t
  misc_feature (9)..(9): n is a, c, g, or t
  misc_feature (13)..(13): n is a, c, g, or t
gntnntntncctntaggagtgacactgctgatcctgtaacatggaggattgtcttcatacctcatctgagaatctgtccaaattggtcagctgggcccatagccatgggactatttgcagcctcattccaaacctgaaacacttgctttctgaaggttcccatgggaacctgacagcaatgtggggctgtagtgctggccatgcttatcactggccactaacagctacttgcagagctgggtcccaagagagggtctgtttccaggataacagaagttttaactctgatagtcccagtataatcggggtgccctctgagacacagactagccctgttgaaaggtaccctgggagaccagtgaaagcaaagctagactgtaaccggaccagagactcttgtgacttctcctactgtagtgagccctctgaactggatgaaactgttgaagaatatgaagatgagaacaccctgtttgacatggtttgtgagtcttctgttacagatgaggatagtgactttgaaccccaaacccaaaggcctcaaagcattgctcgcaaaagacctggggtagtcccatcttccctccattcaagctcccagacgcagatggttgacgaatgcagcaatgatgtcatcatcaagaaaatcaaacaagaaatccccgaagattattacattgtggcaaatgcagaactgacaggaggagtagatggaccagccctgtccttgacacagatggcaaaacccaagcctcagactcacgctggtccctcctgtgtagggtctgctaaactgattccccatgtcacatctgccatcagcacggagctagacccacacggtatgtctgcatccccctctgtgatctccagaccaattgtccagaagactgctagggtatctctggcttcaccaaacagaggaccccctggtacacatggcaccaaccaacaggtggccatgcaaatgcctgtgagcacatcccatcctaacaaacagatcagtatccccttgtctgccctgcagctgcctggacaggatgagcaagttgcctctgaagagttcctgtcccatctgcccagccaggtctcctcctgtgaggtagccctttctccctcagttaacacagagccagaagtgagctccagtcagcagcagcccccagtcgctccagccataaccactgaggccacagcacagtgcataccagaccaggatgaaagagcagctgagctcagcagggagcagaacgagaaaaccatccggagcacgcagaccgcgctccgcaatttccgtgagttcctcatctccaagtatccttctgaaacaagagagatttatgtcatcccttgcaaggagttggatgcctaccttgcctctttctttgttgatgccaggcagaaggatgggtccgaatacgaacccaacagcttggccaattaccagtgtgggctcgaaaggtacctgaaagaacacaggtatggctatagcatcaccagggataaggaattcaagcgttcccaagaggccctgaagcagaagcaaattgaactccgctgtaaaggaaaaggaaataagccacacaagtccatgaagctcacctttgctgacgagctcatcctgcggaaaaggggactgctaagccgatataaccccgagggtttgctcaacctagtctggctcaacaacacaaaagcttttgggcattgcacaggcttccatggatctaccttaaaatggggtgatatccggctccgggtaacagagacgggtctcgagtacttggagtggatgggtcaggacactggagacttgaatgccaaaaccaagagaggggggacagactcccgtgtgtatgccacccagcacgccccacagacctgccctgtccaggactataaggagtatgcccagcggcggcctcccgccatgcgctacgaggatgcccctttctacttatccatcaagccagtcgtgaacctggcggctctgcattggtacaactgccaggcccttggcaagaacaagctggccaagatggtgaagaccatgtgtgagaagggcaacatccctggcaggaaaaccaacttcagtgtgtatcagagctgcagcaccttgtctgaggcccagagcaaccagctcgtgctgatctgtaacaatctgagccagcaggctgcccagtcagtggccggccactccaacaatggcaatttcatcgtctccgcctcctatgactcttcctcagacaccgcttgaccaggtggcttgagcaagactccagtttggttactgtgtccggagaaactgtgattatacaccgcttctcgttccccttcctgtgccctcagtgttaattcactttataaaaatataaatatataatatatttttctttttacaaataagccaatggagataatttagtattactaacatagtatttataggcttaagacaaatgtacttgtgggcgatcaaatgtaattactgttacagactttacaaaaccatacgtggttctcaggcaacacaaagtagagagggaattctgttttttaaaaactgtcaaaaaggaaattgagagtcatcctagacttaacatgcttgcgtcctcaactcctgcttttcgttcccaccccaactccccttttttgtctccttaataaatggctttatttttttaatttttaaaattctatattaatcaagaggagacattaactttactgctgacgcaaaactgtattcagctagatccacaatatgaaaatgtataagctcaacatcaaattatttacatcttctcttttttaacttaattagagttttagctcctgtgcctcattttttacaatgtatgagaatctagatgtttagctaacatcttttctttttggggggaaagggtagaaggagggaataaaggtgccattctttttgggagatacatgattttaaaataatacccaaagtctaatattttggctaaaaagactgttacatagctcattttaactattgtgcttgaacctggaaagaatgtttctttttttgtccctaagaaatgggtataaatgaagtttgacaggaaatttaaagctaccaaagctttgaaaatgttgccaagcattagattgcctataaagaagagcctgttttaaaatcaataaagtgaaggcatttctgtaccatccactgtgttcatgtaggtgcacatatgcatcagagtgtacagatctgtcatcaatgactatcacctcttgagcactgacaatgtgccattgtactgagtgctttataagttgtttcacttaattctcacaatagtcccattagtaaagactgttcttattttaaggatg

SEQ ID NO: 466118 - DNA, 1112 bp, Homo sapiens
gaagagactgatcagtaaccagaagatgtgtgcaagtatggcctaggaccttcacaggaaatgaggccaagactgatggatttggaatcaatgtgggagaggtggaaaaggataatatggcatccacacgatgaagcattgcatcccaagtggctgaaacatcaagaaggttccagaaggcatctcaggcactatcaggatcaaccattacggtcatctccggttatcattccccagtctgatgatcagatattgaatggaataaaagctggcaacccccagccagcagctggcaacctgctggggtccccttccacgctgtggaagctttgtccttgcagtcttcacagtaaaccttgctaccactcactctttgggtctgtgccatctttaagagctgtaacactcactgcgaaggtccacagctttattcttgaagtcagcgagaccatgaacccaccggcaggaactgactctggacacaatggcggctcctgaccagaccctcagaacctgaggacgggtgatcatttctggtccagtgtcttgactggcaccaagtcaagcattgtcctccacgtcatcagctgcaggccagataatctaagatgatgccaaacagtcactgcagaagaatttgctgcacggagctgtctgggatgcctcagacctgccagcggtagagctgcctgccttgcttcctcttgcttactcacagctctaagtctgaacttggctgcagctgtcctgaacagcccaggaggagcctaggcaggaggaggcttctctcctatgcaatttggctgaattttagttactcaaaagagcaaaggaagcacttctgaatattcgtcaggaggagccaaccaccttagcttgctccctgatgggttttgttcagcccctgccttactgttgtcagcctggactgtcttctgggcttgggttcaccatgtgtctggaccacgggagtgtctctaggtgtctcccttcctgtgcatttctcctgggcatagacacccatcctgtggaacactgggaggagggtgcaagaccccactgcacccaggcttggttcctcttgggtgcagcagcctcatccccttgcaagc

SEQ ID NO: 466119 - DNA, 1593 bp, Homo sapiens
agtctagagcagtaggctctccaacttgcgactatgtcggaatccactgggtggcttgttgaagcacagactgctggttctgtttctgcgattaattatgtttatcgatttgcatatgttgaaccagccttgcatctccgggatgaagccaacttgatcatggtgcaggaaaaagtgaagctcacaaagttaaatgatgagtctaaagtggtacagcgtggaggtggccgatctagacttcaagccaggtctccaactccccttgtagttgtgaacgtctatgattcccccgctgtattcaaggctcctattcgaccagacatcgtgaactttgttcacaccaacttgcgcaaaaacaacagacagccctacgctgccagtgaattagcaggtcatcggaccagcactgagtcttggggtactggcagagctgtggctcgaattcccagagttcgaggtggtgggactcaccgctccggccagggtgcttttggaaacatgtgtcgtggaggccgaaggtttgcaccaaccaaaacctggcgccgttggcatcgtagagtgaacacaacccaaaaacggtatgccatctgttctgccctggctgcctcagccctaccagcactggtcatgtctaaaggtcatcgtattgaggaagttcctgaacttcctttggtagtcgaagataaagttgaaggctacaggaagaccaaggaagctgttttgctccttaagaaacttaaagccaggaacgatatcaaaaaggtctatgcctctcagcgaatgagagctggcaaaggcaaaatgagaaaccgtcgccgtatccagcgcaggggcccgtgcatcatctataatgaggataatggtatcaaggccttcagaaacatccctgcaattactctgcttaatgtaagcaagctgaccatttcgaagcttgctcctggtgggcacgtgggacgtttctgcatttggactggaagtgctttccggaagttagatgaattgtacggcacttggcgtaaagccgcttccctcaagagtaactacaatcttcccatgcacaagatgattaatacagatcttagcagaatcttgaaaagcccagagatccaaagagcccttcgagcaccaacgcaagaagatccatcgcagagtcctaaagaagaacccactgaaaaacttgagaatcatgttgaagctaaacccatatgcaaagaccatgcgccggaacaccattcttcgccaggccaggaatcacaagctccggatggataaggcagctgctgctgcagcggcactacaagccaaatcagatgagaaggcggcggttgcaggcaagaagcctgtggtaggtaagaaaggaaagaaggctgctgttggtgtgaagaagcagaagaagcctctggtgggaaaaaaggcagcagctaccaagaaatcagcccctgaaaagaagcctgcagaaaagaaacctactgtagaggaaaagaagcctgctgcattaactcttaaatttgattattccataaaggtcaaatcattgtggacagcttcttttgaataaagacctgattatacaggcagtgagaaacaaacaaa

SEQ ID NO: 466120 - DNA, 1164 bp, Homo sapiens
agtctagagcagtaggctctccaacttgcgactatgtcggaatccactgggtggcttgttgaagcacagactgctggttctgtttctgcgattaattatgtttatcgatttgcatatgttgaaccagccttgcatctccgggatgaagccaacttgatcatggtgcaggaaaaagtgaagctcacaaagttaaatgatgagtctaaagtggtacagcgtggaggtggccgatctagacttcaagccaggtctccaactccccttgtagttgtgaacgtctatgattcccccgctgtattcaaggctcctattcgaccagacatcgtgaactttgttcacaccaacttgcgcaaaaacaacagacagccctacgctgccagtgaattagcaggtcatcggaccagcactgagtcttggggtactggcagagctgtggctcgaattcccagagttcgaggtggtgggactcaccgctccggccagggtgcttttggaaacatgtgtcgtggaggccgaaggtttgcaccaaccaaaacctggcgccgttggcatcgtagagtgaacacaacccaaaaacggtatgccatctgttctgccctggctgcctcagccctaccagcactggtcatgtctaaaggtcatcgtattgaggaagttcctgaacttcctttggtagtcgaagataaagttgaaggctacaggaagaccaaggaagctgttttgctccttaagaaacttaaagccaggaacgatatcaaaaaggtctatgcctctcagcgaatgagagctggcaaaggcaaaatgagaaaccgtcgccgtatccagcgcaggggcccgtgcatcatctataatgaggataatggtatcaaggccttcagaaacatccctgcaattactctgcttaatgtaagcaagctgaccatttcgaagcttgctcctggtgggcacgtgggacgtttctgcatttggactggaagtgctttccggaagttagatgaattgtacggcacttggcgtaaagccgcttccctcaagagtaactacaatcttcccatgcacaagatgattaatacagatcttagcagaatcttgaaaagcccagagatccaaagagcccttcgagcaccacgcgcctcccgatgtgccacacaatgcgccccccaa

SEQ ID NO: 466121 - DNA, 909 bp, Homo sapiens
cttgctctctcaccaaggctggagtgcaatgactgcgtacattgaacaaagcacctactatatgattctgtttatgagtccagaacaagcaaaacgaacagatggtgatggaggtcaaaacagtagtcagcaggacagtctctgctcaaatatcaccttaacagaggctccagcaccctatggcacatttcttataaaagccatagctagaaaagacgccgtcttgcctcaaattgttaacgttacttataagtgcaggaatgcaagagtctggaaatggaaagggcaagacaggagtctgagtggattagagcatctgagaagctctggaaaaaacctctcaggaaaacaacgacttcagcaggacccactagccaaggaaaggggataaaataaatagcaaagggaaggaaaaacacgcacctctgggatgctgcaggtcctgttgcagccgccgccatccctcgaagccaccgttgcttctgccagagctgctactagcgcgcttatcagctccgccaccgcccaagggggaaacttctgcagaaaccccaaccgagcttccgtctaacacaagctccaggccgggcgccgtggctcacgcctgtaatcccagcactttgggagtccgagacgggtggatcacgaagtcaggagttcaagaccagcctcgccaagatgctgaaaccccgtctacgaaaaatacaaaaattagccgggcgtgatggtgggcgcctgtaatcccagctactggggaggctgaggcaggagaatcgcttgaacctgggaggcagaggttgcagtgagccgagatcgcgccactgcaccacagcctgggcgacagagcaagactccttaataaataaataaataaataaaaaataaataaaataagctacttcgagctcc

SEQ ID NO: 466122 - DNA, 1536 bp, Homo sapiens
ccctgaatggcgctttgctgtgaatctccgcggggaggctcttccaaccaggggctgagcttctgcgctgtggagaagccagcctggagtctgcgggagcccagagaagaggggagtggaggttaattccaatatgaccgcatcgaggacgctttccgaaagggatagcaccccaaatctcactctatttgaagaaaatgtttggaagctctgtgaatacatcaaaaaccatgaccagtatcctttagaagaatgttatgctgtcttcatatctaatgagaggaagatgactgcccccttagtgtcccacagtttttgtggaattactgcccttcccagaatgttcacaaaccctgaacacagacgtctatccagtcctgttgttttgcatgaggttcaggagccttgtgggaaagaagccaaatggtctgtgttctcatttagggttcacacgtgtataggcttgtcccgtgggctagaggtcctcaaagatgtctttgctagaggagagaaaaacatgaacaggtccctgagagaaaatcaatacaaacatttttataattctaatttgggttaataaagattttaaaatatttcttggttaacttttgtaattatatacacaacaaatgtgtaaataactaccttgttaaacaccttttaatagcacaaggtttttatatttgcaagctgttgatatctttctaaaactgtttaggttatagtctattgatactttttatatacaattttataaatataaatattataattttatattaatggtaccaaaaatacatttcttaaggttaaaagcatgcacttccatgcatacttgcttttggggagagtggggagaagacattctaataatcagtttgtgaaatagcttctgttggaaaccttttgaggggaataaggaatggtcatctaaaatgagagattctggattttaatgcagttcaaagttgagctgtatttttggtgttgatttatctggattttttttaaagccttctaaaacccagtgaattcaataccttaattagtacatactatcttatgtaatgcataaagcaatgccagtcactgagaacatttaaatatatttatattcctggagatacacattctcatttttgttggtttattataaattattcttctagatgcatcttttataactaggatttcattttgtgtgtatagcttatgtaataaattttaaaggtgaaaactctcttaaatttgtttctatttcttaagtattttaaaacatagcaaagataattctgtgcaaaagaagtgtaaagtctgttctttcatatattactgtgaaaatttaaagtgctgttgacactggaatgtttttatatggtacatgtattttaggtacaacgactaaagtgcttcctgaaatgtcttctacagattttagaagtgttatgtctacattcctatgtagagtttgaaaaccatgctgaaattgcagtgttgaatgttatctcccatttgttgctcaaaagtgcagttaac

SEQ ID NO: 466123 - DNA, 1807 bp, Homo sapiens
  misc_feature (4)..(4): n is a, c, g, or t
  misc_feature (6)..(8): n is a, c, g, or t
  misc_feature (13)..(13): n is a, c, g, or t
  misc_feature (17)..(18): n is a, c, g, or t
  misc_feature (20)..(21): n is a, c, g, or t
accngnnncaggntggnntnnggtgtggcacaggacgggctccaggtgacgccggcccagagcaggctccaggtgtggcacaggacgggcaccaggtgatgcaggcccaggacgggctccaggtatggcacaggacgggctccaggtgacgctggcccaggatgggctccaggtgtggcacaggacgggctccaggtgacgccgccacaggacgggctccaggtgtggcacaggacgggctccaggtgtcgccggcacaggacgggctccaggtgtcgccggcacaggacgggctccaggtgtcgccggcacaggatgggctccaggtgtggcacaggacgggctccaggtgatgcaggcccaggacaggctccaggtgacgccagcccaggatgggctccaggtgtggcacaggacaggctccaagtgacgccggcccagagcaggctccaggtgtggcgcaggacgggcaccaggtgatgcaggcccaggacgggctccaggtgacgccagcccaggatgggctccaggtgtggcacaggacaggctccaagtgacgccggcccagagcaggctccaggtgtggcacaggacgggcaccaggtgatgcaggcccaggacgggctccaggtgacgccggcccaggatgggctccaggtgtggcacaagacaggctccaggtgtggcacaggacgggcaccaggtgtggcacaggacgggcaccaggtgtggcacaggacaggctccaggtgacaccggcccaggacgggctccaggtgacgccggcccaggacaggctccaggtgtggcacaggacgggcaccaggtgatgcaggcccaggacgggctccaggtgtggcacaggacgggctctaggtgatgcaggcccaggacgggctccaggtgtcgccggcccaggacgggcaccaggtgacgctggcccaggacgggctccaggtgacgcagacccaggacgagctccacgtgacgcaggcacaggactggcttcagctccacatagacgctctgtgtgatgagggcctaactgatgacctagagggggcagactgggccagtgccattcgcgtcgcagctctggactgcatggaagagaagaaccaggccgtgtgccatgactacgacatccacttctaccccaccttccggtattttaaagcatttacaaaggagtttacaactggagaaaattttaaaggacctgaccgagagctgcgaacagtcagacagacgatgattgacttcctgcagaaccacacggaaggaagccggccccctgcctgcccgcgcctagaccccattcagcccagtgatgttctttcccttcttgacaaccgtggcagccattacgtggctattgtctttgaaagcaacagctcctaccttggacgggaggtgatcttagacctgatcccgtatgaaagcatcgtggtgacccgagcactggacggggacaaagcatttctggagaaacttggtgtttcttcagtcccttcgtgttacctgatctacccaaatggaactgcagaaccttggcaagccctttgcctctgcgtggggtgcccgtgtgcccctcatgaggataagcccttcgcccctgcgtggggtgcctgtgtgcccctcatgaggataagccctttgcccctgcgtggggtgcccgtgtgcccctcatgaggataagcccttcgcccctgcgtggagtgcctgtgtgcccctcatgaggataagccctttgcctctgtgtggagtgcctgtgtgcccctcatgaggataagccctttgcctctgc

SEQ ID NO: 466124 - DNA, 2246 bp, Homo sapiens
  misc_feature (4)..(4): n is a, c, g, or t
  misc_feature (6)..(8): n is a, c, g, or t
  misc_feature (13)..(13): n is a, c, g, or t
  misc_feature (17)..(18): n is a, c, g, or t
  misc_feature (20)..(21): n is a, c, g, or t
accngnnncaggntggnntnnggtgtggcacaggacgggctccaggtgacgccggcccagagcaggctccaggtgtggcacaggacgggcaccaggtgatgcaggcccaggacgggctccaggtatggcacaggacgggctccaggtgacgctggcccaggatgggctccaggtgtggcacaggacgggctccaggtgacgccgccacaggacgggctccaggtgtggcacaggacgggctccaggtgtcgccggcacaggacgggctccaggtgtcgccggcacaggacgggctccaggtgtcgccggcacaggatgggctccaggtgtggcacaggacgggctccaggtgatgcaggcccaggacaggctccaggtgacgccagcccaggatgggctccaggtgtggcacaggacaggctccaagtgacgccggcccagagcaggctccaggtgtggcgcaggacgggcaccaggtgatgcaggcccaggacgggctccaggtgacgccagcccaggatgggctccaggtgtggcacaggacaggctccaagtgacgccggcccagagcaggctccaggtgtggcacaggacgggcaccaggtgatgcaggcccaggacgggctccaggtgacgccggcccaggatgggctccaggtgtggcacaagacaggctccaggtgtggcacaggacgggcaccaggtgtggcacaggacgggcaccaggtgtggcacaggacaggctccaggtgacaccggcccaggacgggctccaggtgacgccggcccaggacaggctccaggtgtggcacaggacgggcaccaggtgatgcaggcccaggacgggctccaggtgtggcacaggacgggctctaggtgatgcaggcccaggacgggctccaggtgtcgccggcccaggacgggcaccaggtgacgctggcccaggacgggctccaggtgacgcagacccaggacgagctccacgtgacgcaggcacaggactggcttcagctccacatagacgctctgtgtgatgagggcctaactgatgacctagagggggcagactgggccagtgccattcgcgtcgcagctctggactgcatggaagagaagaaccaggccgtgtgccatgactacgacatccacttctaccccaccttccggtattttaaagcatttacaaaggagtttacaactggagaaaattttaaaggacctgaccgagagctgcgaacagtcagacagacgatgattgacttcctgcagaaccacacggaaggaagccggccccctgcctgcccgcgcctagaccccattcacgtgaagcctctgcgggccttcttttcgtcttatttgaagtcattgccggatgtgaggaaaaaatcgcttcccttgcctgaaaagccacacaaagaagaaaattcagaaatcgtggtttggagagaatttgacaagtcgaagctgtacacggtggacctggagtcagggctacactacctcctgcgggtggagctggcagcccacaagtccctggccggagcagagctgaagacgctcaaggactttgtgactgtcttggccaagctgttccctggacggccgccagtcaagaagctgttggagatgctgcaggagtggctggccagccttcccctggacaggatcccctacaacgccgtgcttgacctggtcaacaacaagatgcggatttctggaatattccttactaatcacataaagtgggttggatgtcaaggaagccgatctgagttgaggggttacccgtgttctctctggaaactgttccacactttgactgttgaagcctcgacccacccagatgcactggttggcacaggctttgaagacgacccccaggctgtgctgcagacaatgaggaggtacgttcacaccttctttgggtgtaaggaatgtggtgagcactttgaggaaatggctaaagaatccatggactcggtgaaaaccccagaccaagccatcctctggctgtggaagaagcataatatggtgaacggccgcctggcaggccatctgagtgaggatccccggtttccaaagcttcagtggcccactccggacctctgcccagcctgccatgaggaaattaagggcctggccagctgggatgaaggccacgtgctcacattcttgaagcagcactatggccgcgacaacctcttagacacgtattccgcagaccaaggggattccagtgaaggagg

SEQ ID NO: 466125 - DNA, 2480 bp, Homo sapiens
  misc_feature (4)..(4): n is a, c, g, or t
  misc_feature (6)..(8): n is a, c, g, or t
  misc_feature (13)..(13): n is a, c, g, or t
  misc_feature (17)..(18): n is a, c, g, or t
  misc_feature (20)..(21): n is a, c, g, or t
accngnnncaggntggnntnnggtgtggcacaggacgggctccaggtgacgccggcccagagcaggctccaggtgtggcacaggacgggcaccaggtgatgcaggcccaggacgggctccaggtatggcacaggacgggctccaggtgacgctggcccaggatgggctccaggtgtggcacaggacgggctccaggtgacgccgccacaggacgggctccaggtgtggcacaggacgggctccaggtgtcgccggcacaggacgggctccaggtgtcgccggcacaggacgggctccaggtgtcgccggcacaggatgggctccaggtgtggcacaggacgggctccaggtgatgcaggcccaggacaggctccaggtgacgccagcccaggatgggctccaggtgtggcacaggacaggctccaagtgacgccggcccagagcaggctccaggtgtggcgcaggacgggcaccaggtgatgcaggcccaggacgggctccaggtgacgccagcccaggatgggctccaggtgtggcacaggacaggctccaagtgacgccggcccagagcaggctccaggtgtggcacaggacgggcaccaggtgatgcaggcccaggacgggctccaggtgacgccggcccaggatgggctccaggtgtggcacaagacaggctccaggtgtggcacaggacgggcaccaggtgtggcacaggacgggcaccaggtgtggcacaggacaggctccaggtgacaccggcccaggacgggctccaggtgacgccggcccaggacaggctccaggtgtggcacaggacgggcaccaggtgatgcaggcccaggacgggctccaggtgtggcacaggacgggctctaggtgatgcaggcccaggacgggctccaggtgtcgccggcccaggacgggcaccaggtgacgctggcccaggacgggctccaggtgacgcagacccaggacgagctccacgtgacgcaggcacaggactggcttcagctccacatagacgctctgtgtgatgagggcctaactgatgacctagagggggcagactgggccagtgccattcgcgtcgcagctctggactgcatggaagagaagaaccaggccgtgtgccatgactacgacatccacttctaccccaccttccggtattttaaagcatttacaaaggagtttacaactggagaaaattttaaaggacctgaccgagagctgcgaacagtcagacagacgatgattgacttcctgcagaaccacacggaaggaagccggccccctgcctgcccgcgcctagaccccattcacgtgaagcctctgcgggccttcttttcgtcttatttgaagtcattgccggatgtgaggaaaaaatcgcttcccttgcctgaaaagccacacaaagaagaaaattcagaaatcgtggtttggagagaatttgacaagtcgaagctgtacacggtggacctggagtcagggctacactacctcctgcgggtggagctggcagcccacaagtccctggccggagcagagctgaagacgctcaaggactttgtgactgtcttggccaagctgttccctggacggccgccagtcaagaagctgttggagatgctgcaggagtggctggccagccttcccctggacaggatcccctacaacgccgtgcttgacctggtcaacaacaagatgcggatttctggaatattccttactaatcacataaagtgggttggatgtcaaggaagccgatctgagttgaggggttacccgtgttctctctggaaactgttccacactttgactgttgaagcctcgacccacccagatgcactggttggcacaggctttgaagacgacccccaggctgtgctgcagacaatgaggaggtacgttcacaccttctttgggtgtaaggaatgtggtgagcactttgaggaaatggctaaagaatccatggactcggtgaaaaccccagaccaagccatcctctggctgtggaagaagcataatatggtgaacggccgcctggcaggtgagaagcccctgggcatggggggctcagcacgggcggagggaggccctggtcctgggacagcaaggacggcacggctgccgtggggcttgtccctgagctttgcggcctcgtgccacccactgtgctgacgggatcaggacttgggtggctgagagctgccagagctgcagcctttcccaggctgcttctgtccccggctttctagatgcttctctcactccgggggctcttcgaccccgtggaaatgggtgtggctctttcttcccccatcggtacccactggtagcccgttagactctgaagatgtttttgactctggaaagcttggaacgtaattaatttttgatgaggaattttagtagtatggaaatctgttgtccaaacgtaaaccaaacctctcaaagtgctttgttttgttaaaaaaaaa

SEQ ID NO: 466126 - DNA, 1498 bp, Homo sapiens
tccggttcagcgcctctgcgcaggcgcagtggttcccgcaggcttgcgcgcgcactcgctgcgggacaagcttctggaagctctttgcggtggcgttggtgctgtttgcggatgctgatgcagtttctgcaggactgtaaactggattcctggaacctttgatattcctggctgtgtatagtgcctgttggtggactgtactgatactcaactagagtgtgaagggactggattcctgcccctgagacacaatgcaagctgtagtgcccttgaacaagatgacagccatctcaccagaacctcaaactctggcctcgactgaacaaaatgaggtcccaagagtggttacttctggggaacaagaagctattttaagaggaaatgctgctgatgcagagtctttcagacagaggtttaggtggttttgttactcagaagtagctggacccaggaaagctctgagtcaactctgggagctctgcaatcagtggctgagaccagacattcacacgaaagaacagattttagagcttctggtgtttgagcagttcctgaccattttgcctggggagatcaggatttgggtaaagtcacaacatcctgagagtagtgaggaagtggtgaccctaatagaagatttgacccagatgcttgaagaaaaaggtgagatttatagatggagggaggaagcgggagacattgcctcaaagtccgaaagtaaattcctcaaaagaaggcaatttactgctaaagaggagtctgaggttagaagttgggactgggtttgaatcagccctgccatttactgtgtgattttgggcaagctgtgtaaactctcagaatgtaaatatttttatctgttaaaaagggattttatctttcttgtagttttcttgtaaaggtgagacaagataggatataatatatggtggatgctcaagaaatagtaatttctttcccatccccttcaagaacacaagttatctgtgaaagtgtttggagtcacaggcaaatcaaccagctcaggccctaatgcctagttccattgtgtggactagcacgttgctagagggtggctgtgagtgtctttgctgatggaaatgtttctgcactgttttgcaattcaagtacatgaaaagcagctagtgcaaataaggaactgaattttttaaatcaaatttaaagtttaaatagccacatgcgactagtaactattttatagtgcagttccacagccttagggcaggaaaacctggatatatgtatgtaattacatattataaatacaaatgtataaactataaactgaattacggtgatatcattataaaatattgatgtaaagtcttctagggtgagtagtcctttcagggaatgtggctcgccttttttctcaaatttgtagctatttatgttctcaaatatgatacaaatatttgtattttgcagtgtaatatgctacaaatatttggaatatttgtagtatattatttaccat

SEQ ID NO: 466127 - DNA, 2006 bp, Homo sapiens
cccggggcccaggcacccacccaactgagctgcggcagagggcagcgggctctctgcaaactgtaacaagttggctctgtggccctgtctgtcagaggaggaggctgttcccaggagacgtgggctccacgggagacgcgccggctgcgctcagcggggagaggttgtcgctccagtccctagtggagcattcccagctgccagcacagagaggctgggctcaagtcttctccaaggccagtgccaccctccaccaggtcccactgagcctcatggggctggtggagccacctgcccacctcagcactgcatctccagccagggctgagtggcagtgtgggcaccgcggcccgggacgacagcctgggctcagagtcaggcttgtggcttcgcctctcagcttgcgtctcctcccctgtgggatgggggattccgtggcacccccatgatgaacaggatgccatgggcctcagcccagggcagacctcagtgtccttcctgtggccgctgctggaggtgcgtgaccacaacacagggaggggactcgtccccgccactgtgctgacgcctgggtctccagagaccctcctggaactccgccaggccttcctgggttccagacaggcccgccacgggcatgacgcagcgccatctagcggacagcagggctgcagcgtggacagaacggccggacgcccagtcctgggctggcggctgaggaacagcctcacagggcaagagggcaggcaacacctgcatctttccggcataagaacctcaagaaaagcaaaggaatataagcctgtgttctttggagccaccgaaatctctgttctcatggcagtcgctgaaagtttaagggagccgccaccgccccaatggggttggtttctttcttccctgtttttaaagatcttttaaaatgtctagagagaccctgggatccagtgctggacggatgatgcagggccacacagagaggctattgtgtgtcacttgctgggttaggaacagacggatcagggcttctatgctgcgtctgcctggtcctgggagagagaaactcacacaaccatctgcctggaagacctgggcttctcaggctagagggtctgcacatgtaggccaacctgtcacacccggcttcagctcccacctgcccgaggagaatgctctcaggccgccctgcaggctctgggccggggctctgcctcctcctcccaaagacccagcgagtccagacttcaccctcctccagctgccatccagccccccggcacccctaggcccagctgccccctcccatcccacctgctccaatgcaccctccacacagagagaatgtgtcaccatacatgcttcatggtgccactgtcctgctggaagtcgtcggaggctggcactcttctcaggatgtgctgtcctctgccaaccccaccggtcttgcccccaggtcctggcctcagccccttgggtcctttattccatgtttactgtacccactcccacagtcagacacggcttccgtgttccctgtgcccagaactcctcccccagggggtcagcccatccccaagatctcagccacagtcacttcccccgggtggggctcctgaccctggaatcagtcagatgctccgggactcgcagtttggggagtagggtggtaatgcccgtctcctggtgggctgcccgtgtcaacccaaacgtcaccccttgacaaagacacctgagcccctgcacttggaagtagcagcccccagccagcagacgggactcgtacacatcaccgtgtcttacactcttgcctgtcaccgcgtccccttatcttcccctttagtgtatttacttcccgccacccttccctccgcactagaatgtctgctccatgtaggcaagtagtttgggtcctgcaccagatagacacgcaatacatgtttgttgaatgactaaaggaaagacaatggtctttggagatcctcctttcatggaggccctgggcttgg

SEQ ID NO: 466128 - DNA, 1723 bp, Homo sapiens
ggctggtacaggtccggagatttaaggatctccagccagggctgagtggcagtgtgggcaccgcggcccgggacgacagcctgggctcagagtcaggcttgtggcttcgcctctcagcttgcgtctcctcccctgtgggatgggggattccgtggcacccccatgatgaacaggatgccatgggcctcagcccagggcagacctcagtgtccttcctgtggccgctgctggaggtgcgtgaccacaacacagggaggggactcgtccccgccactgtgctgacgcctgggtctccagagaccctcctggaactccgccaggccttcctgggttccagacaggcccgccacgggcatgacgcagcgccatctagcggacagcagggctgcagcgtggacagaacggccggacgcccagtcctgggctggcggctgaggaacagcctcacagggcaagagggcaggcaacacctgcatctttccggcataagaacctcaagaaaagcaaaggaatataagcctgtgttctttggagccaccgaaatctctgttctcatggcagtcgctgaaagtttaagggagccgccaccgccccaatggggttggtttctttcttccctgtttttaaagatcttttaaaatgtctagagagaccctgggatccagtgctggacggatgatgcagggccacacagagaggctattgtgtgtcacttgctgggttaggaacagacggatcagggcttctatgctgcgtctgcctggtcctgggagagagaaactcacacaaccatctgcctggaagacctgggcttctcaggctagagggtctgcacatgtaggccaacctgtcacacccggcttcagctcccacctgcccgaggagaatgctctcaggccgccctgcaggctctgggccggggctctgcctcctcctcccaaagacccagcgagtccagacttcaccctcctccagctgccatccagccccccggcacccctaggcccagctgccccctcccatcccacctgctccaatgcaccctccacacagagagaatgtgtcaccatacatgcttcatggtgccactgtcctgctggaagtcgtcggaggctggcactcttctcaggatgtgctgtcctctgccaaccccaccggtcttgcccccaggtcctggcctcagccccttgggtcctttattccatgtttactgtacccactcccacagtcagacacggcttccgtgttccctgtgcccagaactcctcccccagggggtcagcccatccccaagatctcagccacagtcacttcccccgggtggggctcctgaccctggaatcagtcagatgctccgggactcgcagtttggggagtagggtggtaatgcccgtctcctggtgggctgcccgtgtcaacccaaacgtcaccccttgacaaagacacctgagcccctgcacttggaagtagcagcccccagccagcagacgggactcgtacacatcaccgtgtcttacactcttgcctgtcaccgcgtccccttatcttcccctttagtgtatttacttcccgccacccttccctccgcactagaatgtctgctccatgtaggcaagtagtttgggtcctgcaccagatagacacgcaatacatgtttgttgaatgactaaaggaaagacaatggtctttggagatcctcctttcatggaggccctgggcttgg

SEQ ID NO: 466129 - DNA, 1464 bp, Homo sapiens
gccgctgctctagggaggacaggcccagcggagcagctgatggactaaaaactggccatctttgatcagagggatcgtggatttttgcaactttcctggccagacttcgtcaaggccctgccggcctgctggacactgattgatcaaagattgatcaaacagctcctcccctcactgagggcagatgcttgcttcaaggatcaaacagcccggctctgccaggcaccgcccagcagcagaaggttgtgcttcaagtctgcacagccctccaactttggatgtttcttagaccaccggggatgcaagtcttctagtcctttctattcagaccagcactgacggtgaaggagctgaggccagggttggccatgtggaggcgtagggagatggaacatcggggacgcactgcttctctcctgctcacgtagaacttgaggacagaggctctgtctggcatctgaagacccagcaaagcccagctctgccagcagcttgccaggacctgagaaagcccctctctccccgggcctcagtttccccagatgtacgtggagggattggcctaaatgagctcagcggatctcatggccccgatcctggcaggttggtgactggctgccctgtccccagccctgtgggggttcaaggtgtgagccttgtggtgggggtacacagggtcccccaaattcatgtatatccagagcctcagaatgagaccttatttggaaacagagtatttgcggatacaattaggtaaggacctctagctagaagcatcctggatttcgggtgggccccaaatccaatgactgctggagaggacgccagagccacagggagaagcggccacgtggagacggaggcagaggctggagtgaagtggccaaaagccagggcgcgcctgggccaccagaagccggacgagtacaggaagcagccacggaacatggatctgagccccgagagattcctggatgtgggagacccaccctctgtccttggtggttgctgctgccaagcttcggaaacgatcctggaattcagctccgtcagggctttgcctggatgggccatggtctactctggctgtcacctggacacggcgctgtcacctggacatgacgctgtcccgaaggcgcagaggcgacagcgcccgcaccccacgctcgagcttcagagacgctttgctcacttcacactgccagaggcgcaagagcccggggcgaagacccgctgagctgtaagagaataaatttgttctttttaaagccattcagtttgtggagatttgttacagtggcaatgggagacgaatgcactcatctttgtgcacctggccggctgctgctatagactagagtcctagacatgaatttgccccactgaagggtgtgctcactgtccatttctattgacaccgtgaagttgtccaataaatacgctttgcacgttgacacttccatc

SEQ ID NO: 466130 - DNA, 758 bp, Homo sapiens
gtgaattgtctgtgtgtgtcccttggccgtttctgaatcatttattatgtttaaaccagatcacatcttgggagaggcctcctggctgagggccagatgctggttacttggacacagtggatataatggcttgggtccccagatctccctgcagagttcacccatcccctcttcagctggccttggagggatgatcctctcctagcagcactgtgctcaccatgttttttccaggaatgtaccagaaggaatggccaggttttcataaccaacttggccaccttcaccgagaagttcctactgcagttggatgaggtggtcaccattgacgatgtccaggttgcaaggatggagccccccaaacagaaattatcaatgctcatacgaaggaaactcgctgggctctccctgaaggaagagagtgagaaacccctgattgaacgtggaagcaggaagtggccagggatcaaacccaccgaagtcaccatccaaaacaagattcttctccagccaacatcatcgatttccaccaccaaaaccaccctgggccacctggcggccgtggaagcccgagatgctgtgtacctgaaatatttagcatcatttgaggaggagctaaagaggatccaggatgactgtacatctcagataaaggaggctcagcgctggaaggacagctggaagcagtccctgcacactatccaaggcctgtatgtgtgaccctccgccccaccatgaataaacactttcttatacag

SEQ ID NO: 466131 - DNA, 355 bp, Homo sapiens
ctaattagcgtgacctgaatcagagtcccttcggatttgcgccatgcgcggcggggagaaccggcctcctgctcgagttcagagctcatctgaggaattggaattgagacaccaaagcctagacgcgtttcctggacgacggcttcccggcaggggcatccagccagcggccaagatgtcgtcagtggggaaggtgacccaggttccgaatgggaaagcctaccagcagatcttccaggctgaggtaggagccgccctctgtcccgcttttctccatcccccttcccttgctttcttccaaacttccctccctcccagggcttccctactggaaattgaataaaacaagggcttt

SEQ ID NO: 466132 - DNA, 9905 bp, Homo sapiens
  misc_feature (84)..(84): n is a, c, g, or t
  misc_feature (216)..(218): n is a, c, g, or t
  misc_feature (220)..(220): n is a, c, g, or t
  misc_feature (226)..(229): n is a, c, g, or t
  misc_feature (239)..(239): n is a, c, g, or t
  misc_feature (243)..(243): n is a, c, g, or t
cagctctggcagaagcaacggtggcttcgagggatggcggcggctgcaacaggacctgcagcatcccagaggaactgactaagnctttggaacagaaaccagatgatgcacaatattatcgtcaaagagcttattgtcacattcttcttgggaattactgtggtgcagatgctaatttcagtgactggattaaaaggtgtcgaagctcagaatggnnngnaatctnnnntgtttgtggngaantatgagaccctcgtgttttactggccctcgctgctgtgccttgccttcctgctgggccgcttcctgcatatgtttgtcaaggctctgagggtgcacctcggctgggagctccaggtggaagaaaaatctgtcctggaagtgcaccagggagagcacgtcaagcagctcctgaggataccccgccctcaagagaaaaaaaagtcttggttccaaaccaggatatatgagtgggatccctgctttcaatttccaagcagaatgattggaaccattgtgttggcattcatctgcctgtatcttttcattgtcatcgagttctgcgtgtttgtgtacgtgagagatgagttggatgtgcttgaaaacaacctggaaagctacatcaccttcacgaaccattcaggggtcctgaccccagtcatcctgcaggtgaaagagctgatcagtgtcaccaaaggagtctgggtggcgaccattttgcccgcgtatctcacgtgtgtgagctatctgttccacattttggtctgttacagaaagcacatgaagaggctatgggcaggagataaacattttcttcctttgaagttccataacccggcctcgtcggagagcatggtggccattgcaaggtactctggctggcaaatagcctatattctgtggggctacctcatcattcacatggtacagagcctatgtggcatggcaatcatgtacagcctggtgctacccatcgtccaaaccagggcctggaaatgctgcaagggctgggcattgggatgtaagtgctgggcgggtatcctgtcattgacatgttctgagagctggggtccccccaactgctatgtggacccatggtcttggccctgacccagagatgggccatgatagtaactcatggtggggggaaacagcgttcacaaaaggctgcctctcacaccattccacaatgccctcacaaccatgtatggggtgggggatacatatgtccattttccagctgggaaaattgaggtttaggaaagtaaaatgagaggcaagacagtatgatggaaggaagcagggaatcctggcaaagcttttggatctgctgtgtgacctgggcctcagttttctcctctgcacaatgggcgtgggaatgccttgtaagtgtaaagcatggaactcacattaccattgtcctgccgggtggtcaacctgtctcccctctctcactgggcatcagagaaggatctggcagaagggaaaaggctgcctcaggatggccccaccctgtgtttcagccttacaatatccatcgttgtgggtctcatgatcctgcagatgtgtatcgctgccagcttcttcctacagccaaagctgggcacggctgacaagcagaagcccctggctctcaacaacaggaaagcgttccacaacttcaactactttctgttcttctacaacgtgctgctgggcctgggtgcctgcctttccaggctgctcatcagttgcctcctcggcatgtggctgattgcccgcatcgacaggaccatcatgcagagtggctatgagggagcagacatggggttcagtgcatggattgggatgctctacatggaccattatcacatcaaccctgtgcttgtcagcttttgccacatcctgatcacaaatcacagggagaagaagctgcagcagagcaccaaatactggtgcctaaatcaatcggcagagtcccttcggatttgcgccatgcgcggcggggagaaccggcctcctgctcgagttcagagctcatctgagtcgacgttccccagccgcctaccccccagcagagagtccttccccggggagtcctgccctggggtgccgcctcgaggccagacgtcgtcccgcctggacctgaacctgagtttgggacgggcgatttcccaacctcaggaattggaattgagacaccaaagcctagacgcgtttcctggacgacggcttcccggcaggggcatccagccagcggccaagatgtcgtcagtggggaaggtgacccaggttccgaatgggaaagcctaccagcagatcttccaggctgaggtgcagctggtccactccctggcggccaccaggaagcgggctgcagagcgttctgtgaccctgaagagtggcaggatacccatgatgaagaaggtggagactcctgaaggggaggtgatgtctccccgacagcagaagtggatgcacagcctccccaacgactggatcatggaaaaccctgttctccacagggaaaaggaaagagccaagagggaaaaagcccgagagagtgagaacaccatcgctgcccgagaaagagtcaccagcccccaccccaacccacccccggttaacccacgtggcatccggctttccacctggataaaggggacagcagagcatatggcaggagcacagacctggaagcaagtggcccagatccctgctcagctgctggccaacttggttctacaaccccccatgactgagtttcctcacatgcaagcagaacacaagaggaagagctacgagagcgctctggccagctttcaggaggagattgcgcaggtgggaaaggaaatggaacctctcatcgtggacacagggggactttttttgaagaagctgactgagtctgatgaagaaatgaaccgtctcttcctaaaggtggaaaatgacaccaaccttgaggactacaccatccaagccctgctggagctgtgggataaggtggccgggcggttactgctccggaagcaggagattaaggagctggatgaggccctgcactcgctggagttctcccgaaccgataaactaaaaagcgtgttgaagaaatatgcagaagtcatagagaaaacttcctacctcatgcggcccgaagtgtacaggctgataaatgaagaagccatggtcatgaactatgccctgctgggcaaccggaaggctctcgcccagctgtttgtcaacctgatggagtccaccctgcagcaggagctggacagccgccaccgctggcaaggcttggtggacacctggaaggctctcaagaaggaggccctgctgcagagtttcagtgagttcatggccagtgagagtatccatactcccccggctgtgacgaaggagctagaggtcatgctgaagacccagaacgtcctgcagcaaaggcggctgaagcatctctgcaccatctgtgacctcctgccccccagttacagcaaaactcagctgactgagtggcattcttccctcaactccctgaacaaggagctagacacctaccacgtggactgcatgatgcggatccgcctgctgtatgagaagacatggcaggagtgcctgatgcatgtgcagaattgtaagaagcagctgctggactggaaagccttcactgaggaggaggcagagaccctggtgaaccagttcttcttccagatggtgggagcactccagggcaaagtggaggaggacctggagctcttggacgaggtggtacaactgtgggaggcacaccagagcgagctgttggtgcaggagctggagctggagaagaggatggagcagcaccggcagaagcacagcctggagagccaggtgcaggaggcccacctcgataggctcttggaccaactgaggcagcaaagtgacaaagaaacactggcgtttcacctggaaaaggtcaaagattatctgaagaacatgaaatccaggtatgaatgttttcacaccctcctgacaaaggaagtgatggagtacccagcgatcatgctgaaagaactcaactcctacagctctgccctcagccaatacttctttgtgcgtgaaatctttgaacagtgaaaaaactgaggaagaagcaagggtctaaagaggacatgaccagaagtgaggaaagcataagtagtgggacaagtactgccaggtcagtagaagaggtggaagaagaaaacgatcaagaaatggagtccttcataactgaagaggtgctggggcagcagaaaaaatctccactgcatgctaagatggatgagtccaaagaaggctctattcagggactggaagaaatgcaggttgaaagagagggctccttaaacccatccctgaatgaggagaatgtgaagggtcaaggagaaaagaaggaggagtcagaggaggaagatgagaaggaggaagaggaggaggaggagaagctgaggaagagaaggaggagaaggaggcacaggaagagcaagagagtttatctgtgggtgaggaagaagacaaggaagagggtctagaggagatatactatgaggacatggagtccttcacaatctccagtggaaacacttattttgtctttgtacccctggaagaagagcattgtaggaagtcccattccaccttctcagccatgttcatcaacgacacttccagtgccaaacttcgagctggcttcttcgagcaccttgagaagtggtttgaccagtgttccctcaacacccgggtcaccgtggccaccaaaatcaatgagctggattcagaactggagctgcatctgcacctgcaccagccaagagcccagcagattgaaaaagacatccacaacgtcagggcagccgagcttttgcttcatcaagagcagttggacagccactgtgctggggtgaccgagacgctgaagaagaagcggctgatgttctgccagttccaagaagagcaaaacgtgaggagcaaaaacttccgccttaagatctatgacatggagcacatcttcttgaatgccaccaggagccaaaagctggtcactctcagcaacacactgcaccaggagttgcttagctatgttgatgtcacccaggtgtccctgcgcagcttccggcagtacttggaggagagtctgggcaaactccgctactcaaatattgagttcatcaaacactgcagattgttttcagagggaggcaacttttctcctaaagaaatcaattcactgtgttcccgactggagaaggaagctgcccggatagagttggttgaaagtgtcatcatgctcaacatggagaagttggagaatgagtacctggaccaggccaatgatgtcatcaacaagtttgaaagcaaattccataacctgtctgtggaccttattttcatagagaaaatccagcggttgctgacgaatctgcaagtgaaaatcaagtgccaggcccttctctctggcctgcagaacaccatcctgaaggaccaggaggaagacagtgacatcctgacatcttcagaagcccttgaagaggaggccaagctggacgtggtcacccctgagtccttcacccagctgagccgcgtggggaagcccctgattgaggacccagctgtggatgtgatcaggaagctcctgcaaggtagaggcgcatgggcctgtgggtctcggggcagcagtgaggcaggggctggtggtgctgtgtgctcacctcctgtcctctgctcctgtcctgggccctcgtcacccaaaggcttcaagcgacatcggtgccagccagaaaactctgggaagaaggctgtacccagtgccagtgctacctctgcaggcagaaacccaggcagggatcctgcaggctcagacctgccttgcgtctgtccacagcctccagaccacccacccacctttgtcccacagcttcacaccgcaccccaagcccaacaaaatggagagaaagtaccgggtgcttggggacaagcctccccctgctgccgaacagcggccccctctcatcagccctctcaccctggagacctcgtctctgggggtcatgaacttggcagagaaggatggctgtgacatcaggcaacccaggtgtggcctccagctggcagctaatcgaggcactgcccggtacaggcactgccatggggctggggattccatggtgaacaagtacagacaggtccatgtcctggattttaaggggatcatcttgaccctcctctgggagagcagtgagaacctgctgacagtcgcagaggcacccaggcccagtggaaagctgacagacctggcgggggcacagaaagaggtggggcagtgggaccaggcaccagacaagctgcccagtgccctgttcccacatgccctgcaccgtagaaataacgagggctggccatggctccactcactccaggtgggcccagggaggcgacacgggcagacagggaaggaggagtgtctgctcgtgtcacttccacaggggatgccacgagcaaaggctagggagtgtggaggtgagggcaggctggtggatcccaggagcaagggccagagtcccatggagtcctcacccgcacatggtcaccctctctggcaggagttctaccgtaaagaaaaacgcccagtcaccaggcctgactgcatgtgtgacacctttgaccagtgcgccgagaacattagcaaaaagatcctggagtatcagagccaggcaaataagtaccacaactcctgcctcatagaattacggatccagatcaggagatttgaggagctgctgccccaagtgtgttggctggtgatggagaatttcaaggaacaccactggaaaaagtttttcacctctgtgaaggagatccgaggacagttcgaggaacagcagaagcggctggagaaaagaaaggaatgtaccagaaggaatggccaggttttcataaccaacttggccaccttcaccgagaagttcctactgcagttggatgaggtggtcaccattgacgatgtccaggttgcaagtaagaggcaccaccagccttgtgtcatggccctggggggctggtgaaccttggctgggctggccagtcaacactcctcctcttcagcattttcagttgctgcacaccataatgtaataagcattgtaacttactaattagtccctttgctattgaactttggaccatttccaatttcccactcctgtaattgtgctgaagagaatctctgcatccatgcatctctagagcaacagactcctagaagtgcgatgtctggatcaaagtgtgtacagatttttgaagtgttggtcacttttctctatcagaggtctctgtcaaaggtgagccttgtttgggaaatcagcgccttgcagagatgctggggtcgagaccccagggagaacaggcaggtgagctggtagtggagcagatcacagtgccttgcaaggaacccctgagccaggaagactccctgcaccaggccctaggaggcctctgcctactctgcaactcggcttctgagccaggccaccgggccctgccattcatggcagaggagtgtacatgttacctgctggctctctgcacacagagccccccaccccctcgcccctgatctagaaagaacatcagagcatcaaagattggattattgagctagatagtcaagggacaaccttgaacgtgtttgttccaggggaggttcttagttcggaacccatatgagctagcctaagccaaagaagtctctatgaaccatatccggggactcatggaaactgcagcaacgtcagagcatcaggcttgggtttggagctgggaacagcacccacaccaccgcttagattcctccatccatgaccccctgcccctgtcaccaccccgagctgtgtggctggtgcattcagcttctccatggagagggctcagcctgccataactccaagtgggaggaggggtgccagtcctcccttttctaagtgtaatgccaggggaaatccctcgatctcaggctgtcggtgaggctgcagtcactagcctgtcttttgcctctagggatggagccccccaaacagaaattatcaatgctcatacgaaggaaactcgctgggctctccctgaaggaagagagtgagaaacccctgattgaacgtggaagcaggaagtggccagggatcaaacccaccgaagtcaccatccaaaacaagattcttctccagccaacatcatcgatttccaccaccaaaaccaccctgggccacctggcggccgtggaagcccgagatgctgtgtacctgaaatatttagcatcatttgaggaggagctaaagaggatccaggatgactgtacatctcagataaaggaggctcagcgctggaaggacagctggaagcagtccctgcacactatccaaggcctgtatgtgtgaccctccgccccaccatgaataaacactttcttatacagactccttccctgtccatctacctgcctacctactttccgtccatccctccctcccttcatccctccacccctgctctgtgccgggcactgtagctttaccagcgaacaggacacagcatggtccctgcccacgtggagccctcttcccatgaggaaggcaagcatgaaaggggaattccacgtggttagcagggagggtgagtaccaggaatcagtcacttcaaataggcaccagagcttcaaaggacatcacctccaaacagcatgctgggcagggcacgtcatcttgaaaaatgaaataaaggtcatgggaaaatgatattttaatttaacagaataaacaagtatgggttataattgcaactctgcactggttcctagacccaacaaataactaatccaatgttgattggtatttgtgccacaatttgtctgagcaaattgcaatattttggaaaaaaaaaaatcttccaggctcctttagtcctgtgttgcccagatcattctcttggagtcctccagcctgccagtctcttgttcgtcaactctcttcttcaattacatggcgtgagcgtacagccttcatttgtcggtagctgtgtgtgtcatctggacaggtttcctcagccatagacctaggaggccccagctcccaaatttccagcccctgaaagctgtgtgaccctccaagtgcagttccctcacctggggacactcactctgctctcctggtttgctccacccagtgaggccctgcttggttagcttggttagcttggtggcctttgtgcactgaagccaggagagtgaggagtccccttccatcaaggcaaaagcaatctcctgttcttttctgtgctccccccacccccaccccaatagagttgtttaacactctattgtaaaaaggcaacagtcccaagggtctctgtctgcacctcttttagtctaggtttgaataaagagcagagagtctggttaatgtataacatctcaatgcaaaggtcagaaagtaaaggtcatgcaccaaagaagaaaaacagtcatattatgtgagtcagcttccaggacttttccctttggcataataaatttggaagatcctgaaacttaattttctttttataagaggctcctagaaactggactaagacttcaagaagttatgcagaacacaccagaaaatcgcaccaagaatcaggaagatctcaacttggatgagaacagacaatcagtatgtgtgaataccaagatgccagatgttggaattatctgacagtggtttgaaatagccataataataatgttttaataagcaattataaacacacttgaaacaaatgaaaaattagaaaatcgtaacaaaaaaatagaagaaagaaatccaagtggaagcttcaactgaaaaatataataaccaaaatttaaaaactcaatgtgt

SEQ ID NO: 466133 - DNA, 2821 bp, Homo sapiens
cttgatgatcctgctaaattctgaacttcccaacacaaaatggccaacccaccattgtgacaaagatccgtcccagacaggtagaggcgcatgggcctgtgggtctcggggcagcagtgaggcaggggctggtggtgctgtgtgctcacctcctgtcctctgctcctgtcctgggccctcgtcacccaaaggcttcaagcgacatcggtgccagccagaaaactctgggaagaaggctgtacccagtgccagtgctacctctgcaggcagcttcacaccgcaccccaagcccaacaaaatggagagaaagtaccgggtgcttggggacaagcctccccctgctgccgaggattttaaggggatcatcttgaccctcctctgggagagcagtgagaacctgctgacagtcgcagaggagttctaccgtaaagaaaaacgcccagtcaccaggcctgactgcatgtgtgacacctttgaccagtgcgccgagaacattagcaaaaagatcctggagtatcagagccaggcaaataagtaccacaactcctgcctcatagaattacggatccagatcaggagatttgaggagctgctgccccaagtgtgttggctggtgatggagaatttcaaggaacaccactggaaaaagtttttcacctctgtgaaggagatccgaggacagttcgaggaacagcagaagcggctggagaaaagaaaggacaaaaatgcccagaagctccatctaaatcttggacaccccgtacatttccaagaaatggagtctctacacttaagtgaagaggaaaggcaggaagagctggacagcatgattaggatgaacaaggagaagctggaggaatgtaccagaaggaatggccaggttttcataaccaacttggccaccttcaccgagaagttcctactgcagttggatgaggtggtcaccattgacgatgtccaggttgcaaggatggagccccccaaacagaaattatcaatgctcatacgaaggaaactcgctgggctctccctgaaggaagagagtgagaaacccctgattgaacgtggaagcaggaagtggccagggatcaaacccaccgaagtcaccatccaaaacaagattcttctccagccaacatcatcgatttccaccaccaaaaccaccctgggccacctggcggccgtggaagcccgagatgctgtgtacctgaaatatttagcatcatttgaggaggagctaaagaggatccaggatgactgtacatctcagataaaggaggctcagcgctggaaggacagctggaagcagtccctgcacactatccaaggcctgtatgtgtgaccctccgccccaccatgaataaacactttcttatacagactccttccctgtccatctacctgcctacctactttccgtccatccctccctcccttcatccctccacccctgctctgtgccgggcactgtagctttaccagcgaacaggacacagcatggtccctgcccacgtggagccctcttcccatgaggaaggcaagcatgaaaggggaattccacgtggttagcagggagggtgagtaccaggaatcagtcacttcaaataggcaccagagcttcaaaggacatcacctccaaacagcatgctgggcagggcacgtcatcttgaaaaatgaaataaaggtcatgggaaaatgatattttaatttaacagaataaacaagtatgggttataattgcaactctgcactggttcctagacccaacaaataactaatccaatgttgattggtatttgtgccacaatttgtctgagcaaattgcaatattttggaaaaaaaaaaatcttccaggctcctttagtcctgtgttgcccagatcattctcttggagtcctccagcctgccagtctcttgttcgtcaactctcttcttcaattacatggcgtgagcgtacagccttcatttgtcggtagctgtgtgtgtcatctggacaggtttcctcagccatagacctaggaggccccagctcccaaatttccagcccctgaaagctgtgtgaccctccaagtgcagttccctcacctggggacactcactctgctctcctggtttgctccacccagtgaggccctgcttggttagcttggttagcttggtggcctttgtgcactgaagccaggagagtgaggagtccccttccatcaaggcaaaagcaatctcctgttcttttctgtgctccccccacccccaccccaatagagttgtttaacactctattgtaaaaaggcaacagtcccaagggtctctgtctgcacctcttttagtctaggtttgaataaagagcagagagtctggttaatgtataacatctcaatgcaaaggtcagaaagtaaaggtcatgcaccaaagaagaaaaacagtcatattatgtgagtcagcttccaggacttttccctttggcataataaatttggaagatcctgaaacttaattttctttttataagaggctcctagaaactggactaagacttcaagaagttatgcagaacacaccagaaaatcgcaccaagaatcaggaagatctcaacttggatgagaacagacaatcagtatgtgtgaataccaagatgccagatgttggaattatctgacagtggtttgaaatagccataataataatgttttaataagcaattataaacacacttgaaacaaatgaaaaattagaaaatcgtaacaaaaaaatagaagaaagaaatccaagtggaagcttcaactgaaaaatataataaccaaaatttaaaaactcaatgtgt

SEQ ID NO: 466134 - DNA, 1956 bp, Homo sapiens
gcggccgctccaacatcagaatggtaacgcctggtgagagagcaagaccgtgactcaaaaataacgaaaattggatgcataaatgagggtgccagatgtgcagggatggagccccccaaacagaaattatcaatgctcatacgaaggaaactcgctgggctctccctgaaggaagagagtgagaaacccctgattgaacgtggaagcaggaagtggccagggatcaaacccaccgaagtcaccatccaaaacaagattcttctccagccaacatcatcgatttccaccaccaaaaccaccctgggccacctggcggccgtggaagcccgagatgctgtgtacctgaaatatttagcatcatttgaggaggagctaaagaggatccaggatgactgtacatctcagataaaggaggctcagcgctggaaggacagctggaagcagtccctgcacactatccaaggcctgtatgtgtgaccctccgccccaccatgaataaacactttcttatacagactccttccctgtccatctacctgcctacctactttccgtccatccctccctcccttcatccctccacccctgctctgtgccgggcactgtagctttaccagcgaacaggacacagcatggtccctgcccacgtggagccctcttcccatgaggaaggcaagcatgaaaggggaattccacgtggttagcagggagggtgagtaccaggaatcagtcacttcaaataggcaccagagcttcaaaggacatcacctccaaacagcatgctgggcagggcacgtcatcttgaaaaatgaaataaaggtcatgggaaaatgatattttaatttaacagaataaacaagtatgggttataattgcaactctgcactggttcctagacccaacaaataactaatccaatgttgattggtatttgtgccacaatttgtctgagcaaattgcaatattttggaaaaaaaaaaatcttccaggctcctttagtcctgtgttgcccagatcattctcttggagtcctccagcctgccagtctcttgttcgtcaactctcttcttcaattacatggcgtgagcgtacagccttcatttgtcggtagctgtgtgtgtcatctggacaggtttcctcagccatagacctaggaggccccagctcccaaatttccagcccctgaaagctgtgtgaccctccaagtgcagttccctcacctggggacactcactctgctctcctggtttgctccacccagtgaggccctgcttggttagcttggttagcttggtggcctttgtgcactgaagccaggagagtgaggagtccccttccatcaaggcaaaagcaatctcctgttcttttctgtgctccccccacccccaccccaatagagttgtttaacactctattgtaaaaaggcaacagtcccaagggtctctgtctgcacctcttttagtctaggtttgaataaagagcagagagtctggttaatgtataacatctcaatgcaaaggtcagaaagtaaaggtcatgcaccaaagaagaaaaacagtcatattatgtgagtcagcttccaggacttttccctttggcataataaatttggaagatcctgaaacttaattttctttttataagaggctcctagaaactggactaagacttcaagaagttatgcagaacacaccagaaaatcgcaccaagaatcaggaagatctcaacttggatgagaacagacaatcagtatgtgtgaataccaagatgccagatgttggaattatctgacagtggtttgaaatagccataataataatgttttaataagcaattataaacacacttgaaacaaatgaaaaattagaaaatcgtaacaaaaaaatagaagaaagaaatccaagtggaagcttcaactgaaaaatataataaccaaaatttaaaaactcaatgtgt

SEQ ID NO: 466135 - DNA, 4358 bp, Homo sapiens
  misc_feature (84)..(84): n is a, c, g, or t
  misc_feature (216)..(218): n is a, c, g, or t
  misc_feature (220)..(220): n is a, c, g, or t
  misc_feature (226)..(229): n is a, c, g, or t
  misc_feature (239)..(239): n is a, c, g, or t
  misc_feature (243)..(243): n is a, c, g, or t
cagctctggcagaagcaacggtggcttcgagggatggcggcggctgcaacaggacctgcagcatcccagaggaactgactaagnctttggaacagaaaccagatgatgcacaatattatcgtcaaagagcttattgtcacattcttcttgggaattactgtggtgcagatgctaatttcagtgactggattaaaaggtgtcgaagctcagaatggnnngnaatctnnnntgtttgtggngaantatgagaccctcgtgttttactggccctcgctgctgtgccttgccttcctgctgggccgcttcctgcatatgtttgtcaaggctctgagggtgcacctcggctgggagctccaggtggaagaaaaatctgtcctggaagtgcaccagggagagcacgtcaagcagctcctgaggataccccgccctcaagagaaaaaaaagtcttggttccaaaccaggatatatgagtgggatccctgctttcaatttccaagcagaatgattggaaccattgtgttggcattcatctgcctgtatcttttcattgtcatcgagttctgcgtgtttgtgtacgtgagagatgagttggatgtgcttgaaaacaacctggaaagctacatcaccttcacgaaccattcaggggtcctgaccccagtcatcctgcaggtgaaagagctgatcagtgtcaccaaaggagtctgggtggcgaccattttgcccgcgtatctcacgtgtgtgagctatctgttccacattttggtctgttacagaaagcacatgaagaggctatgggcaggagataaacattttcttcctttgaagttccataacccggcctcgtcggagagcatggtggccattgcaaggtactctggctggcaaatagcctatattctgtggggctacctcatcattcacatggtacagagcctatgtggcatggcaatcatgtacagcctggtgctacccatcgtccaaaccagggcctggaaatgctgcaagggctgggcattgggatgtaagtgctgggcgggtatcctgtcattgacatgttctgagagctggggtccccccaactgctatgtggacccatggtcttggccctgacccagagatgggccatgatagtaactcatggtggggggaaacagcgttcacaaaaggctgcctctcacaccattccacaatgccctcacaaccatgtatggggtgggggatacatatgtccattttccagctgggaaaattgaggtttaggaaagtaaaatgagaggcaagacagtatgatggaaggaagcagggaatcctggcaaagcttttggatctgctgtgtgacctgggcctcagttttctcctctgcacaatgggcgtgggaatgccttgtaagtgtaaagcatggaactcacattaccattgtcctgccgggtggtcaacctgtctcccctctctcactgggcatcagagaaggatctggcagaagggaaaaggctgcctcaggatggccccaccctgtgtttcagccttacaatatccatcgttgtgggtctcatgatcctgcagatgtgtatcgctgccagcttcttcctacagccaaagctgggcacggctgacaagcagaagcccctggctctcaacaacaggaaagcgttccacaacttcaactactttctgttcttctacaacgtgctgctgggcctgggtgcctgcctttccaggctgctcatcagttgcctcctcggcatgtggctgattgcccgcatcgacaggaccatcatgcagagtggctatgagggagcagacatggggttcagtgcatggattgggatgctctacatggaccattatcacatcaaccctgtgcttgtcagcttttgccacatcctgatcacaaatcacagggagaagaagctgcagcagagcaccaaatactggtgcctaaatcaatcggcagagtcccttcggatttgcgccatgcgcggcggggagaaccggcctcctgctcgagttcagagctcatctgagtcgacgttccccagccgcctaccccccagcagagagtccttccccggggagtcctgccctggggtgccgcctcgaggccagacgtcgtcccgcctggacctgaacctgagtttgggacgggcgatttcccaacctcaggaattggaattgagacaccaaagcctagacgcgtttcctggacgacggcttcccggcaggggcatccagccagcggccaagatgtcgtcagtggggaaggtgacccaggttccgaatgggaaagcctaccagcagatcttccaggctgaggtgcagctggtccactccctggcggccaccaggaagcgggctgcagagcgttctgtgaccctgaagagtggcaggatacccatgatgaagaaggtggagactcctgaaggggaggtgatgtctccccgacagcagaagtggatgcacagcctccccaacgactggatcatggaaaaccctgttctccacagggaaaaggaaagagccaagagggaaaaagcccgagagagtgagaacaccatcgctgcccgagaagtgcggggtctcatggatactatagttcctgagaagataagcaccagcacctttcaaaggcaagcagaacacaagaggaagagctacgagagcgctctggccagctttcaggaggagattgcgcaggtgggaaaggaaatggaacctctcatcgtggacacagggggactttttttgaagaagctgactgagtctgatgaagaaatgaaccgtctcttcctaaaggtggaaaatgacaccaaccttgaggactacaccatccaagccctgctggagctgtgggataaggtggccgggcggttactgctccggaagcaggagattaaggagctggatgaggccctgcactcgctggagttctcccgaaccgataaactaaaaagcgtgttgaagaaatatgcagaagtcatagagaaaacttcctacctcatgcggcccgaagtgtacaggctgataaatgaagaagccatggtcatgaactatgccctgctgggcaaccggaaggctctcgcccagctgtttgtcaacctgatggagtccaccctgcagcaggagctggacagccgccaccgctggcaaggcttggtggacacctggaaggctctcaagaaggaggccctgctgcagagtttcagtgagttcatggccagtgagagtatccatactcccccggctgtgacgaaggagctagaggtcatgctgaagacccagaacgtcctgcagcaaaggcggctgaagcatctctgcaccatctgtgacctcctgccccccagttacagcaaaactcagctgactgagtggcattcttccctcaactccctgaacaaggagctagacacctaccacgtggactgcatgatgcggatccgcctgctgtatgagaagacatggcaggagtgcctgatgcatgtgcagaattgtaagaagcagctgctggactggaaagccttcactgaggaggaggcagagaccctggtgaaccagttcttcttccagatggtgggagcactccagggcaaagtggaggaggacctggagctcttggacgaggtggtacaactgtgggaggcacaccagagcgagctgttggtgcaggagctggagctggagaagaggatggagcagcaccggcagaagcacagcctggagagccaggtgcaggaggcccacctcgataggctcttggaccaactgaggcagcaaagtgacaaagaaacactggcgtttcacctggaaaaggtcaaagattatctgaagaacatgaaatccaggtatgaatgttttcacaccctcctgacaaaggaagtgatggagtacccagcgatcatgctgaaagaactcaactcctacagctctgccctcagccaatacttctttgtgcgtgaaatctttgaacagaacttggctggagaagtcattttcaaattcaggcaaccagaagcacatgaaaaaccctcccagaagagagtgaaaaaactgaggaagagaaggaggagaaggaggcacaggaagagcaagagagtttatctgtgggtgaggaagaagacaaggaagagggtctagaggagatatactatgaggacatggagtccttcacaatctccagtggaaacacttattttgtctttgtacccctggaagaagagcattgtaggaagtcccattccaccttctcagccatgttcatcaacgacacttccagtgccaagttcatagaacaagtgacaattccatcgagactaattttagaaattaagaaacagtgagtaaaaaactattttattctcaac

SEQ ID NO: 466136 - DNA, 5267 bp, Homo sapiens
  misc_feature (84)..(84): n is a, c, g, or t
  misc_feature (216)..(218): n is a, c, g, or t
  misc_feature (220)..(220): n is a, c, g, or t
  misc_feature (226)..(229): n is a, c, g, or t
  misc_feature (239)..(239): n is a, c, g, or t
  misc_feature (243)..(243): n is a, c, g, or t
cagctctggcagaagcaacggtggcttcgagggatggcggcggctgcaacaggacctgcagcatcccagaggaactgactaagnctttggaacagaaaccagatgatgcacaatattatcgtcaaagagcttattgtcacattcttcttgggaattactgtggtgcagatgctaatttcagtgactggattaaaaggtgtcgaagctcagaatggnnngnaatctnnnntgtttgtggngaantatgagaccctcgtgttttactggccctcgctgctgtgccttgccttcctgctgggccgcttcctgcatatgtttgtcaaggctctgagggtgcacctcggctgggagctccaggtggaagaaaaatctgtcctggaagtgcaccagggagagcacgtcaagcagctcctgaggataccccgccctcaagagaaaaaaaagtcttggttccaaaccaggatatatgagtgggatccctgctttcaatttccaagcagaatgattggaaccattgtgttggcattcatctgcctgtatcttttcattgtcatcgagttctgcgtgtttgtgtacgtgagagatgagttggatgtgcttgaaaacaacctggaaagctacatcaccttcacgaaccattcaggggtcctgaccccagtcatcctgcaggtgaaagagctgatcagtgtcaccaaaggagtctgggtggcgaccattttgcccgcgtatctcacgtgtgtgagctatctgttccacattttggtctgttacagaaagcacatgaagaggctatgggcaggagataaacattttcttcctttgaagttccataacccggcctcgtcggagagcatggtggccattgcaaggtactctggctggcaaatagcctatattctgtggggctacctcatcattcacatggtacagagcctatgtggcatggcaatcatgtacagcctggtgctacccatcgtccaaaccagggcctggaaatgctgcaagggctgggcattgggatgtaagtgctgggcgggtatcctgtcattgacatgttctgagagctggggtccccccaactgctatgtggacccatggtcttggccctgacccagagatgggccatgatagtaactcatggtggggggaaacagcgttcacaaaaggctgcctctcacaccattccacaatgccctcacaaccatgtatggggtgggggatacatatgtccattttccagctgggaaaattgaggtttaggaaagtaaaatgagaggcaagacagtatgatggaaggaagcagggaatcctggcaaagcttttggatctgctgtgtgacctgggcctcagttttctcctctgcacaatgggcgtgggaatgccttgtaagtgtaaagcatggaactcacattaccattgtcctgccgggtggtcaacctgtctcccctctctcactgggcatcagagaaggatctggcagaagggaaaaggctgcctcaggatggccccaccctgtgtttcagccttacaatatccatcgttgtgggtctcatgatcctgcagatgtgtatcgctgccagcttcttcctacagccaaagctgggcacggctgacaagcagaagcccctggctctcaacaacaggaaagcgttccacaacttcaactactttctgttcttctacaacgtgctgctgggcctgggtgcctgcctttccaggctgctcatcagttgcctcctcggcatgtggctgattgcccgcatcgacaggaccatcatgcagagtggctatgagggagcagacatggggttcagtgcatggattgggatgctctacatggaccattatcacatcaaccctgtgcttgtcagcttttgccacatcctgatcacaaatcacagggagaagaagctgcagcagagcaccaaatactggtgcctaaatcaatcggcagagtcccttcggatttgcgccatgcgcggcggggagaaccggcctcctgctcgagttcagagctcatctgagtcgacgttccccagccgcctaccccccagcagagagtccttccccggggagtcctgccctggggtgccgcctcgaggccagacgtcgtcccgcctggacctgaacctgagtttgggacgggcgatttcccaacctcaggaattggaattgagacaccaaagcctagacgcgtttcctggacgacggcttcccggcaggggcatccagccagcggccaagatgtcgtcagtggggaaggtgacccaggttccgaatgggaaagcctaccagcagatcttccaggctgaggtgcagctggtccactccctggcggccaccaggaagcgggctgcagagcgttctgtgaccctgaagagtggcaggatacccatgatgaagaaggtggagactcctgaaggggaggtgatgtctccccgacagcagaagtggatgcacagcctccccaacgactggatcatggaaaaccctgttctccacagggaaaaggaaagagccaagagggaaaaagcccgagagagtgagaacaccatcgctgcccgagaagtgcggggtctcatggatactatagttcctgagaagataagcaccagcacctttcaaaggcaagcagaacacaagaggaagagctacgagagcgctctggccagctttcaggaggagattgcgcaggtgggaaaggaaatggaacctctcatcgtggacacagggggactttttttgaagaagctgactgagtctgatgaagaaatgaaccgtctcttcctaaaggtggaaaatgacaccaaccttgaggactacaccatccaagccctgctggagctgtgggataaggtggccgggcggttactgctccggaagcaggagattaaggagctggatgaggccctgcactcgctggagttctcccgaaccgataaactaaaaagcgtgttgaagaaatatgcagaagtcatagagaaaacttcctacctcatgcggcccgaagtgtacaggctgataaatgaagaagccatggtcatgaactatgccctgctgggcaaccggaaggctctcgcccagctgtttgtcaacctgatggagtccaccctgcagcaggagctggacagccgccaccgctggcaaggcttggtggacacctggaaggctctcaagaaggaggccctgctgcagagtttcagtgagttcatggccagtgagagtatccatactcccccggctgtgacgaaggagctagaggtcatgctgaagacccagaacgtcctgcagcaaaggcggctgaagcatctctgcaccatctgtgacctcctgccccccagttacagcaaaactcagctgactgagtggcattcttccctcaactccctgaacaaggagctagacacctaccacgtggactgcatgatgcggatccgcctgctgtatgagaagacatggcaggagtgcctgatgcatgtgcagaattgtaagaagcagctgctggactggaaagccttcactgaggaggaggcagagaccctggtgaaccagttcttcttccagatggtgggagcactccagggcaaagtggaggaggacctggagctcttggacgaggtggtacaactgtgggaggcacaccagagcgagctgttggtgcaggagctggagctggagaagaggatggagcagcaccggcagaagcacagcctggagagccaggtgcaggaggcccacctcgataggctcttggaccaactgaggcagcaaagtgacaaagaaacactggcgtttcacctggaaaaggtcaaagattatctgaagaacatgaaatccaggtatgaatgttttcacaccctcctgacaaaggaagtgatggagtacccagcgatcatgctgaaagaactcaactcctacagctctgccctcagccaatacttctttgtgcgtgaaatctttgaacagtgaaaaaactgaggaagaagcaagggtctaaagaggacatgaccagaagtgaggaaagcataagtagtgggacaagtactgccaggtcagtagaagaggtggaagaagaaaacgatcaagaaatggagtccttcataactgaagaggtgctggggcagcagaaaaaatctccactgcatgctaagatggatgagtccaaagaaggctctattcagggactggaagaaatgcaggttgaaagagagggctccttaaacccatccctgaatgaggagaatgtgaagggtcaaggagaaaagaaggaggagtcagaggaggaagatgagaaggaggaagaggaggaggaggagaagctgaggaagagaaggaggagaaggaggcacaggaagagcaagagagtttatctgtgggtgaggaagaagacaaggaagagggtctagaggagatatactatgaggacatggagtccttcacaatctccagtggaaacacttattttgtctttgtacccctggaagaagagcattgtaggaagtcccattccaccttctcagccatgttcatcaacgacacttccagtgccaagttcatagaacaagtgacaattccatcgagactaattttagaaattaagaaacaattgttttcagagggaggcaacttttctcctaaagaaatcaattcactgtgttcccgactggagaaggaagctgcccggatagagttggttgaaagtgtcatcatgctcaacatggagaagttggagaatgagtacctggaccaggccaatgatgtcatcaacaagtttgaaagcaaattccataacctgtctgtggaccttattttcatagagaaaatccagcggttgctgacgaatctgcaagtgaaaatcaagtgccaggtggcaaaatccaattcgcaaacaaatggattaaatttctctctgcaacagcttcagaacaagataaaaacttgtcaagagtccaggggagagaaaaccgtaagtgttcaatagattctgcatgtgaataataaagatatatcatgctaaagtcataaatgtgaaataaatttacctgtgtgtataggatttctccagcacaaggttggcggggtggggggacatctctgagccttcctacttaacccctgtttcatggaatgaagaaaggaacaaaagagaaagcagccactgttcacctccaacccctcccaggcaagcatggagcagcgtctagtgttgggggaggcctgagtctggcttcctctgacctcactcccttgggatgtcaccaggtgtc

SEQ ID NO: 466137 - DNA, 458 bp, Homo sapiens
caagcagaacacaagaggaagagctacgagagcgctctggccagctttcaggaggagattgcgcaggtgggaaaggtgagaatcctccctctcccttctcttcccttcctgtgccattccaaaggtgggtgtgtcatggctcccagccttcctccccctctccagcagagaggtcctcaggggctcacagagccttagacgacatggaaccctctctgagtgcctgagtggcttgttatgagtgtttgtgggcacaggtccccatagttcttggaaaagccctacaggtcatgtgctgttgttaccccttttgcagtgaggcccagagagtctcacctgacttggtgcataagggcccaagtcagaacttccctccaggtctgacaccaaagcctagccttcggcctccctgctcagtccttctgatgaagggcagaatggcacaccccttgctgata

SEQ ID NO: 466138 - DNA, 526 bp, Homo sapiens
tttcctttggaagactttggaacagctgcagctaggaataggtccctcgtgcaacagacagtggggaagccccaccctctgccataatcactgacccagctgcagccctgtgaaattccttatcatgcaggaagcctcaaactccaaggatcgcatgaaacaatgactgtccccactgacatacattcttcactgtgctcagtggcccccacactgtacctgagccattcctcacaccagtgctgtgaggtgagggcaatcagctcccctttatggcacgaggtcacaaagctttgagcctggacctgtaggatttgaccctgggtctgggggactccagagcctacctgcctagcaaccttgctctactgaaaggttgaaaggtggtgccttgggctggcttctgtttgcaggaaagcgttccacaacttcaactactttctgttcttctacaacgtgctgctgggcctgggtgcctgcctttccaggctgctcatcagttgcctcctcggcatgtggctgattg

SEQ ID NO: 466139 - DNA, 758 bp, Homo sapiens
agaccatgggcgtccagctgcagttgtcgctggaccggccctggctgcctcgagagagtcccttcggatttgcgccatgcgcggcggggagaaccggcctcctgctcgagttcagagctcatctgaggaattggaattgagacaccaaagcctagacgcgtttcctggacgacggcttcccggcaggggcatccagccagcggccaagatgtcgtcagtggggaaggtgacccaggttccgaatgggaaagcctaccagcagatcttccaggctgaggtgcagctggtccactccctggcggccaccaggaagcgggctgcagagcgttctgtgaccctgaagagtggcaggatacccatgatgaagaaggtggagactcctgaaggggaggtgatgtctccccgacagcagaagtggatgcacagcctccccaacgactggatcatggaaaaccctgttctccacagggaaaaggaaagagccaagagggaaaaagcccgagagagtgagaacaccatcgctgcccgagaagtgcggggtctcatggatactatagttcctccgtgttcatattttcggctggaatcggcgatgtactagaggaagttattcgtcaagcatggtgtttatcatcccaaatgtcaaaggtgtgtccaagtttatggatttcgatgaaactggggtggctcaaaggattcacaggagaactaattcatgtatttaacagacctgatggtgccttgaggaatacagaata

SEQ ID NO: 466140 - DNA, 2280 bp, Homo sapiens
cttgatgatcctgctaaattctgaacttcccaacacaaaatggccaacccaccattgtgacaaagatccgtcccagacaggtagaggcgcatgggcctgtgggtctcggggcagcagtgaggcaggggctggtggtgctgtgtgctcacctcctgtcctctgctcctgtcctgggccctcgtcacccaaaggcttcaagcgacatcggtgccagccagaaaactctgggaagaaggctgtacccagtgccagtgctacctctgcaggcagcttcacaccgcaccccaagcccaacaaaatggagagaaagtaccgggtgcttggggacaagcctccccctgctgccgaggattttaaggggatcatcttgaccctcctctgggagagcagtgagaacctgctgacagtcgcagaggagttctaccgtaaagaaaaacgcccagtcaccaggcctgactgcatgtgtgacacctttgaccagtgcgccgagaacattagcaaaaagatcctggagtatcagagccaggcaaataagtaccacaactcctgcctcatagaattacggatccagatcaggagatttgaggagctgctgccccaagtgtgttggctggtgatggagaatttcaaggaacaccactggaaaaagtttttcacctctgtgaaggagatccgaggacagttcgaggaacagcagaagcggctggagaaaagaaaggaatgtaccagaaggaatggccaggttttcataaccaacttggccaccttcaccgagaagttcctactgcagttggatgaggtggtcaccattgacgatgtccaggttgcaagtaagaggcaccaccagccttgtgtcatggccctggggggctggtgaaccttggctgggctggccagtcaacactcctcctcttcagcattttcagttgctgcacaccataatgtaataagcattgtaacttactaattagtccctttgctattgaactttggaccatttccaatttcccactcctgtaattgtgctgaagagaatctctgcatccatgcatctctagagcaacagactcctagaagtgcgatgtctggatcaaagtgtgtacagatttttgaagtgttggtcacttttctctatcagaggtctctgtcaaaggtgagccttgtttgggaaatcagcgccttgcagagatgctggggtcgagaccccagggagaacaggcaggtgagctggtagtggagcagatcacagtgccttgcaaggaacccctgagccaggaagactccctgcaccaggccctaggaggcctctgcctactctgcaactcggcttctgagccaggccaccgggccctgccattcatggcagaggagtgtacatgttacctgctggctctctgcacacagagccccccaccccctcgcccctgatctagaaagaacatcagagcatcaaagattggattattgagctagatagtcaagggacaaccttgaacgtgtttgttccaggggaggttcttagttcggaacccatatgagctagcctaagccaaagaagtctctatgaaccatatccggggactcatggaaactgcagcaacgtcagagcatcaggcttgggtttggagctgggaacagcacccacaccaccgcttagattcctccatccatgaccccctgcccctgtcaccaccccgagctgtgtggctggtgcattcagcttctccatggagagggctcagcctgccataactccaagtgggaggaggggtgccagtcctcccttttctaagtgtaatgccaggggaaatccctcgatctcaggctgtcggtgaggctgcagtcactagcctgtcttttgcctctagggatggagccccccaaacagaaattatcaatgctcatacgaaggaaactcgctgggctctccctgaaggaagagagtgagaaacccctgattgaacgtggaagcaggaagtggccagggatcaaacccaccgaagtcaccatccaaaacaagattcttctccagccaacatcatcgatttccaccaccaaaaccaccctgggccacctggcggccgtggaagcccgagatgctgtgtacctgaaatatttagcatcatttgaggaggagctaaagaggatccaggatgactgtacatctcagataaaggaggctcagcgctggaaggacagctggaagcagtccctgcacactatccaaggcctgtatgtgtgaccctccgccccaccatgaataaacactttcttatacag

SEQ ID NO: 466141 - DNA, 1380 bp, Homo sapiens
cttgatgatcctgctaaattctgaacttcccaacacaaaatggccaacccaccattgtgacaaagatccgtcccagacaggtagaggcgcatgggcctgtgggtctcggggcagcagtgaggcaggggctggtggtgctgtgtgctcacctcctgtcctctgctcctgtcctgggccctcgtcacccaaaggcttcaagcgacatcggtgccagccagaaaactctgggaagaaggctgtacccagtgccagtgctacctctgcaggcagcttcacaccgcaccccaagcccaacaaaatggagagaaagtaccgggtgcttggggacaagcctccccctgctgccgaggattttaaggggatcatcttgaccctcctctgggagagcagtgagaacctgctgacagtcgcagaggagttctaccgtaaagaaaaacgcccagtcaccaggcctgactgcatgtgtgacacctttgaccagtgcgccgagaacattagcaaaaagatcctggagtatcagagccaggcaaataagtaccacaactcctgcctcatagaattacggatccagatcaggagatttgaggagctgctgccccaagtgtgttggctggtgatggagaatttcaaggaacaccactggaaaaagtttttcacctctgtgaaggagatccgaggacagttcgaggaacagcagaagcggctggagaaaagaaaggacaaaaatgcccagaagctccatctaaatcttggacaccccgtacatttccaagaaatggagtctctacacttaagtgaagaggaaaggcaggaagagctggacagcatgattaggatgaacaaggagaagctggaggaatgtaccagaaggaatggccaggttttcataaccaacttggccaccttcaccgagaagttcctactgcagttggatgaggtggtcaccattgacgatgtccaggttgcaaggatggagccccccaaacagaaattatcaatgctcatacgaaggaaactcgctgggctctccctgaaggaagagagtgagaaacccctgattgaacgtggaagcaggaagtggccagggatcaaacccaccgaagtcaccatccaaaacaagattcttctccagccaacatcatcgatttccaccaccaaaaccaccctgggccacctggcggccgtggaagcccgagatgctgtgtacctgaaatatttagcatcatttgaggaggagctaaagaggatccaggatgactgtacatctcagataaaggaggctcagcgctggaaggacagctggaagcagtccctgcacactatccaaggcctgtatgtgtgaccctccgccccaccatgaataaacactttcttatacag

SEQ ID NO: 466142 - DNA, 1457 bp, Homo sapiens
  misc_feature (84)..(84): n is a, c, g, or t
  misc_feature (216)..(218): n is a, c, g, or t
  misc_feature (220)..(220): n is a, c, g, or t
  misc_feature (226)..(229): n is a, c, g, or t
  misc_feature (239)..(239): n is a, c, g, or t
  misc_feature (243)..(243): n is a, c, g, or t
cagctctggcagaagcaacggtggcttcgagggatggcggcggctgcaacaggacctgcagcatcccagaggaactgactaagnctttggaacagaaaccagatgatgcacaatattatcgtcaaagagcttattgtcacattcttcttgggaattactgtggtgcagatgctaatttcagtgactggattaaaaggtgtcgaagctcagaatggnnngnaatctnnnntgtttgtggngaantatgagaccctcgtgttttactggccctcgctgctgtgccttgccttcctgctgggccgcttcctgcatatgtttgtcaaggctctgagggtgcacctcggctgggagctccaggtggaagaaaaatctgtcctggaagtgcaccagggagagcacgtcaagcagctcctgaggataccccgccctcaagagaaaaaaaagtcttggttccaaaccaggatatatgagtgggatccctgctttcaatttccaagcagaatgattggaaccattgtgttggcattcatctgcctgtatcttttcattgtcatcgagttctgcgtgtttgtgtacgtgagagatgagttggatgtgcttgaaaacaacctggaaagctacatcaccttcacgaaccattcaggggtcctgaccccagtcatcctgcaggtgaaagagctgatcagtgtcaccaaaggagtctgggtggcgaccattttgcccgcgtatctcacgtgtgtgagctatctgttccacattttggtctgttacagaaagcacatgaagaggctatgggcaggagataaacattttcttcctttgaagttccataacccggcctcgtcggagagcatggtggccattgcaaggtactctggctggcaaatagcctatattctgtggggctacctcatcattcacatggtacagagcctatgtggcatggcaatcatgtacagcctggtgctacccatcgtccaaaccagggcctggaaatgctgcaagggctgggcattgggatgtaagtgctgggcgggtatcctgtcattgacatgttctgagagctggggtccccccaactgctatgtggacccatggtcttggccctgacccagagatgggccatgatagtaactcatggtggggggaaacagcgttcacaaaaggctgcctctcacaccattccacaatgccctcacaaccatgtatggggtgggggatacatatgtccattttccagctgggaaaattgaggtttaggaaagtaaaatgagaggcaagacagtatgatggaaggaagcagggaatcctggcaaagcttttggatctgctgtgtgacctggggtaagttattccacttctctgcacctcagtttacatatctggaagacaaagtaatgttggcttcattgagcatttagtatgcatcttttctcataatagcctatgaacttgga

SEQ ID NO: 466143 - DNA, 4180 bp, Homo sapiens
  misc_feature (84)..(84): n is a, c, g, or t
  misc_feature (216)..(218): n is a, c, g, or t
  misc_feature (220)..(220): n is a, c, g, or t
  misc_feature (226)..(229): n is a, c, g, or t
  misc_feature (239)..(239): n is a, c, g, or t
  misc_feature (243)..(243): n is a, c, g, or t
cagctctggcagaagcaacggtggcttcgagggatggcggcggctgcaacaggacctgcagcatcccagaggaactgactaagnctttggaacagaaaccagatgatgcacaatattatcgtcaaagagcttattgtcacattcttcttgggaattactgtggtgcagatgctaatttcagtgactggattaaaaggtgtcgaagctcagaatggnnngnaatctnnnntgtttgtggngaantatgagaccctcgtgttttactggccctcgctgctgtgccttgccttcctgctgggccgcttcctgcatatgtttgtcaaggctctgagggtgcacctcggctgggagctccaggtggaagaaaaatctgtcctggaagtgcaccagggagagcacgtcaagcagctcctgaggataccccgccctcaagagaaaaaaaagtcttggttccaaaccaggatatatgagtgggatccctgctttcaatttccaagcagaatgattggaaccattgtgttggcattcatctgcctgtatcttttcattgtcatcgagttctgcgtgtttgtgtacgtgagagatgagttggatgtgcttgaaaacaacctggaaagctacatcaccttcacgaaccattcaggggtcctgaccccagtcatcctgcaggtgaaagagctgatcagtgtcaccaaaggagtctgggtggcgaccattttgcccgcgtatctcacgtgtgtgagctatctgttccacattttggtctgttacagaaagcacatgaagaggctatgggcaggagataaacattttcttcctttgaagttccataacccggcctcgtcggagagcatggtggccattgcaaggtactctggctggcaaatagcctatattctgtggggctacctcatcattcacatggtacagagcctatgtggcatggcaatcatgtacagcctggtgctacccatcgtccaaaccagggcctggaaatgctgcaagggctgggcattgggatgtaagtgctgggcgggtatcctgtcattgacatgttctgagagctggggtccccccaactgctatgtggacccatggtcttggccctgacccagagatgggccatgatagtaactcatggtggggggaaacagcgttcacaaaaggctgcctctcacaccattccacaatgccctcacaaccatgtatggggtgggggatacatatgtccattttccagctgggaaaattgaggtttaggaaagtaaaatgagaggcaagacagtatgatggaaggaagcagggaatcctggcaaagcttttggatctgctgtgtgacctgggcctcagttttctcctctgcacaatgggcgtgggaatgccttgtaagtgtaaagcatggaactcacattaccattgtcctgccgggtggtcaacctgtctcccctctctcactgggcatcagagaaggatctggcagaagggaaaaggctgcctcaggatggccccaccctgtgtttcagccttacaatatccatcgttgtgggtctcatgatcctgcagatgtgtatcgctgccagcttcttcctacagccaaagctgggcacggctgacaagcagaagcccctggctctcaacaacaggaaagcgttccacaacttcaactactttctgttcttctacaacgtgctgctgggcctgggtgcctgcctttccaggctgctcatcagttgcctcctcggcatgtggctgattgcccgcatcgacaggaccatcatgcagagtggctatgagggagcagacatggggttcagtgcatggattgggatgctctacatggaccattatcacatcaaccctgtgcttgtcagcttttgccacatcctgatcacaaatcacagggagaagaagctgcagcagagcaccaaatactggtgcctaaatcaatcggcagagtcccttcggatttgcgccatgcgcggcggggagaaccggcctcctgctcgagttcagagctcatctgagtcgacgttccccagccgcctaccccccagcagagagtccttccccggggagtcctgccctggggtgccgcctcgaggccagacgtcgtcccgcctggacctgaacctgagtttgggacgggcgatttcccaacctcaggaattggaattgagacaccaaagcctagacgcgtttcctggacgacggcttcccggcaggggcatccagccagcggccaagatgtcgtcagtggggaaggtgacccaggttccgaatgggaaagcctaccagcagatcttccaggctgaggtgcagctggtccactccctggcggccaccaggaagcgggctgcagagcgttctgtgaccctgaagagtggcaggatacccatgatgaagaaggtggagactcctgaaggggaggtgatgtctccccgacagcagaagtggatgcacagcctccccaacgactggatcatggaaaaccctgttctccacagggaaaaggaaagagccaagagggaaaaagcccgagagagtgagaacaccatcgctgcccgagaagtgcggggtctcatggatactatagttcctgagaagataagcaccagcacctttcaaaggcaagcagaacacaagaggaagagctacgagagcgctctggccagctttcaggaggagattgcgcaggtgggaaaggaaatggaacctctcatcgtggacacagggggactttttttgaagaagctgactgagtctgatgaagaaatgaaccgtctcttcctaaaggtggaaaatgacaccaaccttgaggactacaccatccaagccctgctggagctgtgggataaggtggccgggcggttactgctccggaagcaggagattaaggagctggatgaggccctgcactcgctggagttctcccgaaccgataaactaaaaagcgtgttgaagaaatatgcagaagtcatagagaaaacttcctacctcatgcggcccgaagtgtacaggctgataaatgaagaagccatggtcatgaactatgccctgctgggcaaccggaaggctctcgcccagctgtttgtcaacctgatggagtccaccctgcagcaggagctggacagccgccaccgctggcaaggcttggtggacacctggaaggctctcaagaaggaggccctgctgcagagtttcagtgagttcatggccagtgagagtatccatactcccccggctgtgacgaaggagctagaggtcatgctgaagacccagaacgtcctgcagcaaaggcggctgaagcatctctgcaccatctgtgacctcctgccccccagttacagcaaaactcagctgactgagtggcattcttccctcaactccctgaacaaggagctagacacctaccacgtggactgcatgatgcggatccgcctgctgtatgagaagacatggcaggagtgcctgatgcatgtgcagaattgtaagaagcagctgctggactggaaagccttcactgaggaggaggcagagaccctggtgaaccagttcttcttccagatggtgggagcactccagggcaaagtggaggaggacctggagctcttggacgaggtggtacaactgtgggaggcacaccagagcgagctgttggtgcaggagctggagctggagaagaggatggagcagcaccggcagaagcacagcctggagagccaggtgcaggaggcccacctcgataggctcttggaccaactgaggcagcaaagtgacaaagaaacactggcgtttcacctggaaaaggtcaaagattatctgaagaacatgaaatccaggtatgaatgttttcacaccctcctgacaaaggaagtgatggagtacccagcgatcatgctgaaagaactcaactcctacagctctgccctcagccaatacttctttgtgcgtgaaatctttgaacagaacttggctggagaagtcattttcaaattcaggcaaccagaagcacatgaaaaaccctcccagaagagagtgaaaaaatgaaaaaactgaggaagaagcaagggtctaaagaggaggttgcccagaagaaaaagatatcccagaagaaactgaagaaacaaaaacttatggcccgggagtaaattcagcattaaaataaatgtaattaaaagga

SEQ ID NO: 466144 - DNA, 1793 bp, Homo sapiens
gggtccctgaaaatattgtcaagcttgttttgtttttgttttgttttgttttgtttttgaacagctagccaagattctaaagaaacccagacaaggcagggtggagaccgagaggagaaatttattccagaaattaactgttagcagtagtgtttcttaatacataagctatatcatactcctcaagtagattctttgcttaaaactttcactgtaaataattttatagcaaccatgtgaataacttaagaataatagaatcagtctcatttgtaggcactgtagaccatctccattccctacatgtcagagactctgggggatgaattggagatattaagaggtaaaatgatgcagagaagaccaaggtcagcagaagtcaaatacttctatttctttaaaattttgcttaggctacgcctggctattttgaagtatttatttattgatgataaaggaatactttttgtaagtagtagaaaacacctaccaactttgcctactctcttgagtagactaaaactgtttttggtaaaggatcctcttttagatttcaaaggacagatcttcacagaagctaatttttccagggaatgtttctctcttcaagaaactttggaagcttttgtgaaagaagatttttgtatggataaagtgaacttttgtcaagagaaactagaagatacaatatgtttaaatgaggttattgtgtaatttctgttgctctgtcttcaatttcactgactcttatgtcacctctaattttctgttaagctcattcagtgaattttttacttcagatattgttttaaaatttccatttgttcttttttatagtttctctttcactgctgagaatttctatttgctcattcattacaaccatatttttctttacatcttttagcatagtgattactatgttatgttattactgctttgaaatctttggatactaatttcaaaatctgagtcatctcatggattctattaatatctctgaaatgtagatgaatattccttccccttctcctcactttatgtattttatagatggctactgtcattctataggatttagaggggagaactaatatatgtgtttcctgctttcttaaaacaaaagccagataattttgaaagaaatcaattataacctcatttgaaacataggctaatctaattaaagctaagatcttagcgatctctaagatcctcaagatctcagctttaattagattaatctgtttgaaagggagaaagttttggtgaaaaaatatgctaaattccttattttataaataggagaactgagacgtagccttttttaattgatagaaaaaatattgaaatacatgtattataaaattaatgataatgcattgatttacaataagatgttctcagcccaaaagcttcttaagctgataagcaacttcagcaaagtctcaggatacaaaatcaatgtgcaaaaattgctagcattcctatacaccaacaacaggcaagcagtttgtatggaaccaaaaaacagcccaaatagccaagataatcctaagcaaaaagaacaaagctggaggcatcatgctacccaacttcaaactatgctacaaggctccagtaaccaaaacagcatgttactggtacaagaacagacacatagaccaatggaacagaatagagaactcaaataagaccacacacctacaaccatctgatcttcaacaaaactgacaaaaacaagcaatggggtaaggactccttatttaataaatggtgctgggggagctggc

SEQ ID NO: 466145 - DNA, 865 bp, Homo sapiens
ggcgttccggcatcgtcgcctggtgtgatttgcctctgcaacttgactctcctctaggaagagtactccagagagcagggatatgtcaccaggactcctgacaaccaggaaggaggcattgatggccttccgggatgtggctgtggccttcacccagaaggagtggaagctattgagttctgctcagaggaccctgtacagggaggtgatgctggagaactacagccatctggtctccctgggaattgcattttccaaaccaaaactcatcgaacagctggagcaaggcgacgaaccttggagagaggagaacgaacatcttctggacctttgtccaggcaggcggatcacaaggtcaggagttcgagactagtctggccaacatagtgaaaccccatctctactaaaaatacaaaaaaaactagccgagtgtggtggtgcgcacctgtaatcacagctactcgggaggctgaggcaggaggatcgcgtgaactcgggaggcggaggttgcagtgagccgagatcacactattgcactccagcccaggcaacagtgcgagactccatctcaaaataaataattaattaaaaatctccataagagaaaacaaaaaaaaaaaacaaaactgtgcgggcgccagcgccgaaaaggttttagaccactcgttggcggaccagaggtagggacagggcccacgggccagaaccggccgagacgggcggttcccccaaaaagcccgggacggggcgaacccagcgttcgcgctctgttcacggcagggctacccgccgcgccgggaccgcagcccccacccacggacagacgcacgcaggcaccacaggaacaacacgcaccgacgcgcgc

SEQ ID NO: 466146 - DNA, 4612 bp, Homo sapiens
agcggtctggcatcgtcgcctggtgcgtgatttgcctctgcaacttgactctcctctaggaagagtactccagagagcagggatatgtcaccaggactcctgacaaccaggaaggaggcattgatggccttccgggatgtggctgtggccttcacccagaaggagtggaagctattgagttctgctcagaggaccctgtacagggaggtgatgctggagaactacagccatctggtctccctgggaattgcattttccaaaccaaaactcatcgaacagctggagcaaggcgacgaaccttggagagaggagaacgaacatcttctggacctttgtccaggtgagtgggaagccctgggcaagcgagggtgcagggcagtgaggagctcagcaggtaaggaaggaggggctatctttgaggtgctaggaggaagttcttcttcaggcctcctaggccactggtaaaggctgcatggcactgcctgccttccacactgtgtgcctccccccaggacagggcacccctggcattccatctccttcctccatcagggagcctcactcctcacttggcttcctttctcgagcacattcaggatttctccattcttgggctcatgtggttggcatgatcttcaaaacagtacctgtcctttgagactaagtccctgcccctggttttttatttttatttttattttttttgagacagagtctcgttctgtcacccaggctggagtgcaatggcatgatctcggctcactgcaacctctgcctcctgtgttcaagtgatttctcctgcctcaccctcctgagtagctgggactacaggtgcccgccatcatgcccagctaaatttttttgtatttttagtagagatggggtttcaccttattggtcaggctggtcttgaattcctgagctcaggcaatccatctgcctttgcttcccaaagtgttgggattacaggcgtgagccaccacgcccagccagtttctattcttaacctggtagcttttttgtgcatcatttctatcctgtaaattctcataactttgtttcttttatcatagattatttaagattacagcaaggtgtgaaaaactgtacaatgagtagggttggggcagccctgtaccctaagagatagcatgttataaaaccaggtaatagccccatacttttcctgattgtgtcccgttcctccgcctctgttttctgagttagcattccatgactgtctttatccttttattccatctgatgggttcttcactcatatagggtgttgttttgcatgtctgtaaacttctctgcacataatgttattaagttgtttccaactttttggctatgaaataatcttgctctgtattcttgtatgcctccttgggaacatgtccaagagtttctcttaaaatatataccggccaggtgcagtggctcacacctgtaatcccagcactctgggaggccgaggcaggtggatcacgaggtcaggaattcgagaccattctggccaacatggtgaaaccccgtctctactaaaaatagaaaaattagctgggtgtggtggcgcatgcctataatcttagctacttgggaggctgaggcaggagaattgcttgaatccgggaggcggacgttgcagtgaactgagattgcgccactgcactccagcctaggtgacagagcgagtctccatctcacaaagaaaaaaaaaaagatatatacttaggtgtgtagtagctggttcacaggcatgcatagcctcaacttatataagttatgccaacttgtgttctgaagtgggcatggcagcttatgctcccagcaggagtctatgagaattcttgttgtacatcctcaccaacatttgggattgtgagacctcatgttttatccatctattcagctggaagtgaaatctcagaggggtttttaagttgcttactagtgagcatgagcatcttttcatatgttgcttggcccttcctgtttccccatctgtgatttgaccattcaaggtgtttgcctacttttcaatgggtctattctttttgttattgatttgtagaaatcccatataaattatggaaacatttaggtctttaactggaattaattttatatgaatgctgggagatagaaataaatttttgcctgctttatcttcttacttgtttattttcatggtttcctggcattttatttttgttttattttttgcttttaaatgtaactatatagctggtattacactatgtagcaactgagtgcttttgtctttttaaaagcatttcgttatataaaaatggggtgggcacagtggctcacgcctgtaatcccagactttgagaggctgaggtgggtggatcacttgaggccaggagtttgagaccagcctggccaacatggcaaaatcccgtctctactaaaaatacacaaattagccgagcctggtggtgcatgcctgaaataccagctactcggatggctgaggagtgagaatcgcttgaacctgggaggcgaaggttgcaatgaactgagatcacaccactgtactccagcctgggctacagagtgagactctgtctcaaaaaaaaataaagtaaaataatgataaaaatgttattaagatacagcaattaaggtatattataagatatgttttttaaggtataataaactacacttatataggtgtgaaatttggttagttttggcatatgtatacatgcatgaaagcactgccacagctaaagtaacaagcatgtctgtcatccttgaaaattttctttcgccttactgtaatcctacctcccactccttcctgtcctcccctgtacctgggcaaccactgatcagctttctataattatagatttgtctgcattttctagaatttgtataactggattatacaggatacaactggattcttcactcagcataagtattttgaattttatctataatgtgtgtatcaatagtttattaatttttattgctgagtattcctttatatgtctaggtcacattttaatactgacctattaaaaggtatttgggttttcatttttgacaaatataaataaagctgttttaagcatgcaagtttttgtgtgaatataatgctttcatttctgttgaataaatacctgggactggaatggctgggttgtatgatgatggatacaatatatattcaacttttgaagaaactcacaaactgctttccaaagtggccgcaccatttcacattcccacagcagtgtatgagagctccaggtgttccatatttgtcaaaacttggcttggttattaatttcagacattcttatagctgtgtagtgagtggcatcttaccgtggttttaacattttcttaatgactgatgatgttgagtatcttcatgtgcttatttgctatcttatatcttctttagtgaagtacgttttcacatcttttgcccatttaaaaatgtggtttcttatttttgtattattgagtttgagagttcttcacatattctatgtagaagtccattatcagatatatgatttacaaacattttttctgtggtttactttctataatcttaatagtgcctttcaaagagaaattttaatttggatgaagtccagttttcaatcttttctcttatgaattgcagttttggtagtgtatttaagaaattttagtctaaagtaaggtcaaaaagattctcatttttttcttttagtaattttacaatttttaattacatttaggtctataagcctattttgagtaaatatacttgataaaagatctgaatttatgtacttttttaggggaggaagggcatacaaatatccaatttttccagcaccatttattgaaaacactacccttttttaactgaatttcctatgtatctttgtggaagatcagttgaccatatgtgataggtctatacctggactctatgttttttctactcctctgttagtgtctctatgccaataccacagttttgattactgtagctttattaggtcttgaactcactgtaaatcctccatcttctttgggaagcttaggcaggcggatcacaaggtcaggagttcgagactagtctggccaacatagtgaaaccccatctctactaaaaatacaaaaaaaactagccgagtgtggtggtgcgcacctgtaatcacagctactcgggaggctgaggcaggaggatcgcgtgaactcgggaggcggaggttgcagtgagccgagatcacactattgcactccagcccaggcaacagtgcgagactccatctcaaaataaataattaattaaaaatctccataagagaaaacaaaaaaaaaaaacaaaactgtgcgggcgccagcgccgaaaaggttttagaccactcgttggcggaccagaggtagggacagggcccacgggccagaaccggccgagacgggcggttcccccaaaaagcccgggacggggcgaacccagcgttcgcgctctgttcacggcagggctacccgccgcgccgggaccgcagcccccacccacggacagacgcacgcaggcaccacaggaacaacacgcaccgacgcgcgc

SEQ ID NO: 466147 - DNA, 4630 bp, Homo sapiens
ctcctcctctaaggttatcctccttcaaaaggaggaatatttttattgactcaagcacagggtagaatcaacatactgcctttaggtctaggatcccctccctgtatgcatcctttcttagcattcagacatagtttactccacccctgcacctccctaccaccttctgggtttattgcattcctgggttggctctgagttctgagatagcctcttaagccactaactcaagatcaccttggtttttttttcctgtgagtaggaattgcattttccaaaccaaaactcatcgaacagctggagcaaggcgacgaaccttggagagaggagaacgaacatcttctggacctttgtccaggtgagtgggaagccctgggcaagcgagggtgcagggcagtgaggagctcagcaggtaaggaaggaggggctatctttgaggtgctaggaggaagttcttcttcaggcctcctaggccactggtaaaggctgcatggcactgcctgccttccacactgtgtgcctccccccaggacagggcacccctggcattccatctccttcctccatcagggagcctcactcctcacttggcttcctttctcgagcacattcaggatttctccattcttgggctcatgtggttggcatgatcttcaaaacagtacctgtcctttgagactaagtccctgcccctggttttttatttttatttttattttttttgagacagagtctcgttctgtcacccaggctggagtgcaatggcatgatctcggctcactgcaacctctgcctcctgtgttcaagtgatttctcctgcctcaccctcctgagtagctgggactacaggtgcccgccatcatgcccagctaaatttttttgtatttttagtagagatggggtttcaccttattggtcaggctggtcttgaattcctgagctcaggcaatccatctgcctttgcttcccaaagtgttgggattacaggcgtgagccaccacgcccagccagtttctattcttaacctggtagcttttttgtgcatcatttctatcctgtaaattctcataactttgtttcttttatcatagattatttaagattacagcaaggtgtgaaaaactgtacaatgagtagggttggggcagccctgtaccctaagagatagcatgttataaaaccaggtaatagccccatacttttcctgattgtgtcccgttcctccgcctctgttttctgagttagcattccatgactgtctttatccttttattccatctgatgggttcttcactcatatagggtgttgttttgcatgtctgtaaacttctctgcacataatgttattaagttgtttccaactttttggctatgaaataatcttgctctgtattcttgtatgcctccttgggaacatgtccaagagtttctcttaaaatatataccggccaggtgcagtggctcacacctgtaatcccagcactctgggaggccgaggcaggtggatcacgaggtcaggaattcgagaccattctggccaacatggtgaaaccccgtctctactaaaaatagaaaaattagctgggtgtggtggcgcatgcctataatcttagctacttgggaggctgaggcaggagaattgcttgaatccgggaggcggacgttgcagtgaactgagattgcgccactgcactccagcctaggtgacagagcgagtctccatctcacaaagaaaaaaaaaaagatatatacttaggtgtgtagtagctggttcacaggcatgcatagcctcaacttatataagttatgccaacttgtgttctgaagtgggcatggcagcttatgctcccagcaggagtctatgagaattcttgttgtacatcctcaccaacatttgggattgtgagacctcatgttttatccatctattcagctggaagtgaaatctcagaggggtttttaagttgcttactagtgagcatgagcatcttttcatatgttgcttggcccttcctgtttccccatctgtgatttgaccattcaaggtgtttgcctacttttcaatgggtctattctttttgttattgatttgtagaaatcccatataaattatggaaacatttaggtctttaactggaattaattttatatgaatgctgggagatagaaataaatttttgcctgctttatcttcttacttgtttattttcatggtttcctggcattttatttttgttttattttttgcttttaaatgtaactatatagctggtattacactatgtagcaactgagtgcttttgtctttttaaaagcatttcgttatataaaaatggggtgggcacagtggctcacgcctgtaatcccagactttgagaggctgaggtgggtggatcacttgaggccaggagtttgagaccagcctggccaacatggcaaaatcccgtctctactaaaaatacacaaattagccgagcctggtggtgcatgcctgaaataccagctactcggatggctgaggagtgagaatcgcttgaacctgggaggcgaaggttgcaatgaactgagatcacaccactgtactccagcctgggctacagagtgagactctgtctcaaaaaaaaataaagtaaaataatgataaaaatgttattaagatacagcaattaaggtatattataagatatgttttttaaggtataataaactacacttatataggtgtgaaatttggttagttttggcatatgtatacatgcatgaaagcactgccacagctaaagtaacaagcatgtctgtcatccttgaaaattttctttcgccttactgtaatcctacctcccactccttcctgtcctcccctgtacctgggcaaccactgatcagctttctataattatagatttgtctgcattttctagaatttgtataactggattatacaggatacaactggattcttcactcagcataagtattttgaattttatctataatgtgtgtatcaatagtttattaatttttattgctgagtattcctttatatgtctaggtcacattttaatactgacctattaaaaggtatttgggttttcatttttgacaaatataaataaagctgttttaagcatgcaagtttttgtgtgaatataatgctttcatttctgttgaataaatacctgggactggaatggctgggttgtatgatgatggatacaatatatattcaacttttgaagaaactcacaaactgctttccaaagtggccgcaccatttcacattcccacagcagtgtatgagagctccaggtgttccatatttgtcaaaacttggcttggttattaatttcagacattcttatagctgtgtagtgagtggcatcttaccgtggttttaacattttcttaatgactgatgatgttgagtatcttcatgtgcttatttgctatcttatatcttctttagtgaagtacgttttcacatcttttgcccatttaaaaatgtggtttcttatttttgtattattgagtttgagagttcttcacatattctatgtagaagtccattatcagatatatgatttacaaacattttttctgtggtttactttctataatcttaatagtgcctttcaaagagaaattttaatttggatgaagtccagttttcaatcttttctcttatgaattgcagttttggtagtgtatttaagaaattttagtctaaagtaaggtcaaaaagattctcatttttttcttttagtaattttacaatttttaattacatttaggtctataagcctattttgagtaaatatacttgataaaagatctgaatttatgtacttttttaggggaggaagggcatacaaatatccaatttttccagcaccatttattgaaaacactacccttttttaactgaatttcctatgtatctttgtggaagatcagttgaccatatgtgataggtctatacctggactctatgttttttctactcctctgttagtgtctctatgccaataccacagttttgattactgtagctttattaggtcttgaactcactgtaaatcctccatcttctttgggaagcttaggcaggcggatcacaaggtcaggagttcgagactagtctggccaacatagtgaaaccccatctctactaaaaatacaaaaaaaactagccgagtgtggtggtgcgcacctgtaatcacagctactcgggaggctgaggcaggaggatcgcgtgaactcgggaggcggaggttgcagtgagccgagatcacactattgcactccagcccaggcaacagtgcgagactccatctcaaaataaataattaattaaaaatctccataagagaaaacaaaaaaaaaaaacaaaactgtgcgggcgccagcgccgaaaaggttttagaccactcgttggcggaccagaggtagggacagggcccacgggccagaaccggccgagacgggcggttcccccaaaaagcccgggacggggcgaacccagcgttcgcgctctgttcacggcagggctacccgccgcgccgggaccgcagcccccacccacggacagacgcacgcaggcaccacaggaacaacacgcaccgacgcgcgc

SEQ ID NO: 466148 - DNA, 4240 bp, Homo sapiens
agcggtctggcatcgtcgcctggtgcgtgatttgcctctgcaacttgactctcctctaggaagagtactccagagagcagggatatgtcaccaggactcctgacaaccaggaaggaggcattgatggccttccgggatgtggctgtggccttcacccagaaggagtggaagctattgagttctgctcagaggaccctgtacagggaggtgatgctggagaactacagccatctggtctccctgggaattgcattttccaaaccaaaactcatcgaacagctggagcaaggcgacgaaccttggagagaggagaacgaacatcttctggacctttgtccagagtctcgttctgtcacccaggctggagtgcaatggcatgatctcggctcactgcaacctctgcctcctgtgttcaagtgatttctcctgcctcaccctcctgagtagctgggactacaggtgcccgccatcatgcccagctaaatttttttgtatttttagtagagatggggtttcaccttattggtcaggctggtcttgaattcctgagctcaggcaatccatctgcctttgcttcccaaagtgttgggattacaggcgtgagccaccacgcccagccagtttctattcttaacctggtagcttttttgtgcatcatttctatcctgtaaattctcataactttgtttcttttatcatagattatttaagattacagcaaggtgtgaaaaactgtacaatgagtagggttggggcagccctgtaccctaagagatagcatgttataaaaccaggtaatagccccatacttttcctgattgtgtcccgttcctccgcctctgttttctgagttagcattccatgactgtctttatccttttattccatctgatgggttcttcactcatatagggtgttgttttgcatgtctgtaaacttctctgcacataatgttattaagttgtttccaactttttggctatgaaataatcttgctctgtattcttgtatgcctccttgggaacatgtccaagagtttctcttaaaatatataccggccaggtgcagtggctcacacctgtaatcccagcactctgggaggccgaggcaggtggatcacgaggtcaggaattcgagaccattctggccaacatggtgaaaccccgtctctactaaaaatagaaaaattagctgggtgtggtggcgcatgcctataatcttagctacttgggaggctgaggcaggagaattgcttgaatccgggaggcggacgttgcagtgaactgagattgcgccactgcactccagcctaggtgacagagcgagtctccatctcacaaagaaaaaaaaaaagatatatacttaggtgtgtagtagctggttcacaggcatgcatagcctcaacttatataagttatgccaacttgtgttctgaagtgggcatggcagcttatgctcccagcaggagtctatgagaattcttgttgtacatcctcaccaacatttgggattgtgagacctcatgttttatccatctattcagctggaagtgaaatctcagaggggtttttaagttgcttactagtgagcatgagcatcttttcatatgttgcttggcccttcctgtttccccatctgtgatttgaccattcaaggtgtttgcctacttttcaatgggtctattctttttgttattgatttgtagaaatcccatataaattatggaaacatttaggtctttaactggaattaattttatatgaatgctgggagatagaaataaatttttgcctgctttatcttcttacttgtttattttcatggtttcctggcattttatttttgttttattttttgcttttaaatgtaactatatagctggtattacactatgtagcaactgagtgcttttgtctttttaaaagcatttcgttatataaaaatggggtgggcacagtggctcacgcctgtaatcccagactttgagaggctgaggtgggtggatcacttgaggccaggagtttgagaccagcctggccaacatggcaaaatcccgtctctactaaaaatacacaaattagccgagcctggtggtgcatgcctgaaataccagctactcggatggctgaggagtgagaatcgcttgaacctgggaggcgaaggttgcaatgaactgagatcacaccactgtactccagcctgggctacagagtgagactctgtctcaaaaaaaaataaagtaaaataatgataaaaatgttattaagatacagcaattaaggtatattataagatatgttttttaaggtataataaactacacttatataggtgtgaaatttggttagttttggcatatgtatacatgcatgaaagcactgccacagctaaagtaacaagcatgtctgtcatccttgaaaattttctttcgccttactgtaatcctacctcccactccttcctgtcctcccctgtacctgggcaaccactgatcagctttctataattatagatttgtctgcattttctagaatttgtataactggattatacaggatacaactggattcttcactcagcataagtattttgaattttatctataatgtgtgtatcaatagtttattaatttttattgctgagtattcctttatatgtctaggtcacattttaatactgacctattaaaaggtatttgggttttcatttttgacaaatataaataaagctgttttaagcatgcaagtttttgtgtgaatataatgctttcatttctgttgaataaatacctgggactggaatggctgggttgtatgatgatggatacaatatatattcaacttttgaagaaactcacaaactgctttccaaagtggccgcaccatttcacattcccacagcagtgtatgagagctccaggtgttccatatttgtcaaaacttggcttggttattaatttcagacattcttatagctgtgtagtgagtggcatcttaccgtggttttaacattttcttaatgactgatgatgttgagtatcttcatgtgcttatttgctatcttatatcttctttagtgaagtacgttttcacatcttttgcccatttaaaaatgtggtttcttatttttgtattattgagtttgagagttcttcacatattctatgtagaagtccattatcagatatatgatttacaaacattttttctgtggtttactttctataatcttaatagtgcctttcaaagagaaattttaatttggatgaagtccagttttcaatcttttctcttatgaattgcagttttggtagtgtatttaagaaattttagtctaaagtaaggtcaaaaagattctcatttttttcttttagtaattttacaatttttaattacatttaggtctataagcctattttgagtaaatatacttgataaaagatctgaatttatgtacttttttaggggaggaagggcatacaaatatccaatttttccagcaccatttattgaaaacactacccttttttaactgaatttcctatgtatctttgtggaagatcagttgaccatatgtgataggtctatacctggactctatgttttttctactcctctgttagtgtctctatgccaataccacagttttgattactgtagctttattaggtcttgaactcactgtaaatcctccatcttctttgggaagcttaggcaggcggatcacaaggtcaggagttcgagactagtctggccaacatagtgaaaccccatctctactaaaaatacaaaaaaaactagccgagtgtggtggtgcgcacctgtaatcacagctactcgggaggctgaggcaggaggatcgcgtgaactcgggaggcggaggttgcagtgagccgagatcacactattgcactccagcccaggcaacagtgcgagactccatctcaaaataaataattaattaaaaatctccataagagaaaacaaaaaaaaaaaacaaaactgtgcgggcgccagcgccgaaaaggttttagaccactcgttggcggaccagaggtagggacagggcccacgggccagaaccggccgagacgggcggttcccccaaaaagcccgggacggggcgaacccagcgttcgcgctctgttcacggcagggctacccgccgcgccgggaccgcagcccccacccacggacagacgcacgcaggcaccacaggaacaacacgcaccgacgcgcgc

SEQ ID NO: 466149 - DNA, 1594 bp, Homo sapiens
ctcctcctctaaggttatcctccttcaaaaggaggaatatttttattgactcaagcacagggtagaatcaacatactgcctttaggtctaggatcccctccctgtatgcatcctttcttagcattcagacatagtttactccacccctgcacctccctaccaccttctgggtttattgcattcctgggttggctctgagttctgagatagcctcttaagccactaactcaagatcaccttggtttttttttcctgtgagtaggaattgcattttccaaaccaaaactcatcgaacagctggagcaaggcgacgaaccttggagagaggagaacgaacatcttctggacctttgtccaggtgagtgggaagccctgggcaagcgagggtgcagggcagtgaggagctcagcaggtaaggaaggaggggctatctttgaggtgctaggaggaagttcttcttcaggcctcctaggccactggtaaaggctgcatggcactgcctgccttccacactgtgtgcctccccccaggacagggcacccctggcattccatctccttcctccatcagggagcctcactcctcacttggcttcctttctcgagcacattcaggatttctccattcttgggctcatgtggttggcatgatcttcaaaacagtacctgtcctttgagactaagtccctgcccctggttttttatttttatttttattttttttgagacagagtctcgttctgtcacccaggctggagtgcaatggcatgatctcggctcactgcaacctctgcctcctgtgttcaagtgatttctcctgcctcaccctcctgagtagctgggactacaggtgcccgccatcatgcccagctaaatttttttgtatttttagtagagatggggtttcaccttattggtcaggctggtcttgaattcctgagctcaggcaatccatctgcctttgcttcccaaagtgttgggattacaggcgtgagccaccacgcccagccagtttctattcttaacctggtagcttttttgtgcatcatttctatcctgtaaattctcataactttgtttcttttatcatagattatttaagattacagcaaggtgtgaaaaactgtacaatgagtagggttggggcagccctgtaccctaagagatagcatgttataaaaccaggtaatagccccatacttttcctgattgtgtcccgttcctccgcctctgttttctgagttagcattccatgactgtctttatccttttattccatctgatgggttcttcactcatatagggtgttgttttgcatgtctgtaaacttctctgcacataatgttattaagttgtttccaactttttggctatgaaataatcttgctctgtattcttgtatgcctccttgggaacatgtccaagagtttctcttaaaatatataccggccaggtgcagtggctcacacctgtaatcccagcactctgggaggccgaggcaggtggattggctgggcccagggaggtgcaggctgctgtgagctgagattgcaccattgcatagcagtctgggtaacagagtgagaccttgtctc

SEQ ID NO: 466150 - DNA, 1768 bp, Homo sapiens
gggaagcatctggactctgcatgtaagattttgtgattgtcctttctcccttgctttcctcgtctggctcctggctgccccttgggccggcgcctctcgctcgctctattccttctccccgcggctgcctcgtgccggccgcaccttctcgccgcggaccggagccggggcaggagccggggcaggaacccgggcagaagccggggcaggaaccaggacaggaagcggggcaggaaccaggacaggaagcagggcaggagccccgcaggagccaggtgtctgagccccgccccgccgcgggggagaggcctccgggagccggggccgcccagagccgcagccgccgcgcaggcagggccgggccgggccgggtgcgcgggcacaaaggggccgctgcacatggcaggcaggcgagcagatgccagcagacagctttttgttttgtggaaggtagtacttgcaagggatgaaactggatattttactgaggagatttctaagcaaaatgtcgaagaagtgacttggttcctcccagttgattgtagtaaaatgcaagaagagagaaatgaattgaaaaaggaattgttgagcaaaaatgaaccagagtttaaagatttggaaaattctctgtctgttcatatgacgaaaaatgagaaagtgtgtactgaagagaacactaagggtgtggtggaccaaccatttcataaagagattagtgtggctgtgtaccatgaacttaatcagccatttcaacagaggccgggaatacagatgggattacacctgcagagacactgctggctgggactaaaaaaaacagaacatggaatggaatgaaggaaggccgtgactttgtgctatcatctagtaaaagggatgaagggccccgaggcaatttggaggtcctctgcctccaatttgaaggactattgccctggtttcaatagtccagacagcttccaaccaaagatgtggaggcacaatctttgcctggtagagaagctaggggtgcaacatctggccaggaatgctgctggggtgggacctttaccctagtggctccagaaggcagggcatcaaaccaaggattactcccaagccttaagatttcatggagtttgctttgtagtttggacttgcttgggactgggtcaccccttccttctgtgtttcttgcttttggaatgggaatgcctatcctatgcctgtcccaccaatgtattttggaagtatacaacttgtttggtttcacagattcgcagctggagaggaattttgccccaggatgaatcataactcaagtctcactgtacctaatttagaagatatttagaaaagactttggactttagacattagcgttgttgctggaatgagttaagactttggaggatggaatgaatgtacagatgctccttgacttagaatggggttatgtcccaataaacccattgtaagtaaaaaaatatataagtaaaaatgcattcagtaccctgataaacccatggtaaagtcaaaaaatcagaagatgcttttcaacttacaatggggttatttatttcctgatagacccatcgcaaaatttaaaaattgtaagttgaaccatcatatgttgaggacaatgtgtatttggcacatgagaaggacatgaattttggggggccaggggtagaatgctatggactgaacttatgtgtctccctaaaattcgtacgttatgaccctagttcctaatgtgatgaggaaataaatgttcattgtttaggcc

SEQ ID NO: 466151 - DNA, 875 bp, Homo sapiens
ttttttttttttttttttttttttttttttttttttgatgtatctgtcccttgccatgggctccacagagtgtgtgctcctggccgtgatggcatatgaccgttatgtggccatttgtaacccgctgagatactccatcatcatgaacaggtgcgtctgtgcacggatggctacggtctcctgggtgacgggttgcctgaccgctctgctggaaaccagttttgccctgcagatacccctctgtgggaatctcatcgatcacttcacgtgtgaaattctggcggtgctaaagttagcttgcacaagttcactgctcatgaacaccatcatgctggtggtcagcattctcctcttgccaattccaatgctcttagtttgcatctcttacatcttcatcctttccactattctgagaatcacctcagcagagggaagaaacaaggctttttctacctgtggtgcccatttgactgtggtgattttgtattatggggctgccctctctatgtacctaaagccttcttcatcaaatgcacaaaaaatagacaaaatcatctctctgccagctttgacacaaggaactgagcagattggcatggaaccaagtgttttagaatgggatatagaccagaatgggacaacaaaatggatgagaaataacccagatgtcagaagaggactcagaacagaacctggcaattatcataatttgtaattcaataataatttgtgggtttccttgtttgatggctatgtccctcactggtctgtaggttcactgaggcaatgaccatatcaatttcatttactactgtatacccaggacctagcacaagtctggcatagagaagacagacattcactgcatacttttt

SEQ ID NO: 466152 - DNA, 1660 bp, Homo sapiens
atgcaggccgatcgcctcagaagccgcctagaccatcacagatgttgagcttcagctacacctcattgccgcccttttccctagttcaaagcctcctttgcatcctcctctcatatccccccaccttaacccacaagtatgagcctctctttgctttcacttgggctggccctgacacccatcagcctcagcaacttacctgggctgtactgccacaagccttcacggacagcccccattacttcagtaaagcccaaattccttcctcatctgttacctatcttggcatagttcttcatgaaaacacatgtgctctccctgccgatcatatacctggttttgccatcctaacagaaccattatataaactcacaaaaccaaacctagctgaccccatagatcctaaatccgtttgccactcctctttccgttccttgaagacagctttagagactgttcccacactagctctccctgactcatcgcagcccttttcgttacacacagctgaagtgcagggctgtgcagtcggaattcttacacaagagccagaccacaccctgtagcctttctgtccaaacagaaagtaagatattccttgggctggttggtctgaggacctgaggttgtaggtggatcccctcatggagtgagggtgaggacagatgaccggtctcccaaaggagtcctcctgtcctgggttttggcaccaaatgtcacacgcgtccgtgtgaagagaccaccaaacaggctatgtgtgagcaataaagtagaggcctgacacttttgttacaattaatgagccaatataattactttattattaaccaaatgctgggattacaagcatgagccacagcgcctggctggtaatggtattttcaaaaattaggtactgtagaattgtttcatacctggaagttaggttccaatattaaaaaatattgaatttagtaaaaattattcttaaaaaatctgttgacaccaataaaatatatgtataaaaatatatatttgcaatctgttttcttttttgtcaatatgtgtatttaaatttttttaatttaaatccatgcagtatgctagacctccactctggagaagtgggaaaatgcaaatgttaaaaatatatttcattaatatctatttataattttttctggttttgttcaattagcagataactgttacttatttgacaaataaatctagcatacaaacaaagaagaaaagctcttaggagttagaaaaacacactcctctattcccccaaattaagatcacttttactggggcatgaaagtaggtatatctccaaggatcttagtctatagcaataatatttgcacaaatacatgcccccacttagaagggaggaataaaagaccttgcaaaatgatcattaaaaagctggaaactgttttttgaccatgaaatcctgccatcatgaccacattccttatataaagatgaaatatgaatttaatgacttaatagactcaccaaagtcaagaataaaatttcattttgccttcaagatttcatactatccaccgcaagcatctgaagtgttgctcagtctgcagtcattacggaacaggtacacctatcagaccacagtcaagaagctggagaggacggacgctgtagctcacgccta

SEQ ID NO: 466153 - DNA, 1731 bp, Homo sapiens
ggctaattcagaaaggcattgggtgaaagaagattgccacggagacagagagcagcatggtcagtgtggtaggagccggccatcagcgagagctgctccatgcctggctgctgggagctagagcctgcggcccactggcttgcctcactgtagttggtggtggcagtgacagagactgcagcatgaccagagtggcttttctggctttgcccgcccagctgctccatgccaggaggaggaggagacacctagagcctgcaacaccacggctcacctcgctgcgggtgggtggcagtgacggagactgcagtgcgccagagcggtaggagagtggccacgctaggagggcgggcggctgcaggcagggttgggagtcaggcttacagcgatggacgggctgcagcagtggccaggtggtaggagccttgtagggagggctggtgcattggcaatgggcctggctttgccctgtgcctgccgtggatctggccctgtactgccctgccttgccctgtacctgccctactgttacctggactctcagccctgtcctgctctggtcccatcctgaccctgtcttggccccgtgctaccctgtccctgccctggtcttgccctggcactggccctgccctgaacctgcactggcctgaccttggctctggccctggctctggccctgccccttgtcctgaccctggtcctgtcatggcactggccctgccagtggtcatggtcctgctcctgttctggccctgacctggccttggaaatgtcctggctctgctttggcccatccctgccctggccccaccatgggccttcctgccctgcccctgctgctgccctggccctggcctggaacctggtcctgtcaaggacctgccctgactctgccatggccctggccctgctctgccttgttcctggccctgacccagacccagaccctttcctggctctgcactggtctttccctggccctgagctggcagtggcccagcacagacctggctctgaccctggccctggtctttgtcctgccatagctttggccctgaagtggacttggaggtgtcctggccccggtgtaacatggctctgcattggcctgtctctgccctgcccctaccatcgccttgccctgctctgccctgtcccagtactgacccggccacgctatttccccgccctaccctgccttggctatgaccctggccctgcccctgcccttgcccttgccctggcactggccttggacatgtccgtggtcctaaccctggccctgccctggagctgccactgtcttggccctgccctggctctggccctgccccggccctggccctgccccggccccagccatagacctgccctgcacagacctggtcctatctgtggccttggcctggcattgacccctgctcctgaccctggtcctgccatggccctggccctgccaatgaccctggcagcccttaccctggccctgaactggccctgccctggccctgaagtggatttgcaggtgtcttacctggccatggccctgcgtctgccctggaccggcgctggcactggcatggaccctggccctggcccttcactacttaaggccataccctggcccagccctggccctaatttggcctggctctaccctggcatgctattctggccctagccctgaccctgtccctgtccctgtactggtcctagccccgttgctgg

SEQ ID NO: 466154 - DNA, 993 bp, Homo sapiens
attagacagatattagggatgatggttaattacaagcaaggctgctcctatggccaggaataaaaacgcttgtacctacttaacaggctggcatgattcatgtctgggccaggtggattcactaaatgcatccacgaaagagcagattaaggagattgcagaagcaatgcagggccagagaccagggcgtgaaaacggatgcagatcccgcaggctgcagctactgctgcggctcctctcacaggcctggctgggcctcgggaccctccagagcccaaagggctccacaatcacaggaactcattccttaaaaggaaatctctctctctctaaatacagacatacacatgcatcctatcggtctgtttctctggagagccctcatacagtagttacatctttattcttaggaggcgcctgctgaggaatgcaagggtgagttgttttgacgtctgtaactagcttccaaccggttccacgagagaaagcgggcggaggcagagaaatcacaacatgctacgaagcgctggatccagactatggaaatgatgttagacaaaaagccaattcgagtgattttcttttttgagttcaaaatggatcataaagcagcagagacaacttgcaacgtcaacaatgcatttggctcaggaactactaatgaatgtacagtgcagtggtggttcaaaaagttttgcaaaggagacgagaaccttgaagctgaggagcatagtggccggccattggcagttgacaagggccagttgagagcaaccatcaaagctgatcctcctacagctacatgagaagttgccgaagaactcaacatcaaccattctacagttgttcagcattagcagcaaattggaagtgacaaagcttgataagcaaaaatttaaaaaatcattgttttaaagtgttgtctccccttattctatgcaacaatgaaccattttttggttggattgtgacgtgcaacaaaaaatggatttt

SEQ ID NO: 466155 - DNA, 1496 bp, Homo sapiens
ttcctagttcttcagttttggaatttggactggctctcctcactcttagcttgcagacagcctattgtgggaccttgtgattgtgaaacctcacccacctcagcccttattaggcacctaatgtggattctaagacagacactgaaacaaagctgcccctggggaagacgacatgtatccaaatggggagacagactagatggctgatcaagaaggagacagatgccatctggggagggacaggcataagccactttctggtgcttggagttagtgaggaagggctgagtgaaaatgccactctcctgtgcctaccaatattgggtcctgggtcatcatgtgctgggtgccctcagtgaaccaccatgtgatgcagagaccagagagtgaaggcccgggccggcgcagggtggtgcaactttgaatcgaggtggccaagggggagcttttcctgcacaagctctttttgcctgctgccatccatgtaagatgtgacttgcttctcgtcttccaccatgattgtgaggcttccccagccaccaaccatgtggaactgtaagtttaattaaacctctttcttttgtaaatttcccagtctcaggtgtgtctttattagcagtgtgaaaacggactaatatgctccctcttgcagccttgggaatggcctccttgtcagctctcaggaacagtcccagaaatttccaagccgggcgtcgcgcccaccgtattgatgaggggaacggaggctccacggagccgccagaccccgttccccgtgtagtgaagcggcccagctgcctcgctgcccagctgcaggagattgtagctgcgctggagtcagacgctccctcgggcgctgtccatggtggcaggagagtgaaagcagaggaggaaccatcccactggagggtgggggtaggcgctggaatcaaggacaacttcctggaggagggactgtttgaacccaactctgagaacaaggctgccaccctgtcctgtagctataagcagtcctgccagtcagaaccaccacctgagtcagccagcaacggcctcaatgccaaggagaaaaggccacagtcaagctcaggtgcctgcccccagagcagagccctggaccagtggctggacagacacgaggcacgctcaactgtgacccctacgtacgcagcagggcacagctgggccccccagggaccctgggccggctcctccagcccagatgagaaggacagcaaggtgaagtctggggtcctgtgttcctgaggtccaaggtcttgggggtcccctgtttacacactcagttgtgttgttactgacttgtcctaagggcaagctggcccgagtccttagagcttacagccccctggatggctttatcctctgtccagtcttgtactgtggttatttcatggggcaaagtgggcaggagtgggggggactgtgaacttttcccgtggggagagttgaaggtgaggcattaggggggcagtgag

SEQ ID NO: 466156 - DNA, 2649 bp, Homo sapiens
  misc_feature (3)..(5): n is a, c, g, or t
  misc_feature (11)..(12): n is a, c, g, or t
  misc_feature (14)..(14): n is a, c, g, or t
aannnctgtanntntatagagacagggttatcaccatgttggccagctggtggagtgcacttccccggtacactgggtgtcggtgggaaataccagcacttgcgacgagagcattttcctcatttgctctcagccacctggtgccagctttcatcgtccgtgcaggtgaaaggggatctggaggcatcaggttctgcagggcagtgtgccccttgcctatttttctctgcgctgccaaagggacctctacctgtcccactgtgggaggaaagcccctgtctgggctgcctctgctctgggatgaggggactgtgattacatgggcctgtgtcaccttctaccactgggtgaaagaggagaacgatgtgagagactgggagaaggagagaaatctgaacattcaagtcactgagaacgaagtggcagtggagagaagagcagcaatcacagaaatggagcaatgaggaaggaaggaggggatggcatctgtgccaaaagtcagcgggagggcatgcaggagaaggatgggaagtgtctacaactctcatgattctgggtaaaactggagtcctgtgttctagtagtctcaatagagggaagaaggtggaagctagattttaaatggggttgagccagaagggaagttaggagggaaatgaagctatttttagaaatttggctatgaagaagacttgaggtggatagctctctatcttttaaggtgaaaatcatgcaattttgtttatatctcgagagaaagaggctgtgagtgttgctggagggctcaggaaggtctctggatgccagtgagaccccagccccagccggttttccaggttcttgacagcatcacaagaacgaattcaggggggagtcgagtcagaatgaagcgcaaggcgagaagcttccattgcaaagcgaaagtgtgttcttgagaggagcgtagccatgcccgtgagaacaagtcaggcacaacggaggctgggtttcttattttagggatgtttctttctctttctttctttctttctctttctttctttctttctttctttctttctttctttctttctttctttctttctttcttttctttcctttcttttctttctttcttctttctttctttctttctgtcttttttttttgagacggagtctctctttcgcccaggctggagttcagtggcgcgatctcggctcactgcaagctccgcctcccgggttcacgccattctcctgcctcagcctcccgagtagcggggactacaggcgccggccaccacacccggctgatattttgtattttttagtagagacagggtttcaccgtgttagccaggatggtctggatctcctgacctcctgatctgcctgcctcaacctcccaaagtgctgggattacaggtgtgagccaccgcgcccagcccggatgtttctttaataagggggtggaatgctcattaggtattctggaaaaggaggggatttcagggactcctcccccctcctgttattgcctcctttctcccttatttgggtttacctggaagagtcatggccttggtgggtgcaggaagcatagctgtgatgcaagaagcatggccttggtgagtgctggagtatgttctctaaagacactgtgaacactattagcccatactgaaccactgctcctggagaaatacagggttagcttccacgcctctgatcactacatttttgtcatccaaccaatacatatttttgttttatgtgtttttatctacagacaccttgtttaatatacgtttcttaccaatagttaactgtatgtattattctttataataaaactcaagctgggaagagttttgcgttttcctgaccttgggtaatgtgactaaaaatttatttggctgtcagcctcacaacaatgctgtccactaaacttttttttttttagatggagtctcgctctgtcgctcaggctggggtgcagtggtgcaatcttggctcactgcaacctccacctcccgggttcaagagattctcctgcctcagcctcttgagtagctgggattacgcgcaccaacacgcccggctaatttttgtatttttagtagagatgaggtttcaccatgttggtcaggctggtcgcgaactcctgacgtcgtgatccgcctgcctcagcctcccaaagtgctgggattacaggcgagccaccgcgcctggccagtccaccaaacttttaatgtcatctcatgaatccacaaatttcactggttttttttcttcttcttgtttttccataactttaccaggtactatagatgttacttgggcacttttcagagtggcctcacatctgcgtcaatgactttcctcttcctccttctggatgtaacatattgttgactcattgctgttgaacttactgtcaacagcactgtaactcatgcctgagccaagcttgtctaacaggtatattttctctgtaaagcacatcacagcctttctgcacttaggaacattagacagcacttcagcagtacacttgggggccattttaaacaattaaatcactgataggctccgctccgctcagggcggccccagacacgggtttcccatggcagcaccacggcacgcccggcgcacctgctgcccc

SEQ ID NO: 466157 - DNA, 599 bp, Homo sapiens
tcggcacggggccttttaatgacccaggcgtgtgaacgtttcctgcttgaaattatattgatttaaatgatgtgtgagatgtttcaccattttcaggcactgtgtaattctattgtaataaactggcaggtatctttgtaactataaatagtgcatgctcagccatgtacactgtaaatagcctttaccaaacgtgtttgacaaggaccataattaacatcacttagtgaattgtgataaagaaaaaaaagccatgatttattcgatgtgattggcttgtttttatgtggcgccaagaacgaacctgtttaacagctgtaaccaatggtactgatctatccatccaatgttgtcattatatttgactgtggttcaacagtattgcgttgtcagactaggaaagctaaacgaacaaaatggttttagttttgctgaagactggccttattaatggacagctttcctaacaagagattattaacttttatcaggtgttaacatctgtttcaggaacatggcagtatgtttacatgtcagaagttttgtttaattctatggtatttctaaattgacttgtttaaataaattcagcaaatgga

SEQ ID NO: 466158 - DNA, 3242 bp, Homo sapiens
gtccccgcgcgcggcgtggatcgcggcccaagccgccattgttccgccgagggaggacagcggggcctggcgctggcgccgagacgccgcttagcggccgccactggagacactccctcccgcctcccgggtctcctggcggcggcggagtgaggctgacagcggggaacctgggagacccctccgccctccccgcggtggcagcggccgatccccggctccggcgcgagggacggccgcgatgcgctcggcctgaggttacccggcccggcccttcctcgcttccctcgactattccactgcgtctccgcgccccggcgtcatcctgcgagtccctctgacgggagggaagatggctgcacggagctggcaggacgagctggcccagcaggccgaggagggctcggcccggctgcgggaaatgctctcggtcggcctaggctttctgcgcaccgagctgggcctcgacctggggctggagccgaaacggtaccccggctgggtgatcctggtgggcactggcgcgctcgggctgctgctgctgtttctgctgggctacggctgggccgcggcttgcgccggcgcccgcaaaaagcggaggagcccgccccgcaagcgggaggaggcggcggccgtgccggccgcggccccgacgacctggccttgctgaagaatctccggagcgaggaacagaagaagaagaaccggaagaaactgtccgagaagcccaaaccaaatgggcggactgttgaagtggctgagggtgaagctgttcgaacacctcaaagtgtaacagcaaagcagccaccagagattgacaagaaaaatgaaaagtttcttaatgcttccaatttcaaaatgtactattgaagaagtggctaagtcacttcttcaaagacattttgaaattggaagaaccaagacagctgcaggagcctgggaaactaaaattagtcacagagagaaacgacagcagcgtaaacgtgataaggtgctgactgattctggttcattggattcaactatccctgggatagaaaataccatcacagttaccaccgagcaacttacaaccgcatcatttcctgttggttccaagaagaataaagtttcttcaggattgaatgaaaacctcactgtcaatggaggaggctggaatgaaaagtctgtaaaactctcctcacagatcagtgcaggtgaggagaagtggaactccgtttcacctgcttctgcaggaaagaggaaaactgagccatctgcctggagtcaagacactggagatgctaatacaaatggaaaagactggggaaggagttggagtgaccgttcaatattttctggcattggtaccaaaatccccaggtgctgaagtctcctgtgataaaatggcatagtatttgcatataacctacatatgtcttcccatatattttaaattatctcttgattacttgtagtaactaatacagtgtaaatagttgttatactgtattgtttagggaataatgacaagaaaaaaaagtgtgtacatattcagtacagacacagttcattcattttttttcctgaatatttttgaacccacaaatggaaaacccatggatacgcagggctgactgtgtatgaagtatttaaatccaaggttttacaaggatgtgaaagcactatttttggggaaaaaaataaacagtatatttgtgctttaggaagaattatcagctatatgcagaatagaattgaggatgattataacaatgataggagtgactataggaaaatagcagtaaggtatcttgggctgctgtgggttgaggcagaggaaaattgagtggacaggtctccaggctttcctgcttggacagagtagatgcactttttattttatccatattaagatactttgaatatgaaaaacatgattagctgctaaaataaaagatttttaaaacatgtatccacaggattctatacttaatcaaagtaatatgtatcagaaacaccatcttcctcaagtttgttatgctgtattggcagtctttttaagtccagagtttctctttaacattttctctgtaaactttattttctgtgtcaccatctttaatgcagctctatttttggtgctcagtgaatttagttattacttctgaatttctaaaatgaatgatttagtattttagattacaaatccacaaagtatattacattagatttacatttacagtatgatataattaacatattggccctccagtttgaagacatacattaatctattactatcttgaccataaaggaacagcattattgtaacccatgtaaaaagtcagatgttgaatagaactttttcttggcacacaggggtgaatgaattcgcttcagcataatggagtggttgagagcatgagctttcaggacagactacctgggtttcaatcttaacttccctgcctttgcccatatgcaggttacatgattattctatgcctcaatttccttctctgtaaaaataacaattcctcccaaacagtacggctgagaagattaaatgagttaatacatataaagctcttagaacactgcctcacatatagtaaatatgcagtaagtactgctgttggtatccttctagtggcaaaattagtctaaccaatgtggttaactaacccaatgttgttaacactggagaatgtctaacataattgttttcttttattaaaaagttattaaagtttacattgaattaagttctgacaagaaacagctgacaaccaaataaagaccagcaatgagatgcttaaacctaaaacattattccataagtgaattaaatggagagacaaattctttacccttttgaaaagaaaaccagtatggctctttgaaaagaattaagttctgacaagaaacagctgacaaccaaataaagactagcgaagagatacttaaacctaaaatgttattccataagcaaattaaatgaagagacaaattccttacccttttgaaaagaaaaccagtatggctctttgaaaagacattggcagactaatggaaaactttagcgataagaaattataattgaagcaaactatactgtgaatcatttttaagggaactatgtctaagaagttttttgctacctttagtatccattttacccatttttctcttttattagttaggttgagccatattaaataacagtttttttgggtcaaaactggttgaatatcagcagt

SEQ ID NO: 466159 - DNA, 512 bp, Homo sapiens
ctcagctatttacagtgtacatggctgagcatgcactatttatagttacaaagatacctgccagtttattacaatagaattacactgtaaatagcctttaccaaacgtgtttgacaaggaccataattaacatcacttagtgaattgtgataaagaaaaaaaagccatgatttattcgatgtgattggcttgtttttatgtggcgccaagaacgaacctgtttaacagctgtaaccaatggtactgatctatccatccaatgttgtcattatatttgactgtggttcaacagtattgcgttgtcagactaggaaagctaaacgaacaaaatggttttagttttgctgaagactggccttattaatggacagctttcctaacaagagattattaacttttatcaggtgttaacatctgtttcaggaacatggcagtatgtttacatgtcagaagttttgtttaattctatggtatttctaaattgacttgtttaaataaattcagcaaatgga

SEQ ID NO: 466160 - DNA, 1036 bp, Homo sapiens
  misc_feature (746)..(746): n is a, c, g, or t
  misc_feature (749)..(749): n is a, c, g, or t
  misc_feature (1036)..(1036): n is a, c, g, or t
ggacgcgtggtcgaccacgcgtccggagcctgggaaactaaaattagtcacagagagaaacgacagcagcgtaaacgtgataaggtgctgactgattctggttcattggattcaactatccctgggatagaaaataccatcacagttaccaccgagcaacttacaaccgcatcatttcctgttggttccaagaagaataaaggtgattctcatctaaatgttcaagttagcaactttaaatctggaaaaggagattctacacttcaggtttcttcaggattgaatgaaaacctcactgtcaatggaggaggctggaatgaaaagtctgtaaaactctcctcacagatcagtgcaggtgaggagaagtggaactccgtttcacctgcttctgcaggaaagaggaaaactgagccatctgcctggagtcaagacactggagatgctaatacaaatggaaaagactggggaaggagttggagtgaccgttcaatattttctggcattgggtctactgctgagccagtttctcagtctaccacttctgattatcagtgggatgttagccgtaatcaaccctatatcgatgatgaatggtctgggttaaatggtctgtcttctgctgatcccaactctgattggaatgcaccagcagaagagtggggcaattgggtagacgaagaaagagcttcacttctaaagtcccaggaaccaattcctgatgatcaaaaggtctcagatgatgatanganagggagagggagctcttcactgggacatccacagaaaaagcaacgcagagccggggagatactctacggacggaaccgaggatagaaagagataaggagactcaggaaaactataacggcaaaaggaaaggtacctgaagcaaagaggtacacgagagcggagaatgggactataattccggttaggactgattaaagagagggagccggccaaaaagaaacacagacaggcacagagagacacaaaaaaagacgagtgttatctataacaccacaaagtaaaggan

SEQ ID NO: 466161 - DNA, 5293 bp, Homo sapiens
gtccccgcgcgcggcgtggatcgcggcccaagccgccattgttccgccgagggaggacagcggggcctggcgctggcgccgagacgccgcttagcggccgccactggagacactccctcccgcctcccgggtctcctggcggcggcggagtgaggctgacagcggggaacctgggagacccctccgccctccccgcggtggcagcggccgatccccggctccggcgcgagggacggccgcgatgcgctcggcctgaggttacccggcccggcccttcctcgcttccctcgactattccactgcgtctccgcgccccggcgtcatcctgcgagtccctctgacgggagggaagatggctgcacggagctggcaggacgagctggcccagcaggccgaggagggctcggcccggctgcgggaaatgctctcggtcggcctaggctttctgcgcaccgagctgggcctcgacctggggctggagccgaaacggtaccccggctgggtgatcctggtgggcactggcgcgctcgggctgctgctgctgtttctgctgggctacggctgggccgcggcttgcgccggcgcccgcaaaaagcggaggagcccgccccgcaagcgggaggaggcggcggccgtgccggccgcggccccgacgacctggccttgctgaagaatctccggagcgaggaacagaagaagaagaaccggaagaaactgtccgagaagcccaaaccaaatgggcggactgttgaagtggctgagggtgaagctgttcgaacacctcaaagtgtaacagcaaagcagccaccagagattgacaagaaaaatgaaaagtttcttaatgcttccaatttcaaaatgtactattgaagaagtggctaagtcacttcttcaaagacattttgaaattggaagaaccaagacagctgcaggagcctgggaaactaaaattagtcacagagagaaacgacagcagcgtaaacgtgataaggtgctgactgattctggttcattggattcaactatccctgggatagaaaataccatcacagttaccaccgagcaacttacaaccgcatcatttcctgttggttccaagaagaataaaggtgattctcatctaaatgttcaagttagcaactttaaatctggaaaaggagattctacacttcaggtttcttcaggattgaatgaaaacctcactgtcaatggaggaggctggaatgaaaagtctgtaaaactctcctcacagatcagtgcaggtgaggagaagtggaactccgtttcacctgcttctgcaggaaagaggaaaactgagccatctgcctggagtcaagacactggagatgctaatacaaatggaaaagactggggaaggagttggagtgaccgttcaatattttctggcattgggtctactgctgagccagtttctcagtctaccacttctgattatcagtgggatgttagccgtaatcaaccctatatcgatgatgaatggtctgggttaaatggtctgtcttctgctgatcccaactctgattggaatgcaccagcagaagagtggggcaattgggtagacgaagaaagagcttcacttctaaagtcccaggaaccaattcctgatgatcaaaaggtctcagatgatgataaagaaaagggagagggagctcttccaactgggaaatccaaaaagaaaaaaaagaaaaagaagaagcaaggtgaagataactctactgcacaggacacagaagaattagaaaaagagattagagaagaccttccagtgaatacctctaaaacccgtccaaaacaggaaaaagctttttccttgaagaccataagcactagtgatccagccgaagtactcgtcaaaaatagccagcctatcaagactcttccacctgctacttctaccgagccatctgtaatcttatcaaaaagtgattctgacaagagctcttcccaagtgccgccaatactacaagagacagataaatccaagtcaaataccaagcaaaatagtgtgcctccttcacagaccaagtctgaaactagctgggaatctcccaaacaaataaaaaagaagaaaaaagccagacgagaaacgtgaaattttttttcctgaattggacatgtgtttgcaaacacttgtcttgaagattatgctgtttatgcaataatttgtgaacatgtacagagttttatataaatttaaaccaatttttaaaacaaaactgcggacaccaccataaaaatggaatcaaaagaaagttaatttatgaaattaagaggtcagcagaatatactcagtgatggaagacacttgggaaagtctttttaatagaacaagaacgatcttaatttaagaatattatcctggtttaacaacagtgccctgtttacaacagattgtgccctatctcatctgcagccgaggaataaaggattctgattagaaagagggttgcctacagattagtaagcaattccttggatcttatgcacagaacttgtaccatttgaatctgttttatgcttaaatcaaagtgctttgatcaaatgcataacctgccatatctttacatatttgttggtagcaatttgtattaaagaaatcacaagtgcaaataaaaagtcatttatcatttgtttaactaaactgtcatggtttagtttacaatttttaaaaagttcttaaaatactgaaaatgcagttgacacttgtgtatggcttatgaagttatttttgatagtcttacattacttgaattgttcaaagtacagtatattttaaattaagaaaagtgaactatatgtatttgttttatacatttaaggcttagactcataaataatgctattgtttatgatttgaaaactttcaggcaaaatccaatttacatttttcccttccctagcaattacttttttccagcttcaactcttcttagttactaatactttgttgactttaaaaatgaaatcattcacaaacttttggtatatgatggagaatgaaaaactagagtcagacagctttaattgacattgtcaacacctccagttatcaggaatacatttttttactgccttaacctgtagtgcgtagaatatgcatcaatttcttgaaggagattcatgtttttataagaattttcatgtaattattgcaattgtggtcaaataaggaacgtttcctgcttgaaattatattgatttaaatgatgtgtgagatgtttcaccattttcaggcactgtgtaattctattgtaataaactggcaggtatctttgtaactataaatagtgcatgctcagccatgtacactgtaaatagcctttaccaaacgtgtttgacaaggaccataattaacatcacttagtgaattgtgataaagaaaaaaaagccatgatttattcgatgtgattggcttgtttttatgtggcgccaagaacgaacctgtttaacagctgtaaccaatggtactgatctatccatccaatgttgtcattatatttgactgtggttcaacagtattgcgttgtcagactaggaaagctaaacgaacaaaatggttttagttttgctgaagactggccttattaatggacagctttcctaacaagagattattaacttttatcaggtgttaacatctgtttcaggaacatggcagtatgtttacatgtcagaagttttgtttaattctatggtatttctaaattgacttgtttaaataaattcagcaaatggatagcattgttttttatttgcttcaatatgggggtagataatagctaaagagccaaggatgaatttcttcaaatgactttattctgttagctttacataggtgttggaggattcctaaggtgtcagcattttgtaaaggtaccacaaaggagaagttgatagggaatctaattttagaatgtgccaaatggtctgtgctcaacaatataattgaactctctcaactctacctcaccatttctttatctcaaaattctgttggctttgtcaaacgttggattttatttctgcagcctagtatctccccattctaccacctatgccagatgttaaagacagcagatgttttgaggagaatggcattgtggagatgcagagatgcgttgctaagttgaggtggatccagtatagagatacctctatttcttctttatggctcaagagctaggacttggattcttggcctcccaaagtgctggtgttacaggtgtgagccaccacacctggccaacatgtggctttcagttcttacttgaagacagctgctctagctagaaacttcctatcggcatctgagccagctggtagagggcattacctcccccacccccaagaacacttcttggaagttacacacaatacataaacttcaatttcaaacagttgcttggtcccactagccatgaagctggatgggacgtaatattctatctgggttgtcatgggccaaattaacattttgagattctgttaggaagatgagaattggataatgggcacctctaacagtgtctgtcagagttgacatacattgtgtatctcctgcaccaaagcatttttgagatcaagtgttcttccagctgagcagaaatttggaaggctattcagtgctgcttagtgtagcagctaataatgttccaacttctatatgatagtttgctttttgttttttgtttttttctagagacagagtctcgttgcccaggctggtctccaattcctgggttcaagcaatcctcctgactcagcctcctaaatgctgggattacaggcatgaaccactgtgcccagtctatatataatagattttagaagaaatttctgccactcagtgactgctttaaattctagagacagaggctgagagaaacttagtagcctgcctgcgcatactgcaagtacagactatataacaagttgaaagagaatcaccctggtatataatattttaaaacatgaaaaaggcattactattgttctggtctaagtactctaacaggacgatgatttctaaccctagcatcatgacatgtatatagtgtgttgtaagacatttgccagctaatagttacagtactgaagcttgtgaatacgttaattgagaaaactttaagcaggttcaaagttatcccatgatagtggcattcttatttgtatatatgtgctttccttttttatttgtatcaaggcatttaaaatgaatatatgtaacatgtacctaagttttaaaagcataataaaatgaacacatctgaaa

SEQ ID NO: 466162 - DNA, 3744 bp, Homo sapiens
gtccccgcgcgcggcgtggatcgcggcccaagccgccattgttccgccgagggaggacagcggggcctggcgctggcgccgagacgccgcttagcggccgccactggagacactccctcccgcctcccgggtctcctggcggcggcggagtgaggctgacagcggggaacctgggagacccctccgccctccccgcggtggcagcggccgatccccggctccggcgcgagggacggccgcgatgcgctcggcctgaggttacccggcccggcccttcctcgcttccctcgactattccactgcgtctccgcgccccggcgtcatcctgcgagtccctctgacgggagggaagatggctgcacggagctggcaggacgagctggcccagcaggccgaggagggctcggcccggctgcgggaaatgctctcggtcggcctaggctttctgcgcaccgagctgggcctcgacctggggctggagccgaaacggtaccccggctgggtgatcctggtgggcactggcgcgctcgggctgctgctgctgtttctgctgggctacggctgggccgcggcttgcgccggcgcccgcaaaaagcggaggagcccgccccgcaagcgggaggaggcggcggccgtgccggccgcggccccgacgacctggccttgctgaagaatctccggagcgaggaacagaagaagaagaaccggaagaaactgtccgagaagcccaaaccaaatgggcggactgttgaagtggctgagggtgaagctgttcgaacacctcaaagtgtaacagcaaagcagccaccagagattgacaagaaaaatgaaaagtcaaagaaaaataagaagaaatcaaagtcagatgctaaagcagtgcaaaacagttcacgccatgatggaaaggaagttgatgaaggagcctgggaaactaaaattagtcacagagagaaacgacagcagcgtaaacgtgataaggtgctgactgattctggttcattggattcaactatccctgggatagaaaataccatcacagttaccaccgagcaacttacaaccgcatcatttcctgttggttccaagaagaataaaggtgattctcatctaaatgttcaagttagcaactttaaatctggaaaaggagattctacacttcaggtttcttcaggattgaatgaaaacctcactgtcaatggaggaggctggaatgaaaagtctgtaaaactctcctcacagatcagtgcaggtgaggagaagtggaactccgtttcacctgcttctgcaggaaagaggaaaactgagccatctgcctggagtcaagacactggagatgctaatacaaatggaaaagactggggaaggagttggagtgaccgttcaatattttctggcattgggtctactgctgagccagtttctcagtctaccacttctgattatcagtgggatgttagccgtaatcaaccctatatcgatgatgaatggtctgggttaaatggtctgtcttctgctgatcccaactctgattggaatgcaccagcagaagagtggggcaattgggtagacgaagaaagagcttcacttctaaagtcccaggaaccaattcctgatgatcaaaaggtctcagatgatgataaagaaaagggagagggagctcttccaactgggaaatccaaaaagaaaaaaaagaaaaagaagaagcaaggtgaagataactctactgcacaggacacagaagaattagaaaaagagattagagaagaccttccagtgaatacctctaaaacccgtccaaaacaggaaaaagctttttccttgaagaccataagcactagtgatccagccgaagtactcgtcaaaaatagccagcctatcaagactcttccacctgctacttctaccgagccatctgtaatcttatcaaaaagtgattctgacaagagctcttcccaagtgccgccaatactacaagagacagataaatccaagtcaaataccaagcaaaatagtgtgcctccttcacagaccaagtctgaaactagctgggaatctcccaaacaaataaaaaagaagaaaaaagccagacgagaaacgtgaaattttttttcctgaattggacatgtgtttgcaaacacttgtcttgaagattatgctgtttatgcaataatttgtgaacatgtacagagttttatataaatttaaaccaatttttaaaacaaaactgcggacaccaccataaaaatggaatcaaaagaaagttaatttatgaaattaagaggtcagcagaatatactcagtgatggaagacacttgggaaagtctttttaatagaacaagaacgatcttaatttaagaatattatcctggtttaacaacagtgccctgtttacaacagattgtgccctatctcatctgcagccgaggaataaaggattctgattagaaagagggttgcctacagattagtaagcaattccttggatcttatgcacagaacttgtaccatttgaatctgttttatgcttaaatcaaagtgctttgatcaaatgcataacctgccatatctttacatatttgttggtagcaatttgtattaaagaaatcacaagtgcaaataaaaagtcatttatcatttgtttaactaaactgtcatggtttagtttacaatttttaaaaagttcttaaaatactgaaaatgcagttgacacttgtgtatggcttatgaagttatttttgatagtcttacattacttgaattgttcaaagtacagtatattttaaattaagaaaagtgaactatatgtatttgttttatacatttaaggcttagactcataaataatgctattgtttatgatttgaaaactttcaggcaaaatccaatttacatttttcccttccctagcaattacttttttccagcttcaactcttcttagttactaatactttgttgactttaaaaatgaaatcattcacaaacttttggtatatgatggagaatgaaaaactagagtcagacagctttaattgacattgtcaacacctccagttatcaggaatacatttttttactgccttaacctgtagtgcgtagaatatgcatcaatttcttgaaggagattcatgtttttataagaattttcatgtaattattgcaattgtggtcaaataaggaacgtttcctgcttgaaattatattgatttaaatgatgtgtgagatgtttcaccattttcaggcactgtgtaattctattgtaataaactggcaggtatctttgtaactataaatagtgcatgctcagccatgtacactgtaaatagcctttaccaaacgtgtttgacaaggaccataattaacatcacttagtgaattgtgataaagaaaaaaaagccatgatttattcgatgtgattggcttgtttttatgtggcgccaagaacgaacctgtttaacagctgtaaccaatggtactgatctatccatccaatgttgtcattatatttgactgtggttcaacagtattgcgttgtcagactaggaaagctaaacgaacaaaatggttttagttttgctgaagactggccttattaatggacagctttcctaacaagagattattaacttttatcaggtgttaacatctgtttcaggaacatggcagtatgtttacatgtcagaagttttgtttaattctatggtatttctaaattgacttgtttaaataaattcagcaaatgga

SEQ ID NO: 466163 - DNA, 5181 bp, Homo sapiens
gtccccgcgcgcggcgtggatcgcggcccaagccgccattgttccgccgagggaggacagcggggcctggcgctggcgccgagacgccgcttagcggccgccactggagacactccctcccgcctcccgggtctcctggcggcggcggagtgaggctgacagcggggaacctgggagacccctccgccctccccgcggtggcagcggccgatccccggctccggcgcgagggacggccgcgatgcgctcggcctgaggttacccggcccggcccttcctcgcttccctcgactattccactgcgtctccgcgccccggcgtcatcctgcgagtccctctgacgggagggaagatggctgcacggagctggcaggacgagctggcccagcaggccgaggagggctcggcccggctgcgggaaatgctctcggtcggcctaggctttctgcgcaccgagctgggcctcgacctggggctggagccgaaacggtaccccggctgggtgatcctggtgggcactggcgcgctcgggctgctgctgctgtttctgctgggctacggctgggccgcggcttgcgccggcgcccgcaaaaagcggaggagcccgccccgcaagcgggaggaggcggcggccgtgccggccgcggccccgacgacctggccttgctgaagaatctccggagcgaggaacagaagaagaagaaccggaagaaactgtccgagaagcccaaaccaaatgggcggactgttgaagtggctgagggtgaagctgttcgaacacctcaaagtgtaacagcaaagcagccaccagagattgacaagaaaaatgaaaagtcaaagaaaaataagaagaaatcaaagtcagatgctaaagcagtgcaaaacagttcacgccatgatggaaaggaagttgatgaaggagcctgggaaactaaaattagtcacagagagaaacgacagcagcgtaaacgtgataaggtgctgactgattctggttcattggattcaactatccctgggatagaaaataccatcacagttaccaccgagcaacttacaaccgcatcatttcctgttggttccaagaagaataaaggtgattctcatctaaatgttcaagttagcaactttaaatctggaaaaggagattctacacttcaggtttcttcaggattgaatgaaaacctcactgtcaatggaggaggctggaatgaaaagtctgtaaaactctcctcacagatcagtgcaggtgaggagaagtggaactccgtttcacctgcttctgcaggaaagaggaaaactgagccatctgcctggagtcaagacactggagatgctaatacaaatggaaaagactggggaaggagttggagtgaccgttcaatattttctggcattgatggtctgtcttctgctgatcccaactctgattggaatgcaccagcagaagagtggggcaattgggtagacgaagaaagagcttcacttctaaagtcccaggaaccaattcctgatgatcaaaaggtctcagatgatgataaagaaaagggagagggagctcttccaactgggaaatccaaaaagaaaaaaaagaaaaagaagaagcaaggtgaagataactctactgcacaggacacagaagaattagaaaaagagattagagaagaccttccagtgaatacctctaaaacccgtccaaaacaggaaaaagctttttccttgaagaccataagcactagtgatccagccgaagtactcgtcaaaaatagccagcctatcaagactcttccacctgctacttctaccgagccatctgtaatcttatcaaaaagtgattctgacaagagctcttcccaagtgccgccaatactacaagagacagataaatccaagtcaaataccaagcaaaatagtgtgcctccttcacagaccaagtctgaaactagctgggaatctcccaaacaaataaaaaagaagaaaaaagccagacgagaaacgtgaaattttttttcctgaattggacatgtgtttgcaaacacttgtcttgaagattatgctgtttatgcaataatttgtgaacatgtacagagttttatataaatttaaaccaatttttaaaacaaaactgcggacaccaccataaaaatggaatcaaaagaaagttaatttatgaaattaagaggtcagcagaatatactcagtgatggaagacacttgggaaagtctttttaatagaacaagaacgatcttaatttaagaatattatcctggtttaacaacagtgccctgtttacaacagattgtgccctatctcatctgcagccgaggaataaaggattctgattagaaagagggttgcctacagattagtaagcaattccttggatcttatgcacagaacttgtaccatttgaatctgttttatgcttaaatcaaagtgctttgatcaaatgcataacctgccatatctttacatatttgttggtagcaatttgtattaaagaaatcacaagtgcaaataaaaagtcatttatcatttgtttaactaaactgtcatggtttagtttacaatttttaaaaagttcttaaaatactgaaaatgcagttgacacttgtgtatggcttatgaagttatttttgatagtcttacattacttgaattgttcaaagtacagtatattttaaattaagaaaagtgaactatatgtatttgttttatacatttaaggcttagactcataaataatgctattgtttatgatttgaaaactttcaggcaaaatccaatttacatttttcccttccctagcaattacttttttccagcttcaactcttcttagttactaatactttgttgactttaaaaatgaaatcattcacaaacttttggtatatgatggagaatgaaaaactagagtcagacagctttaattgacattgtcaacacctccagttatcaggaatacatttttttactgccttaacctgtagtgcgtagaatatgcatcaatttcttgaaggagattcatgtttttataagaattttcatgtaattattgcaattgtggtcaaataaggaacgtttcctgcttgaaattatattgatttaaatgatgtgtgagatgtttcaccattttcaggcactgtgtaattctattgtaataaactggcaggtatctttgtaactataaatagtgcatgctcagccatgtacactgtaaatagcctttaccaaacgtgtttgacaaggaccataattaacatcacttagtgaattgtgataaagaaaaaaaagccatgatttattcgatgtgattggcttgtttttatgtggcgccaagaacgaacctgtttaacagctgtaaccaatggtactgatctatccatccaatgttgtcattatatttgactgtggttcaacagtattgcgttgtcagactaggaaagctaaacgaacaaaatggttttagttttgctgaagactggccttattaatggacagctttcctaacaagagattattaacttttatcaggtgttaacatctgtttcaggaacatggcagtatgtttacatgtcagaagttttgtttaattctatggtatttctaaattgacttgtttaaataaattcagcaaatggatagcattgttttttatttgcttcaatatgggggtagataatagctaaagagccaaggatgaatttcttcaaatgactttattctgttagctttacataggtgttggaggattcctaaggtgtcagcattttgtaaaggtaccacaaaggagaagttgatagggaatctaattttagaatgtgccaaatggtctgtgctcaacaatataattgaactctctcaactctacctcaccatttctttatctcaaaattctgttggctttgtcaaacgttggattttatttctgcagcctagtatctccccattctaccacctatgccagatgttaaagacagcagatgttttgaggagaatggcattgtggagatgcagagatgcgttgctaagttgaggtggatccagtatagagatacctctatttcttctttatggctcaagagctaggacttggattcttggcctcccaaagtgctggtgttacaggtgtgagccaccacacctggccaacatgtggctttcagttcttacttgaagacagctgctctagctagaaacttcctatcggcatctgagccagctggtagagggcattacctcccccacccccaagaacacttcttggaagttacacacaatacataaacttcaatttcaaacagttgcttggtcccactagccatgaagctggatgggacgtaatattctatctgggttgtcatgggccaaattaacattttgagattctgttaggaagatgagaattggataatgggcacctctaacagtgtctgtcagagttgacatacattgtgtatctcctgcaccaaagcatttttgagatcaagtgttcttccagctgagcagaaatttggaaggctattcagtgctgcttagtgtagcagctaataatgttccaacttctatatgatagtttgctttttgttttttgtttttttctagagacagagtctcgttgcccaggctggtctccaattcctgggttcaagcaatcctcctgactcagcctcctaaatgctgggattacaggcatgaaccactgtgcccagtctatatataatagattttagaagaaatttctgccactcagtgactgctttaaattctagagacagaggctgagagaaacttagtagcctgcctgcgcatactgcaagtacagactatataacaagttgaaagagaatcaccctggtatataatattttaaaacatgaaaaaggcattactattgttctggtctaagtactctaacaggacgatgatttctaaccctagcatcatgacatgtatatagtgtgttgtaagacatttgccagctaatagttacagtactgaagcttgtgaatacgttaattgagaaaactttaagcaggttcaaagttatcccatgatagtggcattcttatttgtatatatgtgctttccttttttatttgtatcaaggcatttaaaatgaatatatgtaacatgtacctaagttttaaaagcataataaaatgaacacatctgaaa

SEQ ID NO: 466164 - DNA, 5479 bp, Homo sapiens
gtccccgcgcgcggcgtggatcgcggcccaagccgccattgttccgccgagggaggacagcggggcctggcgctggcgccgagacgccgcttagcggccgccactggagacactccctcccgcctcccgggtctcctggcggcggcggagtgaggctgacagcggggaacctgggagacccctccgccctccccgcggtggcagcggccgatccccggctccggcgcgagggacggccgcgatgcgctcggcctgaggttacccggcccggcccttcctcgcttccctcgactattccactgcgtctccgcgccccggcgtcatcctgcgagtccctctgacgggagggaagatggctgcacggagctggcaggacgagctggcccagcaggccgaggagggctcggcccggctgcgggaaatgctctcggtcggcctaggctttctgcgcaccgagctgggcctcgacctggggctggagccgaaacggtaccccggctgggtgatcctggtgggcactggcgcgctcgggctgctgctgctgtttctgctgggctacggctgggccgcggcttgcgccggcgcccgcaaaaagcggaggagcccgccccgcaagcgggaggaggcggcggccgtgccggccgcggccccgacgacctggccttgctgaagaatctccggagcgaggaacagaagaagaagaaccggaagaaactgtccgagaagcccaaaccaaatgggcggactgttgaagtggctgagggtgaagctgttcgaacacctcaaagtgtaacagcaaagcagccaccagagattgacaagaaaaatgaaaagtcaaagaaaaataagaagaaatcaaagtcagatgctaaagcagtgcaaaacagttcacgccatgatggaaaggaagttgatgaaggagcctgggaaactaaaattagtcacagagagaaacgacagcagcgtaaacgtgataaggtgctgactgattctggttcattggattcaactatccctgggatagaaaataccatcacagttaccaccgagcaacttacaaccgcatcatttcctgttggttccaagaagaataaaggtgattctcatctaaatgttcaagttagcaactttaaatctggaaaaggagattctacacttcaggtttcttcaggattgaatgaaaacctcactgtcaatggaggaggctggaatgaaaagtctgtaaaactctcctcacagatcagtgcaggtgaggagaagtggaactccgtttcacctgcttctgcaggaaagaggaaaactgagccatctgcctggagtcaagacactggagatgctaatacaaatggaaaagactggggaaggagttggagtgaccgttcaatattttctggcattgggtctactgctgagccagtttctcagtctaccacttctgattatcagtgggatgttagccgtaatcaaccctatatcgatgatgaatggtctgggttaaatggtctgtcttctgctgatcccaactctgattggaatgcaccagcagaagagtggggcaattgggtagacgaagaaagagcttcacttctaaagtcccaggaaccaattcctgatgatcaaaaggtctcagatgatgataaagaaaagggagagggagctcttccaactgggaaatccaaaaagaaaaaaaagaaaaagaagaagcaaggtgaagataactctactgcacaggacacagaagaattagaaaaagagattagagaagaccttccagtgaatacctctaaaacccgtccaaaacaggaaaaagctttttccttgaagaccataagcactagtgatccagccgaagtactcgtcaaaaatagccagcctatcaagactcttccacctgctacttctaccgagccatctgtaatcttatcaaaaagtgattctgacaagagctcttcccaagtgccgccaatactacaagagacagataaatccaagtcaaataccaagcaaaatagtgtgcctccttcacagaccaagtctgaaactagctgggaatctcccaaacaaataaaaaagaagaaaaaagccagacgagaaacgtgaaattttttttcctgaattggacatgtgtttgcaaacacttgtcttgaagattatgctgtttatgcaataatttgtgaacatgtacagagttttatataaatttaaaccaatttttaaaacaaaactgcggacaccaccataaaaatggaatcaaaagaaagttaatttatgaaattaagaggtcagcagaatatactcagtgatggaagacacttgggaaagtctttttaatagaacaagaacgatcttaatttaagaatattatcctggtttaacaacagtgccctgtttacaacagattgtgccctatctcatctgcagccgaggaataaaggattctgattagaaagagggttgcctacagattagtaagcaattccttggatcttatgcacagaacttgtaccatttgaatctgttttatgcttaaatcaaagtgctttgatcaaatgcataacctgccatatctttacatatttgttggtagcaatttgtattaaagaaatcacaagtgcaaataaaaagtcatttatcatttgtttaactaaactgtcatggtttagtttacaatttttaaaaagttcttaaaatactgaaaatgcagttgacacttgtgtatggcttatgaagttatttttgatagtcttacattacttgaattgttcaaagtacagtatattttaaattaagaaaagtgaactatatgtatttgttttatacatttaaggcttagactcataaataatgctattgtttatgatttgaaaactttcaggcaaaatccaatttacatttttcccttccctagcaattacttttttccagcttcaactcttcttagttactaatactttgttgactttaaaaatgaaatcattcacaaacttttggtatatgatggagaatgaaaaactagagtcagacagctttaattgacattgtcaacacctccagttatcaggaatacatttttttactgccttaacctgtagtgcgtagaatatgcatcaatttcttgaaggagattcatgtttttataagaattttcatgtaattattgcaattgtggtcaaataaggaacgtttcctgcttgaaattatattgatttaaatgatgtgtgagatgtttcaccattttcaggcactgtgtaattctattgtaataaactggcaggtatctttgtaactataaatagtgcatgctcagccatgtacactgtaaatagcctttaccaaacgtgtttgacaaggaccataattaacatcacttagtgaattgtgataaagaaaaaaaagccatgatttattcgatgtgattggcttgtttttatgtggcgccaagaacgaacctgtttaacagctgtaaccaatggtactgatctatccatccaatgttgtcattatatttgactgtggttcaacagtattgcgttgtcagactaggaaagctaaacgaacaaaatggttttagttttgctgaagactggccttattaatggacagctttcctaacaagagattattaacttttatcaggtgttaacatctgtttcaggaacatggcagtatgtttacatgtcagaagttttgtttaattctatggtatttctaaattgacttgtttaaataaattcagcaaatggatagcattgttttttatttgcttcaatatgggggtagataatagctaaagagccaaggatgaatttcttcaaatgactttattctgttagctttacataggtgttggaggattcctaaggtgtcagcattttgtaaaggtaccacaaaggagaagttgatagggaatctaattttagaatgtgccaaatggtctgtgctcaacaatataattgaactctctcaactctacctcaccatttctttatctcaaaattctgttggctttgtcaaacgttggattttatttctgcagcctagtatctccccattctaccacctatgccagatgttaaagacagcagatgttttgaggagaatggcattgtggagatgcagagatgcgttgctaagttgaggtggatccagtatagagatacctctatttcttctttatggctcaagagctaggacttggattttgttttaagagatggcagctggccgggtgcagtggctcacgtctgtaatcccagcactttgggaggccgaggcaggtggatcacgaggtcaggagttcaagaccagcctggccaagagggtgaaaccccatctttactaaaaatacaaaaaaaaaaattagctgggtgtggtggtgggctcctgtaatcccagctactcaggaggctaaggcagagaatcatttgaacccaggagacggagtttgcaaagccaagatcgtgccactgcactccagcctgggcaacagaaggagactccgtctcaaaaaaaaaaaaaagatggcagctatataaatgataaaattaattacattctctttcacatgcatgaggtgcaaactctgtcacaagtattttaattaccttttaccttgtttcatagatctttatgtgacataaaaacagtttctggcacggtggctcacgcctgtaatcctagcactttgggaggctgaggcaggtggatcacctgaggtcaggagtttgagaccagcctggccaatatggtgaaaccccatctctacaaaatttgcaaaaagtagatgggtgtggtagtgggcgcctgtaatcccagctactcaggaggttgaggcagagaatcgcttgaacccggggggtggaggttgcagtgagctgagatcgcaccactgcactccagcatgaaagagcgagactcaatctcaaaaaaaaaaaagtttctggcacctgaacaggaactggtttccatcatcaactcagaaagcactaaaatctaggtggtgattcagggaggagcaggggaagacagcctcctatggtggcatgaataagatgcttccagaactagtagggaaataactaacctcttcaggctttatcaggcctggaggggaaccttgctcatgttagcaagaaaggtatcctagagaagccactcaaaaggctccctaatccagcctgtctccacatacatactgaaaattcttccctactctgaggcagggtgtagtggtttaggggtttctccagactggaatcctacctatctgtaccgacaattgagcaaacaacagttgagagagtccaaaaaaaaaagtattaaaatgtgattgatgtaatttaccatgtttactttatgcatgcattttattggggaggggaggtcagaataattcacccaaatctagtggtcttatttcataggctaatctggtttatattggggtgtttacagtctttcatcataataatttctggcg

SEQ ID NO: 466165 - DNA, 5315 bp, Homo sapiens
gtccccgcgcgcggcgtggatcgcggcccaagccgccattgttccgccgagggaggacagcggggcctggcgctggcgccgagacgccgcttagcggccgccactggagacactccctcccgcctcccgggtctcctggcggcggcggagtgaggctgacagcggggaacctgggagacccctccgccctccccgcggtggcagcggccgatccccggctccggcgcgagggacggccgcgatgcgctcggcctgaggttacccggcccggcccttcctcgcttccctcgactattccactgcgtctccgcgccccggcgtcatcctgcgagtccctctgacgggagggaagatggctgcacggagctggcaggacgagctggcccagcaggccgaggagggctcggcccggctgcgggaaatgctctcggtcggcctaggctttctgcgcaccgagctgggcctcgacctggggctggagccgaaacggtaccccggctgggtgatcctggtgggcactggcgcgctcgggctgctgctgctgtttctgctgggctacggctgggccgcggcttgcgccggcgcccgcaaaaagcggaggagcccgccccgcaagcgggaggaggcggcggccgtgccggccgcggccccgacgacctggccttgctgaagaatctccggagcgaggaacagaagaagaagaaccggaagaaactgtccgagaagcccaaaccaaatgggcggactgttgaagtggctgagggtgaagctgttcgaacacctcaaagtgtaacagcaaagcagccaccagagattgacaagaaaaatgaaaagtcaaagaaaaataagaagaaatcaaagtcagatgctaaagcagtgcaaaacagttcacgccatgatggaaaggaagttgatgaaggagcctgggaaactaaaattagtcacagagagaaacgacagcagcgtaaacgtgataaggtgctgactgattctggttcattggattcaactatccctgggatagaaaataccatcacagttaccaccgagcaacttacaaccgcatcatttcctgttggttccaagaagaataaaggtgattctcatctaaatgttcaagttagcaactttaaatctggaaaaggagattctacacttcaggtttcttcaggattgaatgaaaacctcactgtcaatggaggaggctggaatgaaaagtctgtaaaactctcctcacagatcagtgcaggtgaggagaagtggaactccgtttcacctgcttctgcaggaaagaggaaaactgagccatctgcctggagtcaagacactggagatgctaatacaaatggaaaagactggggaaggagttggagtgaccgttcaatattttctggcattgggtctactgctgagccagtttctcagtctaccacttctgattatcagtgggatgttagccgtaatcaaccctatatcgatgatgaatggtctgggttaaatggtctgtcttctgctgatcccaactctgattggaatgcaccagcagaagagtggggcaattgggtagacgaagaaagagcttcacttctaaagtcccaggaaccaattcctgatgatcaaaaggtctcagatgatgataaagaaaagggagagggagctcttccaactgggaaatccaaaaagaaaaaaaagaaaaagaagaagcaaggtgaagataactctactgcacaggacacagaagaattagaaaaagagattagagaagaccttccagtgaatacctctaaaacccgtccaaaacaggaaaaagctttttccttgaagaccataagcactagtgatccagccgaagtactcgtcaaaaatagccagcctatcaagactcttccacctgctacttctaccgagccatctgtaatcttatcaaaaagtgattctgacaagagctcttcccaagtgccgccaatactacaagagacagataaatccaagtcaaataccaagcaaaatagtgtgcctccttcacagaccaagtctgaaactagctgggaatctcccaaacaaataaaaaagaagaaaaaagccagacgagaaacgtgaaattttttttcctgaattggacatgtgtttgcaaacacttgtcttgaagattatgctgtttatgcaataatttgtgaacatgtacagagttttatataaatttaaaccaatttttaaaacaaaactgcggacaccaccataaaaatggaatcaaaagaaagttaatttatgaaattaagaggtcagcagaatatactcagtgatggaagacacttgggaaagtctttttaatagaacaagaacgatcttaatttaagaatattatcctggtttaacaacagtgccctgtttacaacagattgtgccctatctcatctgcagccgaggaataaaggattctgattagaaagagggttgcctacagattagtaagcaattccttggatcttatgcacagaacttgtaccatttgaatctgttttatgcttaaatcaaagtgctttgatcaaatgcataacctgccatatctttacatatttgttggtagcaatttgtattaaagaaatcacaagtgcaaataaaaagtcatttatcatttgtttaactaaactgtcatggtttagtttacaatttttaaaaagttcttaaaatactgaaaatgcagttgacacttgtgtatggcttatgaagttatttttgatagtcttacattacttgaattgttcaaagtacagtatattttaaattaagaaaagtgaactatatgtatttgttttatacatttaaggcttagactcataaataatgctattgtttatgatttgaaaactttcaggcaaaatccaatttacatttttcccttccctagcaattacttttttccagcttcaactcttcttagttactaatactttgttgactttaaaaatgaaatcattcacaaacttttggtatatgatggagaatgaaaaactagagtcagacagctttaattgacattgtcaacacctccagttatcaggaatacatttttttactgccttaacctgtagtgcgtagaatatgcatcaatttcttgaaggagattcatgtttttataagaattttcatgtaattattgcaattgtggtcaaataaggaacgtttcctgcttgaaattatattgatttaaatgatgtgtgagatgtttcaccattttcaggcactgtgtaattctattgtaataaactggcaggtatctttgtaactataaatagtgcatgctcagccatgtacactgtaaatagcctttaccaaacgtgtttgacaaggaccataattaacatcacttagtgaattgtgataaagaaaaaaaagccatgatttattcgatgtgattggcttgtttttatgtggcgccaagaacgaacctgtttaacagctgtaaccaatggtactgatctatccatccaatgttgtcattatatttgactgtggttcaacagtattgcgttgtcagactaggaaagctaaacgaacaaaatggttttagttttgctgaagactggccttattaatggacagctttcctaacaagagattattaacttttatcaggtgttaacatctgtttcaggaacatggcagtatgtttacatgtcagaagttttgtttaattctatggtatttctaaattgacttgtttaaataaattcagcaaatggatagcattgttttttatttgcttcaatatgggggtagataatagctaaagagccaaggatgaatttcttcaaatgactttattctgttagctttacataggtgttggaggattcctaaggtgtcagcattttgtaaaggtaccacaaaggagaagttgatagggaatctaattttagaatgtgccaaatggtctgtgctcaacaatataattgaactctctcaactctacctcaccatttctttatctcaaaattctgttggctttgtcaaacgttggattttatttctgcagcctagtatctccccattctaccacctatgccagatgttaaagacagcagatgttttgaggagaatggcattgtggagatgcagagatgcgttgctaagttgaggtggatccagtatagagatacctctatttcttctttatggctcaagagctaggacttggattcttggcctcccaaagtgctggtgttacaggtgtgagccaccacacctggccaacatgtggctttcagttcttacttgaagacagctgctctagctagaaacttcctatcggcatctgagccagctggtagagggcattacctcccccacccccaagaacacttcttggaagttacacacaatacataaacttcaatttcaaacagttgcttggtcccactagccatgaagctggatgggacgtaatattctatctgggttgtcatgggccaaattaacattttgagattctgttaggaagatgagaattggataatgggcacctctaacagtgtctgtcagagttgacatacattgtgtatctcctgcaccaaagcatttttgagatcaagtgttcttccagctgagcagaaatttggaaggctattcagtgctgcttagtgtagcagctaataatgttccaacttctatatgatagtttgctttttgttttttgtttttttctagagacagagtctcgttgcccaggctggtctccaattcctgggttcaagcaatcctcctgactcagcctcctaaatgctgggattacaggcatgaaccactgtgcccagtctatatataatagattttagaagaaatttctgccactcagtgactgctttaaattctagagacagaggctgagagaaacttagtagcctgcctgcgcatactgcaagtacagactatataacaagttgaaagagaatcaccctggtatataatattttaaaacatgaaaaaggcattactattgttctggtctaagtactctaacaggacgatgatttctaaccctagcatcatgacatgtatatagtgtgttgtaagacatttgccagctaatagttacagtactgaagcttgtgaatacgttaattgagaaaactttaagcaggttcaaagttatcccatgatagtggcattcttatttgtatatatgtgctttccttttttatttgtatcaaggcatttaaaatgaatatatgtaacatgtacctaagttttaaaagcataataaaatgaacacatctgaaaaccaccattctgctcaagaaatataacattactca

SEQ ID NO: 466166 - DNA, 5214 bp, Homo sapiens
gtccccgcgcgcggcgtggatcgcggcccaagccgccattgttccgccgagggaggacagcggggcctggcgctggcgccgagacgccgcttagcggccgccactggagacactccctcccgcctcccgggtctcctggcggcggcggagtgaggctgacagcggggaacctgggagacccctccgccctccccgcggtggcagcggccgatccccggctccggcgcgagggacggccgcgatgcgctcggcctgaggttacccggcccggcccttcctcgcttccctcgactattccactgcgtctccgcgccccggcgtcatcctgcgagtccctctgacgggagggaagatggctgcacggagctggcaggacgagctggcccagcaggccgaggagggctcggcccggctgcgggaaatgctctcggtcggcctaggctttctgcgcaccgagctgggcctcgacctggggctggagccgaaacggtaccccggctgggtgatcctggtgggcactggcgcgctcgggctgctgctgctgtttctgctgggctacggctgggccgcggcttgcgccggcgcccgcaaaaagcggaggagcccgccccgcaagcgggaggaggcggcggccgtgccggccgcggccccgacgacctggccttgctgaagaatctccggagcgaggaacagaagaagaagaaccggaagaaactgtccgagaagcccaaaccaaatgggcggactgttgaagtggctgagggtgaagctgttcgaacacctcaaagtgtaacagcaaagcagccaccagagattgacaagaaaaatgaaaagtcaaagaaaaataagaagaaatcaaagtcagatgctaaagcagtgcaaaacagttcacgccatgatggaaaggaagttgatgaaggagcctgggaaactaaaattagtcacagagagaaacgacagcagcgtaaacgtgataaggtgctgactgattctggttcattggattcaactatccctgggatagaaaataccatcacagttaccaccgagcaacttacaaccgcatcatttcctgttggttccaagaagaataaaggtgattctcatctaaatgttcaagttagcaactttaaatctggaaaaggagattctacacttcaggtttcttcaggattgaatgaaaacctcactgtcaatggaggaggctggaatgaaaagtctgtaaaactctcctcacagatcagtgcaggtgaggagaagtggaactccgtttcacctgcttctgcaggaaagaggaaaactgagccatctgcctggagtcaagacactggagatgctaatacaaatggaaaagactggggaaggagttggagtgaccgttcaatattttctggcattgggtctactgctgagccagtttctcagtctaccacttctgattatcagtgggatgttagccgtaatcaaccctatatcgatgatgaatggtctgggttaaatggtctgtcttctgctgatcccaactctgattggaatgcaccagcagaagagtggggcaattgggtagacgaagaaagagcttcacttctaaagtcccaggaaccaattcctgatgatcaaaaggtctcagatgatgataaagaaaagggagagggagctcttccaactgggaaatccaaaaagaaaaaaaagaaaaagaagaagcaaggtgaagataactctactgcacaggacacagaagaattagaaaaagagattagagaagaccttccagtgaatacctctaaaacccgtccaaaacaggaaaaagctttttccttgaagaccataagcactagtgatccagccgaagtactcgtcaaaaatagccagcctatcaagactcttccacctgctacttctaccgagccatctgtaatcttatcaaaaagtgattctgacaagagctcttcccaagtgccgccaatactacaagagacagataaatccaagtcaaataccaagcaaaatagtgtgcctccttcacagaccaagtctgaaactagctgggaatctcccaaacaaataaaaaagaagaaaaaagccagacgagaaacgtgaaattttttttcctgaattggacatgtgtttgcaaacacttgtcttgaagattatgctgtttatgcaataatttgtgaacatgtacagagttttatataaatttaaaccaatttttaaaacaaaactgcggacaccaccataaaaatggaatcaaaagaaagttaatttatgaaattaagaggtcagcagaatatactcagtgatggaagacacttgggaaagtctttttaatagaacaagaacgatcttaatttaagaatattatcctggtttaacaacagtgccctgtttacaacagattgtgccctatctcatctgcagccgaggaataaaggattctgattagaaagagggttgcctacagattagtaagcaattccttggatcttatgcacagaacttgtaccatttgaatctgttttatgcttaaatcaaagtgctttgatcaaatgcataacctgccatatctttacatatttgttggtagcaatttgtattaaagaaatcacaagtgcaaataaaaagtcatttatcatttgtttaactaaactgtcatggtttagtttacaatttttaaaaagttcttaaaatactgaaaatgcagttgacacttgtgtatggcttatgaagttatttttgatagtcttacattacttgaattgttcaaagtacagtatattttaaattaagaaaagtgaactatatgtatttgttttatacatttaaggcttagactcataaataatgctattgtttatgatttgaaaactttcaggcaaaatccaatttacatttttcccttccctagcaattacttttttccagcttcaactcttcttagttactaatactttgttgactttaaaaatgaaatcattcacaaacttttggtatatgatggagaatgaaaaactagagtcagacagctttaattgacattgtcaacacctccagttatcaggaatacatttttttactgccttaacctgtagtgcgtagaatatgcatcaatttcttgaaggagattcatgtttttataagaattttcatgtaattattgcaattgtggtcaaataaggaacgtttcctgcttgaaattatattgatttaaatgatgtgtgagatgtttcaccattttcaggcactgtgtaattctattgtaataaactggcaggtatctttgtaactataaatagtgcatgctcagccatgtacactgtaaatagcctttaccaaacgtgtttgacaaggaccataattaacatcacttagtgaattgtgataaagaaaaaaaagccatgatttattcgatgtgattggcttgtttttatgtggcgccaagaacgaacctgtttaacagctgtaaccaatggtactgatctatccatccaatgttgtcattatatttgactgtggttcaacagtattgcgttgtcagactaggaaagctaaacgaacaaaatggttttagttttgctgaagactggccttattaatggacagctttcctaacaagagattattaacttttatcaggtgttaacatctgtttcaggaacatggcagtatgtttacatgtcagaagttttgtttaattctatggtatttctaaattgacttgtttaaataaattcagcaaatggatagcattgttttttatttgcttcaatatgggggtagataatagctaaagagccaaggatgaatttcttcaaatgactttattctgttagctttacataggtgttggaggattcctaaggtgtcagcattttgtaaaggtaccacaaaggagaagttgatagggaatctaattttagaatgtgccaaatggtctgtgctcaacaatataattgaactctctcaactctacctcaccatttctttatctcaaaattctgttggctttgtcaaacgttggattttatttctgcagcctagtatctccccattctaccacctatgccagatgttaaagacagcagatgttttgaggagaatggcattgtggagatgcagagatgcgttgctaagttgaggtggatccagtatagagatacctctatttcttctttatggctcaagagctaggacttggattcttggcctcccaaagtgctggtgttacaggtgtgagccaccacacctggccaacatgtggctttcagttcttacttgaagacagctgctctagctagaaacttcctatcggcatctgagccagctggtagagggcattacctcccccacccccaagaacacttcttggaagttacacacaatacataaacttcaatttcaaacagttgcttggtcccactagccatgaagctggatgggacgtaatattctatctgggttgtcatgggccaaattaacattttgagattctgttaggaagatgagaattggataatgggcacctctaacagtgtctgtcagagttgacatacattgtgtatctcctgcaccaaagcatttttgagatcaagtgttcttccagctgagcagaaatttggaaggctattcagtgctgcttagtgtagcagctaataatgttccaacttctatatgatagtttgctttttgttttttgtttttttctagagacagagtctcgttgcccaggctggtctccaattcctgggttcaagcaatcctcctgactcagcctcctaaatgctgggattacaggcatgaaccactgtgcccagtctatatataatagattttagaagaaatttctgccactcagtgactgctttaaattctagagacagaggctgagagaaacttagtagcctgcctgcgcatactgcaagtacagactatataacaagttgaaagagaatcaccctggtatataatattttaaaacatgaaaaaggcattactattgttctggtctaagtactctaacaggacgatgatttctaaccctagcatcatgacatgtatatagtgtgttgtaagacatttgccagctaatagttacagtactgaagcttgtgaatacgttaattgagaaaactttaagcaggttcaaagttatcccatgatagtggcacatatatacaagtcgagcggccgcgaattagtagtagtaggggccgc

SEQ ID NO: 466167 - DNA, 4181 bp, Homo sapiens
gtccccgcgcgcggcgtggatcgcggcccaagccgccattgttccgccgagggaggacagcggggcctggcgctggcgccgagacgccgcttagcggccgccactggagacactccctcccgcctcccgggtctcctggcggcggcggagtgaggctgacagcggggaacctgggagacccctccgccctccccgcggtggcagcggccgatccccggctccggcgcgagggacggccgcgatgcgctcggcctgaggttacccggcccggcccttcctcgcttccctcgactattccactgcgtctccgcgccccggcgtcatcctgcgagtccctctgacgggagggaagatggctgcacggagctggcaggacgagctggcccagcaggccgaggagggctcggcccggctgcgggaaatgctctcggtcggcctaggctttctgcgcaccgagctgggcctcgacctggggctggagccgaaacggtaccccggctgggtgatcctggtgggcactggcgcgctcgggctgctgctgctgtttctgctgggctacggctgggccgcggcttgcgccggcgcccgcaaaaagcggaggagcccgccccgcaagcgggaggaggcggcggccgtgccggccgcggccccgacgacctggccttgctgaagaatctccggagcgaggaacagaagaagaagaaccggaagaaactgtccgagaagcccaaaccaaatgggcggactgttgaagtggctgagggtgaagctgttcgaacacctcaaagtgtaacagcaaagcagccaccagagattgacaagaaaaatgaaaagtcaaagaaaaataagaagaaatcaaagtcagatgctaaagcagtgcaaaacagttcacgccatgatggaaaggaagttgatgaaggagcctgggaaactaaaattagtcacagagagaaacgacagcagcgtaaacgtgataaggtgctgactgattctggttcattggattcaactatccctgggatagaaaataccatcacagttaccaccgagcaacttacaaccgcatcatttcctgttggttccaagaagaataaaggtgattctcatctaaatgttcaagttagcaactttaaatctggaaaaggagattctacacttcaggtttcttcaggattgaatgaaaacctcactgtcaatggaggaggctggaatgaaaagtctgtaaaactctcctcacagatcagtgcaggtgaggagaagtggaactccgtttcacctgcttctgcaggaaagaggaaaactgagccatctgcctggagtcaagacactggagatgctaatacaaatggaaaagactggggaaggagttggagtgaccgttcaatattttctggcattgggtctactgctgagccagtttctcagtctaccacttctgattatcagtgggatgttagccgtaatcaaccctatatcgatgatgaatggtctgggttaaatggtctgtcttctgctgatcccaactctgattggaatgcaccagcagaagagtggggcaattgggtagacgaagaaagagcttcacttctaaagtcccaggaaccaattcctgatgatcaaaaggtctcagatgatgataaagaaaagggagagggagctcttccaactgggaaatccaaaaagaaaaaaaagaaaaagaagaagcaaggtgaagataactctactgcacaggacacagaagaattagaaaaagagattagagaagaccttccagtgaatacctctaaaacccgtccaaaacaggaaaaagctttttccttgaagaccataagcactagtgatccagccgaagtactcgtcaaaaatagccagcctatcaagactcttccacctgctacttctaccgagccatctgtaatcttatcaaaaagtgattctgacaagagctcttcccaagtgccgccaatactacaagagacagataaatccaagtcaaataccaagcaaaatagtgtgcctccttcacagaccaagtctgaaactagctgggaatctcccaaacaaataaaaaagaagaaaaaagccagacgagaaacgtgaaattttttttcctgaattggacatgtgtttgcaaacacttgtcttgaagattatgctgtttatgcaataatttgtgaacatgtacagagttttatataaatttaaaccaatttttaaaacaaaactgcggacaccaccataaaaatggaatcaaaagaaagttaatttatgaaattaagaggtcagcagaatatactcagtgatggaagacacttgggaaagtctttttaatagaacaagaacgatcttaatttaagaatattatcctggtttaacaacagtgccctgtttacaacagattgtgccctatctcatctgcagccgaggaataaaggattctgattagaaagagggttgcctacagattagtaagcaattccttggatcttatgcacagaacttgtaccatttgaatctgttttatgcttaaatcaaagtgctttgatcaaatgcataacctgccatatctttacatatttgttggtagcaatttgtattaaagaaatcacaagtgcaaataaaaagtcatttatcatttgtttaactaaactgtcatggtttagtttacaatttttaaaaagttcttaaaatactgaaaatgcagttgacacttgtgtatggcttatgaagttatttttgatagtcttacattacttgaattgttcaaagtacagtatattttaaattaagaaaagtgaactatatgtatttgttttatacatttaaggcttagactcataaataatgctattgtttatgatttgaaaactttcaggcaaaatccaatttacatttttcccttccctagcaattacttttttccagcttcaactcttcttagttactaatactttgttgactttaaaaatgaaatcattcacaaacttttggtatatgatggagaatgaaaaactagagtcagacagctttaattgacattgtcaacacctccagttatcaggaatacatttttttactgccttaacctgtagtgcgtagaatatgcatcaatttcttgaaggagattcatgtttttataagaattttcatgtaattattgcaattgtggtcaaataaggaacgtttcctgcttgaaattatattgatttaaatgatgtgtgagatgtttcaccattttcaggcactgtgtaattctattgtaataaactggcaggtatctttgtaactataaatagtgcatgctcagccatgtacactgtaaatagcctttaccaaacgtgtttgacaaggaccataattaacatcacttagtgaattgtgataaagaaaaaaaagccatgatttattcgatgtgattggcttgtttttatgtggcgccaagaacgaacctgtttaacagctgtaaccaatggtactgatctatccatccaatgttgtcattatatttgactgtggttcaacagtattgcgttgtcagactaggaaagctaaacgaacaaaatggttttagttttgctgaagactggccttattaatggacagctttcctaacaagagattattaacttttatcaggtgttaacatctgtttcaggaacatggcagtatgtttacatgtcagaagttttgtttaattctatggtatttctaaattgacttgtttaaataaattcagcaaatggaaaaaaaaaaaaaaaaaaaaaaaaaaaaaaaaaaaaaaaaaaaaaaaaaaaaaaaaaaaaaaaaaaaaaaaataatacatacaaacgaaaataaaagctaacttgaccaattcgccctatggtgaggggtattacaatttactggccgtcaatttacaacttgggtgctgggcaacccctggcgttccccaattttatggcctggcattatatccccctctcgccaggttcctttttttgccgaataggcccgtagggacggccttcccaacagttgccccgctctttatgccatgggtatttgaaggcccctctttttccccgcggccacatcccttctttttctaataaatggcccgaaatatgggtgagtggtcgctccgctcggaacatttgttcaaatttaaggaacgttttcttatcacacaggttattact

SEQ ID NO: 466168 - DNA, 5235 bp, Homo sapiens
cccgagaacgaacttacggtctaggtacgaggctgggtggtgaagccgccattgttccgccgagggaggacagcggggcctggcgctggcgccgagacgccgcttagcggccgccactggagacactccctcccgcctcccgggtctcctggcggcggcggagtgaggctgacagcggggaacctgggagacccctccgccctccccgcggtggcagcggccgatccccttcctcgcttccctcgactattccactgcgtctccgcgccccggcgtcatcctgcgagtccctctgacgggagggaagatggctgcacggagctggcaggacgagctggcccagcaggccgaggagggctcggcccggctgcgggaaatgctctcggtcggcctaggctttctgcgcaccgagctgggcctcgacctggggctggagccgaaacggtaccccggctgggtgatcctggtgggcactggcgcgctcgggctgctgctgctgtttctgctgggctacggctgggccgcggcttgcgccggcgcccgcaaaaagcggaggagcccgccccgcaagcgggaggaggcggcggccgtgccggccgcggccccgacgacctggccttgctgaagaatctccggagcgaggaacagaagaagaagaaccggaagaaactgtccgagaagcccaaaccaaatgggcggactgttgaagtggctgagggtgaagctgttcgaacacctcaaagtgtaacagcaaagcagccaccagagattgacaagaaaaatgaaaagtcaaagaaaaataagaagaaatcaaagtcagatgctaaagcagtgcaaaacagttcacgccatgatggaaaggaagttgatgaaggagcctgggaaactaaaattagtcacagagagaaacgacagcagcgtaaacgtgataaggtgctgactgattctggttcattggattcaactatccctgggatagaaaataccatcacagttaccaccgagcaacttacaaccgcatcatttcctgttggttccaagaagaataaaggtgattctcatctaaatgttcaagttagcaactttaaatctggaaaaggagattctacacttcaggtttcttcaggattgaatgaaaacctcactgtcaatggaggaggctggaatgaaaagtctgtaaaactctcctcacagatcagtgcaggtgaggagaagtggaactccgtttcacctgcttctgcaggaaagaggaaaactgagccatctgcctggagtcaagacactggagatgctaatacaaatggaaaagactggggaaggagttggagtgaccgttcaatattttctggcattgggtctactgctgagccagtttctcagtctaccacttctgattatcagtgggatgttagccgtaatcaaccctatatcgatgatgaatggtctgggttaaatggtctgtcttctgctgatcccaactctgattggaatgcaccagcagaagagtggggcaattgggtagacgaagaaagagcttcacttctaaagtcccaggaaccaattcctgatgatcaaaaggtctcagatgatgataaagaaaagggagagggagctcttccaactgggaaatccaaaaagaaaaaaaagaaaaagaagaagcaaggtgaagataactctactgcacaggacacagaagaattagaaaaagagattagagaagaccttccagtgaatacctctaaaacccgtccaaaacaggaaaaagctttttccttgaagaccataagcactagtgatccagccgaagtactcgtcaaaaatagccagcctatcaagactcttccacctgctacttctaccgagccatctgtaatcttatcaaaaagtgattctgacaagagctcttcccaagtgccgccaatactacaagagacagataaatccaagtcaaataccaagcaaaatagtgtgcctccttcacagaccaagtctgaaactagctgggaatctcccaaacaaataaaaaagaagaaaaaagccagacgagaaacgtgaaattttttttcctgaattggacatgtgtttgcaaacacttgtcttgaagattatgctgtttatgcaataatttgtgaacatgtacagagttttatataaatttaaaccaatttttaaaacaaaactgcggacaccaccataaaaatggaatcaaaagaaagttaatttatgaaattaagaggtcagcagaatatactcagtgatggaagacacttgggaaagtctttttaatagaacaagaacgatcttaatttaagaatattatcctggtttaacaacagtgccctgtttacaacagattgtgccctatctcatctgcagccgaggaataaaggattctgattagaaagagggttgcctacagattagtaagcaattccttggatcttatgcacagaacttgtaccatttgaatctgttttatgcttaaatcaaagtgctttgatcaaatgcataacctgccatatctttacatatttgttggtagcaatttgtattaaagaaatcacaagtgcaaataaaaagtcatttatcatttgtttaactaaactgtcatggtttagtttacaatttttaaaaagttcttaaaatactgaaaatgcagttgacacttgtgtatggcttatgaagttatttttgatagtcttacattacttgaattgttcaaagtacagtatattttaaattaagaaaagtgaactatatgtatttgttttatacatttaaggcttagactcataaataatgctattgtttatgatttgaaaactttcaggcaaaatccaatttacatttttcccttccctagcaattacttttttccagcttcaactcttcttagttactaatactttgttgactttaaaaatgaaatcattcacaaacttttggtatatgatggagaatgaaaaactagagtcagacagctttaattgacattgtcaacacctccagttatcaggaatacatttttttactgccttaacctgtagtgcgtagaatatgcatcaatttcttgaaggagattcatgtttttataagaattttcatgtaattattgcaattgtggtcaaataaggaacgtttcctgcttgaaattatattgatttaaatgatgtgtgagatgtttcaccattttcaggcactgtgtaattctattgtaataaactggcaggtatctttgtaactataaatagtgcatgctcagccatgtacactgtaaatagcctttaccaaacgtgtttgacaaggaccataattaacatcacttagtgaattgtgataaagaaaaaaaagccatgatttattcgatgtgattggcttgtttttatgtggcgccaagaacgaacctgtttaacagctgtaaccaatggtactgatctatccatccaatgttgtcattatatttgactgtggttcaacagtattgcgttgtcagactaggaaagctaaacgaacaaaatggttttagttttgctgaagactggccttattaatggacagctttcctaacaagagattattaacttttatcaggtgttaacatctgtttcaggaacatggcagtatgtttacatgtcagaagttttgtttaattctatggtatttctaaattgacttgtttaaataaattcagcaaatggatagcattgttttttatttgcttcaatatgggggtagataatagctaaagagccaaggatgaatttcttcaaatgactttattctgttagctttacataggtgttggaggattcctaaggtgtcagcattttgtaaaggtaccacaaaggagaagttgatagggaatctaattttagaatgtgccaaatggtctgtgctcaacaatataattgaactctctcaactctacctcaccatttctttatctcaaaattctgttggctttgtcaaacgttggattttatttctgcagcctagtatctccccattctaccacctatgccagatgttaaagacagcagatgttttgaggagaatggcattgtggagatgcagagatgcgttgctaagttgaggtggatccagtatagagatacctctatttcttctttatggctcaagagctaggacttggattcttggcctcccaaagtgctggtgttacaggtgtgagccaccacacctggccaacatgtggctttcagttcttacttgaagacagctgctctagctagaaacttcctatcggcatctgagccagctggtagagggcattacctcccccacccccaagaacacttcttggaagttacacacaatacataaacttcaatttcaaacagttgcttggtcccactagccatgaagctggatgggacgtaatattctatctgggttgtcatgggccaaattaacattttgagattctgttaggaagatgagaattggataatgggcacctctaacagtgtctgtcagagttgacatacattgtgtatctcctgcaccaaagcatttttgagatcaagtgttcttccagctgagcagaaatttggaaggctattcagtgctgcttagtgtagcagctaataatgttccaacttctatatgatagtttgctttttgttttttgtttttttctagagacagagtctcgttgcccaggctggtctccaattcctgggttcaagcaatcctcctgactcagcctcctaaatgctgggattacaggcatgaaccactgtgcccagtctatatataatagattttagaagaaatttctgccactcagtgactgctttaaattctagagacagaggctgagagaaacttagtagcctgcctgcgcatactgcaagtacagactatataacaagttgaaagagaatcaccctggtatataatattttaaaacatgaaaaaggcattactattgttctggtctaagtactctaacaggacgatgatttctaaccctagcatcatgacatgtatatagtgtgttgtaagacatttgccagctaatagttacagtactgaagcttgtgaatacgttaattgagaaaactttaagcaggttcaaagttatcccatgatagtggcattcttatttgtatatatgtgctttccttttttatttgtatcaaggcatttaaaatgaatatatgtaacatgtacctaagttttaaaagcataataaaatgaacacatctgaaa

SEQ ID NO: 466169 - DNA, 4197 bp, Homo sapiens
ctgtagatgacagtcggccatgtggaacctcactagaagtgcgcctgggtgcgctgagatgacagtcggccacttcaggtttcttcaggattgaatgaaaacctcactgtcaatggaggaggctggaatgaaaagtctgtaaaactctcctcacagatcagtgcaggtgaggagaagtggaactccgtttcacctgcttctgcaggaaagaggaaaactgagccatctgcctggagtcaagacactggagatgctaatacaaatggaaaagactggggaaggagttggagtgaccgttcaatattttctggcattgggtctactgctgagccagtttctcagtctaccacttctgattatcagtgggatgttagccgtaatcaaccctatatcgatgatgaatggtctgggttaaatggtctgtcttctgctgatcccaactctgattggaatgcaccagcagaagagtggggcaattgggtagacgaagaaagagcttcacttctaaagtcccaggaaccaattcctgatgatcaaaaggtctcagatgatgataaagaaaagggagagggagctcttccaactgggaaatccaaaaagaaaaaaaagaaaaagaagaagcaaggtgaagataactctactgcacaggacacagaagaattagaaaaagagattagagaagaccttccagtgaatacctctaaaacccgtccaaaacaggaaaaagctttttccttgaagaccataagcactagtgatccagccgaagtactcgtcaaaaatagccagcctatcaagactcttccacctgctacttctaccgagccatctgtaatcttatcaaaaagtgattctgacaagagctcttcccaagtgccgccaatactacaagagacagataaatccaagtcaaataccaagcaaaatagtgtgcctccttcacagaccaagtctgaaactagctgggaatctcccaaacaaataaaaaagaagaaaaaagccagacgagaaacgtgaaattttttttcctgaattggacatgtgtttgcaaacacttgtcttgaagattatgctgtttatgcaataatttgtgaacatgtacagagttttatataaatttaaaccaatttttaaaacaaaactgcggacaccaccataaaaatggaatcaaaagaaagttaatttatgaaattaagaggtcagcagaatatactcagtgatggaagacacttgggaaagtctttttaatagaacaagaacgatcttaatttaagaatattatcctggtttaacaacagtgccctgtttacaacagattgtgccctatctcatctgcagccgaggaataaaggattctgattagaaagagggttgcctacagattagtaagcaattccttggatcttatgcacagaacttgtaccatttgaatctgttttatgcttaaatcaaagtgctttgatcaaatgcataacctgccatatctttacatatttgttggtagcaatttgtattaaagaaatcacaagtgcaaataaaaagtcatttatcatttgtttaactaaactgtcatggtttagtttacaatttttaaaaagttcttaaaatactgaaaatgcagttgacacttgtgtatggcttatgaagttatttttgatagtcttacattacttgaattgttcaaagtacagtatattttaaattaagaaaagtgaactatatgtatttgttttatacatttaaggcttagactcataaataatgctattgtttatgatttgaaaactttcaggcaaaatccaatttacatttttcccttccctagcaattacttttttccagcttcaactcttcttagttactaatactttgttgactttaaaaatgaaatcattcacaaacttttggtatatgatggagaatgaaaaactagagtcagacagctttaattgacattgtcaacacctccagttatcaggaatacatttttttactgccttaacctgtagtgcgtagaatatgcatcaatttcttgaaggagattcatgtttttataagaattttcatgtaattattgcaattgtggtcaaataaggaacgtttcctgcttgaaattatattgatttaaatgatgtgtgagatgtttcaccattttcaggcactgtgtaattctattgtaataaactggcaggtatctttgtaactataaatagtgcatgctcagccatgtacactgtaaatagcctttaccaaacgtgtttgacaaggaccataattaacatcacttagtgaattgtgataaagaaaaaaaagccatgatttattcgatgtgattggcttgtttttatgtggcgccaagaacgaacctgtttaacagctgtaaccaatggtactgatctatccatccaatgttgtcattatatttgactgtggttcaacagtattgcgttgtcagactaggaaagctaaacgaacaaaatggttttagttttgctgaagactggccttattaatggacagctttcctaacaagagattattaacttttatcaggtgttaacatctgtttcaggaacatggcagtatgtttacatgtcagaagttttgtttaattctatggtatttctaaattgacttgtttaaataaattcagcaaatggatagcattgttttttatttgcttcaatatgggggtagataatagctaaagagccaaggatgaatttcttcaaatgactttattctgttagctttacataggtgttggaggattcctaaggtgtcagcattttgtaaaggtaccacaaaggagaagttgatagggaatctaattttagaatgtgccaaatggtctgtgctcaacaatataattgaactctctcaactctacctcaccatttctttatctcaaaattctgttggctttgtcaaacgttggattttatttctgcagcctagtatctccccattctaccacctatgccagatgttaaagacagcagatgttttgaggagaatggcattgtggagatgcagagatgcgttgctaagttgaggtggatccagtatagagatacctctatttcttctttatggctcaagagctaggacttggattcttggcctcccaaagtgctggtgttacaggtgtgagccaccacacctggccaacatgtggctttcagttcttacttgaagacagctgctctagctagaaacttcctatcggcatctgagccagctggtagagggcattacctcccccacccccaagaacacttcttggaagttacacacaatacataaacttcaatttcaaacagttgcttggtcccactagccatgaagctggatgggacgtaatattctatctgggttgtcatgggccaaattaacattttgagattctgttaggaagatgagaattggataatgggcacctctaacagtgtctgtcagagttgacatacattgtgtatctcctgcaccaaagcatttttgagatcaagtgttcttccagctgagcagaaatttggaaggctattcagtgctgcttagtgtagcagctaataatgttccaacttctatatgatagtttgctttttgttttttgtttttttctagagacagagtctcgttgcccaggctggtctccaattcctgggttcaagcaatcctcctgactcagcctcctaaatgctgggattacaggcatgaaccactgtgcccagtctatatataatagattttagaagaaatttctgccactcagtgactgctttaaattctagagacagaggctgagagaaacttagtagcctgcctgcgcatactgcaagtacagactatataacaagttgaaagagaatcaccctggtatataatattttaaaacatgaaaaaggcattactattgttctggtctaagtactctaacaggacgatgatttctaaccctagcatcatgacatgtatatagtgtgttgtaagacatttgccagctaatagttacagtactgaagcttgtgaatacgttaattgagaaaactttaagcaggttcaaagttatcccatgatagtggcattcttatttgtatatatgtgctttccttttttatttgtatcaaggcatttaaaatgaatatatgtaacatgtacctaagttttaaaagcataataaaatgaacacatctgaaa

SEQ ID NO: 466170 - DNA, 4430 bp, Homo sapiens
  misc_feature (276)..(276): n is a, c, g, or t
actctactgcacaggacacagaagaattagaaaaagagattagagaagaccttccagtgaatacctctaaaacccgtccaaaacaggaaaaagctttttccttgaagaccataagcactagtgatccagccgaagtactcgtcaaaaatagccagcctatcaagactcttccacctgctacttctaccgagccatctgtaatcttatcaaaaagtgattctgacaagagctcttcccaagtgccgccaatactacaagagacagataaatccaagncaaataccaagcaaaatagtgtgcctccttcacagatttcttcaggattgaatgaaaacctcactgtcaatggaggaggctggaatgaaaagtctgtaaaactctcctcacagatcagtgcaggtgaggagaagtggaactccgtttcacctgcttctgcaggaaagaggaaaactgagccatctgcctggagtcaagacactggagatgctaatacaaatggaaaagactggggaaggagttggagtgaccgttcaatattttctggcattgggtctactgctgagccagtttctcagtctaccacttctgattatcagtgggatgttagccgtaatcaaccctatatcgatgatgaatggtctgggttaaatggtctgtcttctgctgatcccaactctgattggaatgcaccagcagaagagtggggcaattgggtagacgaagaaagagcttcacttctaaagtcccaggaaccaattcctgatgatcaaaaggtctcagatgatgataaagaaaagggagagggagctcttccaactgggaaatccaaaaagaaaaaaaagaaaaagaagaagcaaggtgaagataactctactgcacaggacacagaagaattagaaaaagagattagagaagaccttccagtgaatacctctaaaacccgtccaaaacaggaaaaagctttttccttgaagaccataagcactagtgatccagccgaagtactcgtcaaaaatagccagcctatcaagactcttccacctgctacttctaccgagccatctgtaatcttatcaaaaagtgattctgacaagagctcttcccaagtgccgccaatactacaagagacagataaatccaagtcaaataccaagcaaaatagtgtgcctccttcacagaccaagtctgaaactagctgggaatctcccaaacaaataaaaaagaagaaaaaagccagacgagaaacgtgaaattttttttcctgaattggacatgtgtttgcaaacacttgtcttgaagattatgctgtttatgcaataatttgtgaacatgtacagagttttatataaatttaaaccaatttttaaaacaaaactgcggacaccaccataaaaatggaatcaaaagaaagttaatttatgaaattaagaggtcagcagaatatactcagtgatggaagacacttgggaaagtctttttaatagaacaagaacgatcttaatttaagaatattatcctggtttaacaacagtgccctgtttacaacagattgtgccctatctcatctgcagccgaggaataaaggattctgattagaaagagggttgcctacagattagtaagcaattccttggatcttatgcacagaacttgtaccatttgaatctgttttatgcttaaatcaaagtgctttgatcaaatgcataacctgccatatctttacatatttgttggtagcaatttgtattaaagaaatcacaagtgcaaataaaaagtcatttatcatttgtttaactaaactgtcatggtttagtttacaatttttaaaaagttcttaaaatactgaaaatgcagttgacacttgtgtatggcttatgaagttatttttgatagtcttacattacttgaattgttcaaagtacagtatattttaaattaagaaaagtgaactatatgtatttgttttatacatttaaggcttagactcataaataatgctattgtttatgatttgaaaactttcaggcaaaatccaatttacatttttcccttccctagcaattacttttttccagcttcaactcttcttagttactaatactttgttgactttaaaaatgaaatcattcacaaacttttggtatatgatggagaatgaaaaactagagtcagacagctttaattgacattgtcaacacctccagttatcaggaatacatttttttactgccttaacctgtagtgcgtagaatatgcatcaatttcttgaaggagattcatgtttttataagaattttcatgtaattattgcaattgtggtcaaataaggaacgtttcctgcttgaaattatattgatttaaatgatgtgtgagatgtttcaccattttcaggcactgtgtaattctattgtaataaactggcaggtatctttgtaactataaatagtgcatgctcagccatgtacactgtaaatagcctttaccaaacgtgtttgacaaggaccataattaacatcacttagtgaattgtgataaagaaaaaaaagccatgatttattcgatgtgattggcttgtttttatgtggcgccaagaacgaacctgtttaacagctgtaaccaatggtactgatctatccatccaatgttgtcattatatttgactgtggttcaacagtattgcgttgtcagactaggaaagctaaacgaacaaaatggttttagttttgctgaagactggccttattaatggacagctttcctaacaagagattattaacttttatcaggtgttaacatctgtttcaggaacatggcagtatgtttacatgtcagaagttttgtttaattctatggtatttctaaattgacttgtttaaataaattcagcaaatggatagcattgttttttatttgcttcaatatgggggtagataatagctaaagagccaaggatgaatttcttcaaatgactttattctgttagctttacataggtgttggaggattcctaaggtgtcagcattttgtaaaggtaccacaaaggagaagttgatagggaatctaattttagaatgtgccaaatggtctgtgctcaacaatataattgaactctctcaactctacctcaccatttctttatctcaaaattctgttggctttgtcaaacgttggattttatttctgcagcctagtatctccccattctaccacctatgccagatgttaaagacagcagatgttttgaggagaatggcattgtggagatgcagagatgcgttgctaagttgaggtggatccagtatagagatacctctatttcttctttatggctcaagagctaggacttggattcttggcctcccaaagtgctggtgttacaggtgtgagccaccacacctggccaacatgtggctttcagttcttacttgaagacagctgctctagctagaaacttcctatcggcatctgagccagctggtagagggcattacctcccccacccccaagaacacttcttggaagttacacacaatacataaacttcaatttcaaacagttgcttggtcccactagccatgaagctggatgggacgtaatattctatctgggttgtcatgggccaaattaacattttgagattctgttaggaagatgagaattggataatgggcacctctaacagtgtctgtcagagttgacatacattgtgtatctcctgcaccaaagcatttttgagatcaagtgttcttccagctgagcagaaatttggaaggctattcagtgctgcttagtgtagcagctaataatgttccaacttctatatgatagtttgctttttgttttttgtttttttctagagacagagtctcgttgcccaggctggtctccaattcctgggttcaagcaatcctcctgactcagcctcctaaatgctgggattacaggcatgaaccactgtgcccagtctatatataatagattttagaagaaatttctgccactcagtgactgctttaaattctagagacagaggctgagagaaacttagtagcctgcctgcgcatactgcaagtacagactatataacaagttgaaagagaatcaccctggtatataatattttaaaacatgaaaaaggcattactattgttctggtctaagtactctaacaggacgatgatttctaaccctagcatcatgacatgtatatagtgtgttgtaagacatttgccagctaatagttacagtactgaagcttgtgaatacgttaattgagaaaactttaagcaggttcaaagttatcccatgatagtggcattcttatttgtatatatgtgctttccttttttatttgtatcaaggcatttaaaatgaatatatgtaacatgtacctaagttttaaaagcataataaaatgaacacatctgaaa

SEQ ID NO: 466171 - DNA, 4034 bp, Homo sapiens
gagtggaatcaaatggctaataaattttctggaatttcttagaaattccatttaaccatatgatatgcttagcagaaattgaataaagattgttaccttcatgttatttttttttctggctcttaaaatgtgcttgggagacagaacaataacttaaaattacagcttagttgaacataaggaatttttagtttttgccttttaatttatggcaaaaatgatagacgcctaattcacactgttaaattttagatggtctgtcttctgctgatcccaactctgattggaatgcaccagcagaagagtggggcaattgggtagacgaagaaagagcttcacttctaaagtcccaggaaccaattcctgatgatcaaaaggtctcagatgatgataaagaaaagggagagggagctcttccaactgggaaatccaaaaagaaaaaaaagaaaaagaagaagcaaggtgaagataactctactgcacaggacacagaagaattagaaaaagagattagagaagaccttccagtgaatacctctaaaacccgtccaaaacaggaaaaagctttttccttgaagaccataagcactagtgatccagccgaagtactcgtcaaaaatagccagcctatcaagactcttccacctgctacttctaccgagccatctgtaatcttatcaaaaagtgattctgacaagagctcttcccaagtgccgccaatactacaagagacagataaatccaagtcaaataccaagcaaaatagtgtgcctccttcacagaccaagtctgaaactagctgggaatctcccaaacaaataaaaaagaagaaaaaagccagacgagaaacgtgaaattttttttcctgaattggacatgtgtttgcaaacacttgtcttgaagattatgctgtttatgcaataatttgtgaacatgtacagagttttatataaatttaaaccaatttttaaaacaaaactgcggacaccaccataaaaatggaatcaaaagaaagttaatttatgaaattaagaggtcagcagaatatactcagtgatggaagacacttgggaaagtctttttaatagaacaagaacgatcttaatttaagaatattatcctggtttaacaacagtgccctgtttacaacagattgtgccctatctcatctgcagccgaggaataaaggattctgattagaaagagggttgcctacagattagtaagcaattccttggatcttatgcacagaacttgtaccatttgaatctgttttatgcttaaatcaaagtgctttgatcaaatgcataacctgccatatctttacatatttgttggtagcaatttgtattaaagaaatcacaagtgcaaataaaaagtcatttatcatttgtttaactaaactgtcatggtttagtttacaatttttaaaaagttcttaaaatactgaaaatgcagttgacacttgtgtatggcttatgaagttatttttgatagtcttacattacttgaattgttcaaagtacagtatattttaaattaagaaaagtgaactatatgtatttgttttatacatttaaggcttagactcataaataatgctattgtttatgatttgaaaactttcaggcaaaatccaatttacatttttcccttccctagcaattacttttttccagcttcaactcttcttagttactaatactttgttgactttaaaaatgaaatcattcacaaacttttggtatatgatggagaatgaaaaactagagtcagacagctttaattgacattgtcaacacctccagttatcaggaatacatttttttactgccttaacctgtagtgcgtagaatatgcatcaatttcttgaaggagattcatgtttttataagaattttcatgtaattattgcaattgtggtcaaataaggaacgtttcctgcttgaaattatattgatttaaatgatgtgtgagatgtttcaccattttcaggcactgtgtaattctattgtaataaactggcaggtatctttgtaactataaatagtgcatgctcagccatgtacactgtaaatagcctttaccaaacgtgtttgacaaggaccataattaacatcacttagtgaattgtgataaagaaaaaaaagccatgatttattcgatgtgattggcttgtttttatgtggcgccaagaacgaacctgtttaacagctgtaaccaatggtactgatctatccatccaatgttgtcattatatttgactgtggttcaacagtattgcgttgtcagactaggaaagctaaacgaacaaaatggttttagttttgctgaagactggccttattaatggacagctttcctaacaagagattattaacttttatcaggtgttaacatctgtttcaggaacatggcagtatgtttacatgtcagaagttttgtttaattctatggtatttctaaattgacttgtttaaataaattcagcaaatggatagcattgttttttatttgcttcaatatgggggtagataatagctaaagagccaaggatgaatttcttcaaatgactttattctgttagctttacataggtgttggaggattcctaaggtgtcagcattttgtaaaggtaccacaaaggagaagttgatagggaatctaattttagaatgtgccaaatggtctgtgctcaacaatataattgaactctctcaactctacctcaccatttctttatctcaaaattctgttggctttgtcaaacgttggattttatttctgcagcctagtatctccccattctaccacctatgccagatgttaaagacagcagatgttttgaggagaatggcattgtggagatgcagagatgcgttgctaagttgaggtggatccagtatagagatacctctatttcttctttatggctcaagagctaggacttggattcttggcctcccaaagtgctggtgttacaggtgtgagccaccacacctggccaacatgtggctttcagttcttacttgaagacagctgctctagctagaaacttcctatcggcatctgagccagctggtagagggcattacctcccccacccccaagaacacttcttggaagttacacacaatacataaacttcaatttcaaacagttgcttggtcccactagccatgaagctggatgggacgtaatattctatctgggttgtcatgggccaaattaacattttgagattctgttaggaagatgagaattggataatgggcacctctaacagtgtctgtcagagttgacatacattgtgtatctcctgcaccaaagcatttttgagatcaagtgttcttccagctgagcagaaatttggaaggctattcagtgctgcttagtgtagcagctaataatgttccaacttctatatgatagtttgctttttgttttttgtttttttctagagacagagtctcgttgcccaggctggtctccaattcctgggttcaagcaatcctcctgactcagcctcctaaatgctgggattacaggcatgaaccactgtgcccagtctatatataatagattttagaagaaatttctgccactcagtgactgctttaaattctagagacagaggctgagagaaacttagtagcctgcctgcgcatactgcaagtacagactatataacaagttgaaagagaatcaccctggtatataatattttaaaacatgaaaaaggcattactattgttctggtctaagtactctaacaggacgatgatttctaaccctagcatcatgacatgtatatagtgtgttgtaagacatttgccagctaatagttacagtactgaagcttgtgaatacgttaattgagaaaactttaagcaggttcaaagttatcccatgatagtggcattcttatttgtatatatgtgctttccttttttatttgtatcaaggcatttaaaatgaatatatgtaacatgtacctaagttttaaaagcataataaaatgaacacatctgaaa

SEQ ID NO: 466172 - DNA, 3101 bp, Homo sapiens
gtccccgcgcgcggcgtggatcgcggcccaagccgccattgttccgccgagggaggacagcggggcctggcgctggcgccgagacgccgcttagcggccgccactggagacactccctcccgcctcccgggtctcctggcggcggcggagtgaggctgacagcggggaacctgggagacccctccgccctccccgcggtggcagcggccgatccccggctccggcgcgagggacggccgcgatgcgctcggcctgaggttacccggcccggcccttcctcgcttccctcgactattccactgcgtctccgcgccccggcgtcatcctgcgagtccctctgacgggagggaagatggctgcacggagctggcaggacgagctggcccagcaggccgaggagggctcggcccggctgcgggaaatgctctcggtcggcctaggctttctgcgcaccgagctgggcctcgacctggggctggagccgaaacggtaccccggctgggtgatcctggtgggcactggcgcgctcgggctgctgctgctgtttctgctgggctacggctgggccgcggcttgcgccggcgcccgcaaaaagcggaggagcccgccccgcaagcgggaggaggcggcggccgtgccggccgcggccccgacgacctggccttgctgaagaatctccggagcgaggaacagaagaagaagaaccggaagaaactgtccgagaagcccaaaccaaatgggcggactgttgaagtggctgagggtgaagctgttcgaacacctcaaagtgtaacagcaaagcagccaccagagattgacaagaaaaatgaaaagtcaaagaaaaataagaagaaatcaaagtcagatgctaaagcagtgcaaaacagttcacgccatgatggaaaggaagttgatgaaggagcctgggaaactaaaattagtcacagagagaaacgacagcagcgtaaacgtgataaggtgctgactgattctggttcattggattcaactatccctgggatagaaaataccatcacagttaccaccgagcaacttacaaccgcatcatttcctgttggttccaagaagaataaaggtgattctcatctaaatgttcaagttagcaactttaaatctggaaaaggagattctacacttcaggtttcttcaggattgaatgaaaacctcactgtcaatggaggaggctggaatgaaaagtctgtaaaactctcctcacagatcagtgcaggtgaggagaagtggaactccgtttcacctgcttctgcaggaaagaggaaaactgagccatctgcctggagtcaagacactggagatgctaatacaaatggaaaagactggggaaggagttggagtgaccgttcaatattttctggcattgggtctactgctgagccagtttctcagtctaccacttctgattatcagtgggatgttagccgtaatcaaccctatatcgatgatgaatggtctgggttaaatggtctgtcttctgctgatcccaactctgattggaatgcaccagcagaagagtggggcaattgggtagacgaagaaagagcttcacttctaaagtcccaggaaccaattcctgatgatcaaaaggtctcagatgatgataaagaaaagggagagggagctcttccaactgggaaatccaaaaagaaaaaaaagaaaaagaagaagcaaggtgaagataactctactgcacaggacacagaagaattagaaaaagagattagagaagaccttccagtgaatacctctaaaacccgtccaaaacaggaaaaagctttttccttgaagaccataagcactagtgatccagccgaagtactcgtcaaaaatagccagcctatcaagactcttccacctgctacttctaccgagccatctgtaatcttatcaaaaagtgattctgacaagagctcttcccaagtgccgccaatactacaagagacagataaatccaagtcaaataccaagcaaaatagtgtgcctccttcacagaccaagtctgaaactagctgggaatctcccaaacaaataaaaaagaagaaaaaagccagacgagaaacgtgaaattttttttcctgaattggacatgtgtttgcaaacacttgtcttgaagattatgctgtttatgcaataatttgtgaacatgtacagagttttatataaatttaaaccaatttttaaaacaaaactgcggacaccaccataaaaatggaatcaaaagaaagttaatttatgaaattaagaggtcagcagaatatactcagtgatggaagacacttgggaaagtctttttaatagaacaagaacgatcttaatttaagaatattatcctggtttaacaacagtgccctgtttacaacagattgtgccctatctcatctgcagccgaggaataaaggattctgattagaaagagggttgcctacagattagtaagcaattccttggatcttatgcacagaacttgtaccatttgaatctgttttatgcttaaatcaaagtgctttgatcaaatgcataacctgccatatctttacatatttgttggtagcaatttgtattaaagaaatcacaagtgcaaataaaaagtcatttatcatttgtttaactaaactgtcatggtttagtttacaatttttaaaaagttcttaaaatactgaaaatgcagttgacacttgtgtatggcttatgaagttatttttgatagtcttacattacttgaattgttcaaagtacagtatattttaaattaagaaaagtgaactatatgtatttgttttatacatttaaggcttagactcataaataatgctattgtttatgatttgaaaactttcaggcaaaatccaatttacatttttcccttccctagcaattacttttttccagcttcaactcttcttagttactaatactttgttgactttaaaaatgaaatcattcacaaacttttggtatatgatggagaatgaaaaactagaggctgctacacactgccatacagtcaaccatcatacttcatatttgcatactcgatagcagcctatttctactgaacctgtcac

SEQ ID NO: 466173 - DNA, 3788 bp, Homo sapiens
  misc_feature (86)..(86): n is a, c, g, or t
ccctctttctaccacgaggacacaatgagaagtcagcagttctgcaacccagatcagggtcctcaccagcacctgaccatgaggcnaccccgaccttggacttccagcctccagaactgtgagaaacaaatttctgttgtttatcagccacatactctatggaaattttttatagagagagttttctcaagaaaaaaaagaaaaagaagaagcaaggtgaagataactctactgcacaggacacagaagaattagaaaaagagattagagaagaccttccagtgaatacctctaaaacccgtccaaaacaggaaaaagctttttccttgaagaccataagcactagtgatccagccgaagtactcgtcaaaaatagccagcctatcaagactcttccacctgctacttctaccgagccatctgtaatcttatcaaaaagtgattctgacaagagctcttcccaagtgccgccaatactacaagagacagataaatccaagtcaaataccaagcaaaatagtgtgcctccttcacagaccaagtctgaaactagctgggaatctcccaaacaaataaaaaagaagaaaaaagccagacgagaaacgtgaaattttttttcctgaattggacatgtgtttgcaaacacttgtcttgaagattatgctgtttatgcaataatttgtgaacatgtacagagttttatataaatttaaaccaatttttaaaacaaaactgcggacaccaccataaaaatggaatcaaaagaaagttaatttatgaaattaagaggtcagcagaatatactcagtgatggaagacacttgggaaagtctttttaatagaacaagaacgatcttaatttaagaatattatcctggtttaacaacagtgccctgtttacaacagattgtgccctatctcatctgcagccgaggaataaaggattctgattagaaagagggttgcctacagattagtaagcaattccttggatcttatgcacagaacttgtaccatttgaatctgttttatgcttaaatcaaagtgctttgatcaaatgcataacctgccatatctttacatatttgttggtagcaatttgtattaaagaaatcacaagtgcaaataaaaagtcatttatcatttgtttaactaaactgtcatggtttagtttacaatttttaaaaagttcttaaaatactgaaaatgcagttgacacttgtgtatggcttatgaagttatttttgatagtcttacattacttgaattgttcaaagtacagtatattttaaattaagaaaagtgaactatatgtatttgttttatacatttaaggcttagactcataaataatgctattgtttatgatttgaaaactttcaggcaaaatccaatttacatttttcccttccctagcaattacttttttccagcttcaactcttcttagttactaatactttgttgactttaaaaatgaaatcattcacaaacttttggtatatgatggagaatgaaaaactagagtcagacagctttaattgacattgtcaacacctccagttatcaggaatacatttttttactgccttaacctgtagtgcgtagaatatgcatcaatttcttgaaggagattcatgtttttataagaattttcatgtaattattgcaattgtggtcaaataaggaacgtttcctgcttgaaattatattgatttaaatgatgtgtgagatgtttcaccattttcaggcactgtgtaattctattgtaataaactggcaggtatctttgtaactataaatagtgcatgctcagccatgtacactgtaaatagcctttaccaaacgtgtttgacaaggaccataattaacatcacttagtgaattgtgataaagaaaaaaaagccatgatttattcgatgtgattggcttgtttttatgtggcgccaagaacgaacctgtttaacagctgtaaccaatggtactgatctatccatccaatgttgtcattatatttgactgtggttcaacagtattgcgttgtcagactaggaaagctaaacgaacaaaatggttttagttttgctgaagactggccttattaatggacagctttcctaacaagagattattaacttttatcaggtgttaacatctgtttcaggaacatggcagtatgtttacatgtcagaagttttgtttaattctatggtatttctaaattgacttgtttaaataaattcagcaaatggatagcattgttttttatttgcttcaatatgggggtagataatagctaaagagccaaggatgaatttcttcaaatgactttattctgttagctttacataggtgttggaggattcctaaggtgtcagcattttgtaaaggtaccacaaaggagaagttgatagggaatctaattttagaatgtgccaaatggtctgtgctcaacaatataattgaactctctcaactctacctcaccatttctttatctcaaaattctgttggctttgtcaaacgttggattttatttctgcagcctagtatctccccattctaccacctatgccagatgttaaagacagcagatgttttgaggagaatggcattgtggagatgcagagatgcgttgctaagttgaggtggatccagtatagagatacctctatttcttctttatggctcaagagctaggacttggattcttggcctcccaaagtgctggtgttacaggtgtgagccaccacacctggccaacatgtggctttcagttcttacttgaagacagctgctctagctagaaacttcctatcggcatctgagccagctggtagagggcattacctcccccacccccaagaacacttcttggaagttacacacaatacataaacttcaatttcaaacagttgcttggtcccactagccatgaagctggatgggacgtaatattctatctgggttgtcatgggccaaattaacattttgagattctgttaggaagatgagaattggataatgggcacctctaacagtgtctgtcagagttgacatacattgtgtatctcctgcaccaaagcatttttgagatcaagtgttcttccagctgagcagaaatttggaaggctattcagtgctgcttagtgtagcagctaataatgttccaacttctatatgatagtttgctttttgttttttgtttttttctagagacagagtctcgttgcccaggctggtctccaattcctgggttcaagcaatcctcctgactcagcctcctaaatgctgggattacaggcatgaaccactgtgcccagtctatatataatagattttagaagaaatttctgccactcagtgactgctttaaattctagagacagaggctgagagaaacttagtagcctgcctgcgcatactgcaagtacagactatataacaagttgaaagagaatcaccctggtatataatattttaaaacatgaaaaaggcattactattgttctggtctaagtactctaacaggacgatgatttctaaccctagcatcatgacatgtatatagtgtgttgtaagacatttgccagctaatagttacagtactgaagcttgtgaatacgttaattgagaaaactttaagcaggttcaaagttatcccatgatagtggcattcttatttgtatatatgtgctttccttttttatttgtatcaaggcatttaaaatgaatatatgtaacatgtacctaagttttaaaagcataataaaatgaacacatctgaaa

SEQ ID NO: 466174 - DNA, 3763 bp, Homo sapiens
  misc_feature (140)..(140): n is a, c, g, or t
aaccagtgttagcttgcctctgggtgggtgagcttgaagtcctctgggacagagacctgtctccacgcctccgggagctgtgtccctgagccccctagtcctggctcctgctttttccccacagcccgtgttcccagccngaaccagcactctcccggaagcctggggtccctccacaccttggcttttatgaccctgatggcttctgaaacaggacacagaagaattagaaaaagagattagagaagaccttccagtgaatacctctaaaacccgtccaaaacaggaaaaagctttttccttgaagaccataagcactagtgatccagccgaagtactcgtcaaaaatagccagcctatcaagactcttccacctgctacttctaccgagccatctgtaatcttatcaaaaagtgattctgacaagagctcttcccaagtgccgccaatactacaagagacagataaatccaagtcaaataccaagcaaaatagtgtgcctccttcacagaccaagtctgaaactagctgggaatctcccaaacaaataaaaaagaagaaaaaagccagacgagaaacgtgaaattttttttcctgaattggacatgtgtttgcaaacacttgtcttgaagattatgctgtttatgcaataatttgtgaacatgtacagagttttatataaatttaaaccaatttttaaaacaaaactgcggacaccaccataaaaatggaatcaaaagaaagttaatttatgaaattaagaggtcagcagaatatactcagtgatggaagacacttgggaaagtctttttaatagaacaagaacgatcttaatttaagaatattatcctggtttaacaacagtgccctgtttacaacagattgtgccctatctcatctgcagccgaggaataaaggattctgattagaaagagggttgcctacagattagtaagcaattccttggatcttatgcacagaacttgtaccatttgaatctgttttatgcttaaatcaaagtgctttgatcaaatgcataacctgccatatctttacatatttgttggtagcaatttgtattaaagaaatcacaagtgcaaataaaaagtcatttatcatttgtttaactaaactgtcatggtttagtttacaatttttaaaaagttcttaaaatactgaaaatgcagttgacacttgtgtatggcttatgaagttatttttgatagtcttacattacttgaattgttcaaagtacagtatattttaaattaagaaaagtgaactatatgtatttgttttatacatttaaggcttagactcataaataatgctattgtttatgatttgaaaactttcaggcaaaatccaatttacatttttcccttccctagcaattacttttttccagcttcaactcttcttagttactaatactttgttgactttaaaaatgaaatcattcacaaacttttggtatatgatggagaatgaaaaactagagtcagacagctttaattgacattgtcaacacctccagttatcaggaatacatttttttactgccttaacctgtagtgcgtagaatatgcatcaatttcttgaaggagattcatgtttttataagaattttcatgtaattattgcaattgtggtcaaataaggaacgtttcctgcttgaaattatattgatttaaatgatgtgtgagatgtttcaccattttcaggcactgtgtaattctattgtaataaactggcaggtatctttgtaactataaatagtgcatgctcagccatgtacactgtaaatagcctttaccaaacgtgtttgacaaggaccataattaacatcacttagtgaattgtgataaagaaaaaaaagccatgatttattcgatgtgattggcttgtttttatgtggcgccaagaacgaacctgtttaacagctgtaaccaatggtactgatctatccatccaatgttgtcattatatttgactgtggttcaacagtattgcgttgtcagactaggaaagctaaacgaacaaaatggttttagttttgctgaagactggccttattaatggacagctttcctaacaagagattattaacttttatcaggtgttaacatctgtttcaggaacatggcagtatgtttacatgtcagaagttttgtttaattctatggtatttctaaattgacttgtttaaataaattcagcaaatggatagcattgttttttatttgcttcaatatgggggtagataatagctaaagagccaaggatgaatttcttcaaatgactttattctgttagctttacataggtgttggaggattcctaaggtgtcagcattttgtaaaggtaccacaaaggagaagttgatagggaatctaattttagaatgtgccaaatggtctgtgctcaacaatataattgaactctctcaactctacctcaccatttctttatctcaaaattctgttggctttgtcaaacgttggattttatttctgcagcctagtatctccccattctaccacctatgccagatgttaaagacagcagatgttttgaggagaatggcattgtggagatgcagagatgcgttgctaagttgaggtggatccagtatagagatacctctatttcttctttatggctcaagagctaggacttggattcttggcctcccaaagtgctggtgttacaggtgtgagccaccacacctggccaacatgtggctttcagttcttacttgaagacagctgctctagctagaaacttcctatcggcatctgagccagctggtagagggcattacctcccccacccccaagaacacttcttggaagttacacacaatacataaacttcaatttcaaacagttgcttggtcccactagccatgaagctggatgggacgtaatattctatctgggttgtcatgggccaaattaacattttgagattctgttaggaagatgagaattggataatgggcacctctaacagtgtctgtcagagttgacatacattgtgtatctcctgcaccaaagcatttttgagatcaagtgttcttccagctgagcagaaatttggaaggctattcagtgctgcttagtgtagcagctaataatgttccaacttctatatgatagtttgctttttgttttttgtttttttctagagacagagtctcgttgcccaggctggtctccaattcctgggttcaagcaatcctcctgactcagcctcctaaatgctgggattacaggcatgaaccactgtgcccagtctatatataatagattttagaagaaatttctgccactcagtgactgctttaaattctagagacagaggctgagagaaacttagtagcctgcctgcgcatactgcaagtacagactatataacaagttgaaagagaatcaccctggtatataatattttaaaacatgaaaaaggcattactattgttctggtctaagtactctaacaggacgatgatttctaaccctagcatcatgacatgtatatagtgtgttgtaagacatttgccagctaatagttacagtactgaagcttgtgaatacgttaattgagaaaactttaagcaggttcaaagttatcccatgatagtggcattcttatttgtatatatgtgctttccttttttatttgtatcaaggcatttaaaatgaatatatgtaacatgtacctaagttttaaaagcataataaaatgaacacatctgaaa

SEQ ID NO: 466175 - DNA, 3357 bp, Homo sapiens
  misc_feature (70)..(70): n is a, c, g, or t
aatacgcactgactttccacgaaagaaactttgggccttcccatctgactcttcaagagacttgccaagncaaataccaagcaaaatagtgtgcctccttcacagaccaagtctgaaactagctgggaatctcccaaacaaataaaaaagaagaaaaaagccagacgagaaacgtgaaattttttttcctgaattggacatgtgtttgcaaacacttgtcttgaagattatgctgtttatgcaataatttgtgaacatgtacagagttttatataaatttaaaccaatttttaaaacaaaactgcggacaccaccataaaaatggaatcaaaagaaagttaatttatgaaattaagaggtcagcagaatatactcagtgatggaagacacttgggaaagtctttttaatagaacaagaacgatcttaatttaagaatattatcctggtttaacaacagtgccctgtttacaacagattgtgccctatctcatctgcagccgaggaataaaggattctgattagaaagagggttgcctacagattagtaagcaattccttggatcttatgcacagaacttgtaccatttgaatctgttttatgcttaaatcaaagtgctttgatcaaatgcataacctgccatatctttacatatttgttggtagcaatttgtattaaagaaatcacaagtgcaaataaaaagtcatttatcatttgtttaactaaactgtcatggtttagtttacaatttttaaaaagttcttaaaatactgaaaatgcagttgacacttgtgtatggcttatgaagttatttttgatagtcttacattacttgaattgttcaaagtacagtatattttaaattaagaaaagtgaactatatgtatttgttttatacatttaaggcttagactcataaataatgctattgtttatgatttgaaaactttcaggcaaaatccaatttacatttttcccttccctagcaattacttttttccagcttcaactcttcttagttactaatactttgttgactttaaaaatgaaatcattcacaaacttttggtatatgatggagaatgaaaaactagagtcagacagctttaattgacattgtcaacacctccagttatcaggaatacatttttttactgccttaacctgtagtgcgtagaatatgcatcaatttcttgaaggagattcatgtttttataagaattttcatgtaattattgcaattgtggtcaaataaggaacgtttcctgcttgaaattatattgatttaaatgatgtgtgagatgtttcaccattttcaggcactgtgtaattctattgtaataaactggcaggtatctttgtaactataaatagtgcatgctcagccatgtacactgtaaatagcctttaccaaacgtgtttgacaaggaccataattaacatcacttagtgaattgtgataaagaaaaaaaagccatgatttattcgatgtgattggcttgtttttatgtggcgccaagaacgaacctgtttaacagctgtaaccaatggtactgatctatccatccaatgttgtcattatatttgactgtggttcaacagtattgcgttgtcagactaggaaagctaaacgaacaaaatggttttagttttgctgaagactggccttattaatggacagctttcctaacaagagattattaacttttatcaggtgttaacatctgtttcaggaacatggcagtatgtttacatgtcagaagttttgtttaattctatggtatttctaaattgacttgtttaaataaattcagcaaatggatagcattgttttttatttgcttcaatatgggggtagataatagctaaagagccaaggatgaatttcttcaaatgactttattctgttagctttacataggtgttggaggattcctaaggtgtcagcattttgtaaaggtaccacaaaggagaagttgatagggaatctaattttagaatgtgccaaatggtctgtgctcaacaatataattgaactctctcaactctacctcaccatttctttatctcaaaattctgttggctttgtcaaacgttggattttatttctgcagcctagtatctccccattctaccacctatgccagatgttaaagacagcagatgttttgaggagaatggcattgtggagatgcagagatgcgttgctaagttgaggtggatccagtatagagatacctctatttcttctttatggctcaagagctaggacttggattcttggcctcccaaagtgctggtgttacaggtgtgagccaccacacctggccaacatgtggctttcagttcttacttgaagacagctgctctagctagaaacttcctatcggcatctgagccagctggtagagggcattacctcccccacccccaagaacacttcttggaagttacacacaatacataaacttcaatttcaaacagttgcttggtcccactagccatgaagctggatgggacgtaatattctatctgggttgtcatgggccaaattaacattttgagattctgttaggaagatgagaattggataatgggcacctctaacagtgtctgtcagagttgacatacattgtgtatctcctgcaccaaagcatttttgagatcaagtgttcttccagctgagcagaaatttggaaggctattcagtgctgcttagtgtagcagctaataatgttccaacttctatatgatagtttgctttttgttttttgtttttttctagagacagagtctcgttgcccaggctggtctccaattcctgggttcaagcaatcctcctgactcagcctcctaaatgctgggattacaggcatgaaccactgtgcccagtctatatataatagattttagaagaaatttctgccactcagtgactgctttaaattctagagacagaggctgagagaaacttagtagcctgcctgcgcatactgcaagtacagactatataacaagttgaaagagaatcaccctggtatataatattttaaaacatgaaaaaggcattactattgttctggtctaagtactctaacaggacgatgatttctaaccctagcatcatgacatgtatatagtgtgttgtaagacatttgccagctaatagttacagtactgaagcttgtgaatacgttaattgagaaaactttaagcaggttcaaagttatcccatgatagtggcattcttatttgtatatatgtgctttccttttttatttgtatcaaggcatttaaaatgaatatatgtaacatgtacctaagttttaaaagcataataaaatgaacacatctgaaa

SEQ ID NO: 466176 - DNA, 3099 bp, Homo sapiens
cgagcggccgccgggcaggtgtttaacaatttttaaaacaaaactgcggacaccaccataaaaatggaatcaaaagaaagttaatttatgaaattaagaggtcagcagaatatactcagtgatggaagacacttgggaaagtctttttaatagaacaagaacgatcttaatttaagaatattatcctggtttaacaacagtgccctgtttacaacagattgtgccctatctcatctgcagccgaggaataaaggattctgattagaaagagggttgcctacagattagtaagcaattccttggatcttatgcacagaacttgtaccatttgaatctgttttatgcttaaatcaaagtgctttgatcaaatgcataacctgccatatctttacatatttgttggtagcaatttgtattaaagaaatcacaagtgcaaataaaaagtcatttatcatttgtttaactaaactgtcatggtttagtttacaatttttaaaaagttcttaaaatactgaaaatgcagttgacacttgtgtatggcttatgaagttatttttgatagtcttacattacttgaattgttcaaagtacagtatattttaaattaagaaaagtgaactatatgtatttgttttatacatttaaggcttagactcataaataatgctattgtttatgatttgaaaactttcaggcaaaatccaatttacatttttcccttccctagcaattacttttttccagcttcaactcttcttagttactaatactttgttgactttaaaaatgaaatcattcacaaacttttggtatatgatggagaatgaaaaactagagtcagacagctttaattgacattgtcaacacctccagttatcaggaatacatttttttactgccttaacctgtagtgcgtagaatatgcatcaatttcttgaaggagattcatgtttttataagaattttcatgtaattattgcaattgtggtcaaataaggaacgtttcctgcttgaaattatattgatttaaatgatgtgtgagatgtttcaccattttcaggcactgtgtaattctattgtaataaactggcaggtatctttgtaactataaatagtgcatgctcagccatgtacactgtaaatagcctttaccaaacgtgtttgacaaggaccataattaacatcacttagtgaattgtgataaagaaaaaaaagccatgatttattcgatgtgattggcttgtttttatgtggcgccaagaacgaacctgtttaacagctgtaaccaatggtactgatctatccatccaatgttgtcattatatttgactgtggttcaacagtattgcgttgtcagactaggaaagctaaacgaacaaaatggttttagttttgctgaagactggccttattaatggacagctttcctaacaagagattattaacttttatcaggtgttaacatctgtttcaggaacatggcagtatgtttacatgtcagaagttttgtttaattctatggtatttctaaattgacttgtttaaataaattcagcaaatggatagcattgttttttatttgcttcaatatgggggtagataatagctaaagagccaaggatgaatttcttcaaatgactttattctgttagctttacataggtgttggaggattcctaaggtgtcagcattttgtaaaggtaccacaaaggagaagttgatagggaatctaattttagaatgtgccaaatggtctgtgctcaacaatataattgaactctctcaactctacctcaccatttctttatctcaaaattctgttggctttgtcaaacgttggattttatttctgcagcctagtatctccccattctaccacctatgccagatgttaaagacagcagatgttttgaggagaatggcattgtggagatgcagagatgcgttgctaagttgaggtggatccagtatagagatacctctatttcttctttatggctcaagagctaggacttggattcttggcctcccaaagtgctggtgttacaggtgtgagccaccacacctggccaacatgtggctttcagttcttacttgaagacagctgctctagctagaaacttcctatcggcatctgagccagctggtagagggcattacctcccccacccccaagaacacttcttggaagttacacacaatacataaacttcaatttcaaacagttgcttggtcccactagccatgaagctggatgggacgtaatattctatctgggttgtcatgggccaaattaacattttgagattctgttaggaagatgagaattggataatgggcacctctaacagtgtctgtcagagttgacatacattgtgtatctcctgcaccaaagcatttttgagatcaagtgttcttccagctgagcagaaatttggaaggctattcagtgctgcttagtgtagcagctaataatgttccaacttctatatgatagtttgctttttgttttttgtttttttctagagacagagtctcgttgcccaggctggtctccaattcctgggttcaagcaatcctcctgactcagcctcctaaatgctgggattacaggcatgaaccactgtgcccagtctatatataatagattttagaagaaatttctgccactcagtgactgctttaaattctagagacagaggctgagagaaacttagtagcctgcctgcgcatactgcaagtacagactatataacaagttgaaagagaatcaccctggtatataatattttaaaacatgaaaaaggcattactattgttctggtctaagtactctaacaggacgatgatttctaaccctagcatcatgacatgtatatagtgtgttgtaagacatttgccagctaatagttacagtactgaagcttgtgaatacgttaattgagaaaactttaagcaggttcaaagttatcccatgatagtggcattcttatttgtatatatgtgctttccttttttatttgtatcaaggcatttaaaatgaatatatgtaacatgtacctaagttttaaaagcataataaaatgaacacatctgaaa

SEQ ID NO: 466177 - DNA, 1885 bp, Homo sapiens
gtccccgcgcgcggcgtggatcgcggcccaagccgccattgttccgccgagggaggacagcggggcctggcgctggcgccgagacgccgcttagcggccgccactggagacactccctcccgcctcccgggtctcctggcggcggcggagtgaggctgacagcggggaacctgggagacccctccgccctccccgcggtggcagcggccgatccccggctccggcgcgagggacggccgcgatgcgctcggcctgaggttacccggcccggcccttcctcgcttccctcgactattccactgcgtctccgcgccccggcgtcatcctgcgagtccctctgacgggagggaagatggctgcacggagctggcaggacgagctggcccagcaggccgaggagggctcggcccggctgcgggaaatgctctcggtcggcctaggctttctgcgcaccgagctgggcctcgacctggggctggagccgaaacggtaccccggctgggtgatcctggtgggcactggcgcgctcgggctgctgctgctgtttctgctgggctacggctgggccgcggcttgcgccggcgcccgcaaaaagcggaggagcccgccccgcaagcgggaggaggcggcggccgtgccggccgcggccccgacgacctggccttgctgaagaatctccggagcgaggaacagaagaagaagaaccggaagaaactgtccgagaagcccaaaccaaatgggcggactgttgaagtggctgagggtgaagctgttcgaacacctcaaagtgtaacagcaaagcagccaccagagattgacaagaaaaatgaaaagtcaaagaaaaataagaagaaatcaaagtcagatgctaaagcagtgcaaaacagttcacgccatgatggaaaggaagttgatgaaggagcctgggaaactaaaattagtcacagagagaaacgacagcagcgtaaacgtgataaggtgctgactgattctggttcattggattcaactatccctgggatagaaaataccatcacagttaccaccgagcaacttacaaccgcatcatttcctgttggttccaagaagaataaaggtgattctcatctaaatgttcaagttagcaactttaaatctggaaaaggagattctacacttcaggtttcttcaggattgaatgaaaacctcactgtcaatggaggaggctggaatgaaaagtctgtaaaactctcctcacagatcagtgcaggtgaggagaagtggaactccgtttcacctgcttctgcaggaaagaggaaaactgagccatctgcctggagtcaagacactggagatgctaatacaaatggaaaagactggggaaggagttggagtgaccgttcaatattttctggcattgatggtctgtcttctgctgatcccaactctgattggaatgcaccagcagaagagtggggcaattgggtagacgaagaaagagcttcacttctaaagtcccaggaaccaattcctgatgatcaaaaggtctcagatgatgataaagaaaagggagagggagctcttccaactgggaaatccaaaaagaaaaaaaagaaaaagaagaagcaaggtgaagataactctactgcacagacacagaagaattgaaaagagattgagaagactttcagtgatactctaaaaccgtcaaaaagaaaagttttcctgagaacctagataagggttcgcgagtatgtaaataggaggtatagatgtcactgtattacggcactgttttcaagggttgaaaggttccaagggaataagaagagatcggattagaaaaaaaaaatgggggcaatatatgggggaaagataagggtggtaaacgggaagtgataacagc

SEQ ID NO: 466178 - DNA, 1975 bp, Homo sapiens
gtccccgcgcgcggcgtggatcgcggcccaagccgccattgttccgccgagggaggacagcggggcctggcgctggcgccgagacgccgcttagcggccgccactggagacactccctcccgcctcccgggtctcctggcggcggcggagtgaggctgacagcggggaacctgggagacccctccgccctccccgcggtggcagcggccgatccccggctccggcgcgagggacggccgcgatgcgctcggcctgaggttacccggcccggcccttcctcgcttccctcgactattccactgcgtctccgcgccccggcgtcatcctgcgagtccctctgacgggagggaagatggctgcacggagctggcaggacgagctggcccagcaggccgaggagggctcggcccggctgcgggaaatgctctcggtcggcctaggctttctgcgcaccgagctgggcctcgacctggggctggagccgaaacggtaccccggctgggtgatcctggtgggcactggcgcgctcgggctgctgctgctgtttctgctgggctacggctgggccgcggcttgcgccggcgcccgcaaaaagcggaggagcccgccccgcaagcgggaggaggcggcggccgtgccggccgcggccccgacgacctggccttgctgaagaatctccggagcgaggaacagaagaagaagaaccggaagaaactgtccgagaagcccaaaccaaatgggcggactgttgaagtggctgagggtgaagctgttcgaacacctcaaagtgtaacagcaaagcagccaccagagattgacaagaaaaatgaaaagtcaaagaaaaataagaagaaatcaaagtcagatgctaaagcagtgcaaaacagttcacgccatgatggaaaggaagttgatgaaggagcctgggaaactaaaattagtcacagagagaaacgacagcagcgtaaacgtgataaggtgctgactgattctggttcattggattcaactatccctgggatagaaaataccatcacagttaccaccgagcaacttacaaccgcatcatttcctgttggttccaagaagaataaaggtgattctcatctaaatgttcaagttagcaactttaaatctggaaaaggagattctacacttcaggtttcttcaggattgaatgaaaacctcactgtcaatggaggaggctggaatgaaaagtctgtaaaactctcctcacagatcagtgcaggtgaggagaagtggaactccgtttcacctgcttctgcaggaaagaggaaaactgagccatctgcctggagtcaagacactggagatgctaatacaaatggaaaagactggggaaggagttggagtgaccgttcaatattttctggcattgggtctactgctgagccagtttctcagtctaccacttctgattatcagtgggatgttagccgtaatcaaccctatatcgatgatgaatggtctgggttaagtatgtccttttaaaaattatcagttattttttttcagagttttctttctagcaccctgaattcatgctttatgttttaattttaattctaatttctcacctttaaaggtcataagaatataatttaataccaaatgtactacttgaaacctgattattgaatacctgtagaattaaaactgaattttcgtaattgaggcaatatttaaacaaagttttcttctagttgctctgtagtatttctagtttttaaattttttgttttaaatgaatgtctgtttctcctcctaggtagtataatagactgaattaaatatacagaaatggctttgtatttgtgaagtatacacacatttttgtgccggtagaaaactactttcttaacccagttgccagtagaagtttagttaaaggaagacattttagaagggaagaatatggtttgtatgttcggaaagctcatgccgtcttcattta

SEQ ID NO: 466179 - DNA, 1996 bp, Homo sapiens
gtccccgcgcgcggcgtggatcgcggcccaagccgccattgttccgccgagggaggacagcggggcctggcgctggcgccgagacgccgcttagcggccgccactggagacactccctcccgcctcccgggtctcctggcggcggcggagtgaggctgacagcggggaacctgggagacccctccgccctccccgcggtggcagcggccgatccccggctccggcgcgagggacggccgcgatgcgctcggcctgaggttacccggcccggcccttcctcgcttccctcgactattccactgcgtctccgcgccccggcgtcatcctgcgagtccctctgacgggagggaagatggctgcacggagctggcaggacgagctggcccagcaggccgaggagggctcggcccggctgcgggaaatgctctcggtcggcctaggctttctgcgcaccgagctgggcctcgacctggggctggagccgaaacggtaccccggctgggtgatcctggtgggcactggcgcgctcgggctgctgctgctgtttctgctgggctacggctgggccgcggcttgcgccggcgcccgcaaaaagcggaggagcccgccccgcaagcgggaggaggcggcggccgtgccggccgcggccccgacgacctggccttgctgaagaatctccggagcgaggaacagaagaagaagaaccggaagaaactgtccgagaagcccaaaccaaatgggcggactgttgaagtggctgagggtgaagctgttcgaacacctcaaagtgtaacagcaaagcagccaccagagattgacaagaaaaatgaaaagtcaaagaaaaataagaagaaatcaaagtcagatgctaaagcagtgcaaaacagttcacgccatgatggaaaggaagttgatgaaggagcctgggaaactaaaattagtcacagagagaaacgacagcagcgtaaacgtgataaggtgctgactgattctggttcattggattcaactatccctgggatagaaaataccatcacagttaccaccgagcaacttacaaccgcatcatttcctgttggttccaagaagaataaaggtgattctcatctaaatgttcaagttagcaactttaaatctggaaaaggagattctacacttcaggtttcttcaggattgaatgaaaacctcactgtcaatggaggaggctggaatgaaaagtctgtaaaactctcctcacagatcagtgcaggtgaggagaagtggaactccgtttcacctgcttctgcaggaaagaggaaaactgagccatctgcctggagtcaagacactggagatgctaatacaaatggaaaagactggggaaggagttggagtgaccgttcaatattttctggcattgggtctactgctgagccagtttctcagtctaccacttctgattatcagtgggatgttagccgtaatcaaccctatatcgatgatgaatggtctgggttaaatggtctgtcttctgctgatcccaactctgattggaatgcaccagcagaagagtggggcaattgggtagacgaagaaagagcttcacttctaaagtcccaggaaccaattcctgatgatcaaaaggtgagtataagagattcctgggtgtttatttgttaatgaaagagacaggctgggcacggtggctcgcgcctgtgattccagcactttgggaggtactgtgggaggattgcttgagcccaggagttcaaggccagcctgggcaacatagcgagaccccgtctctatttataaaaataaaataaagcaactgaaggagaattctgggtcacagaggctgacaccaattgagagcctcagggagacaataatagcatcagaaacagcaaacccaagttttgataggactggaggagagatagtggataatagcaacacgtggtatcaggaatggttttgctagggttggggtgttgtattttaatgatagggagat

SEQ ID NO: 466180 - DNA, 1718 bp, Homo sapiens
gtccccgcgcgcggcgtggatcgcggcccaagccgccattgttccgccgagggaggacagcggggcctggcgctggcgccgagacgccgcttagcggccgccactggagacactccctcccgcctcccgggtctcctggcggcggcggagtgaggctgacagcggggaacctgggagacccctccgccctccccgcggtggcagcggccgatccccggctccggcgcgagggacggccgcgatgcgctcggcctgaggttacccggcccggcccttcctcgcttccctcgactattccactgcgtctccgcgccccggcgtcatcctgcgagtccctctgacgggagggaagatggctgcacggagctggcaggacgagctggcccagcaggccgaggagggctcggcccggctgcgggaaatgctctcggtcggcctaggctttctgcgcaccgagctgggcctcgacctggggctggagccgaaacggtaccccggctgggtgatcctggtgggcactggcgcgctcgggctgctgctgctgtttctgctgggctacggctgggccgcggcttgcgccggcgcccgcaaaaagcggaggagcccgccccgcaagcgggaggaggcggcggccgtgccggccgcggccccgacgacctggccttgctgaagaatctccggagcgaggaacagaagaagaagaaccggaagaaactgtccgagaagcccaaaccaaatgggcggactgttgaagtggctgagggtgaagctgttcgaacacctcaaagtgtaacagcaaagcagccaccagagattgacaagaaaaatgaaaagtcaaagaaaaataagaagaaatcaaagtcagatgctaaagcagtgcaaaacagttcacgccatgatggaaaggaagttgatgaaggagcctgggaaactaaaattagtcacagagagaaacgacagcagcgtaaacgtgataaggtgctgactgattctggttcattggattcaactatccctgggatagaaaataccatcacagttaccaccgagcaacttacaaccgcatcatttcctgttggttccaagaagaataaaggtgattctcatctaaatgttcaagttagcaactttaaatctggaaaaggagattctacacttcaggtttcttcaggattgaatgaaaacctcactgtcaatggaggaggctggaatgaaaagtctgtaaaactctcctcacagatcagtgcaggtgaggagaagtggaactccgtttcacctgcttctgcaggaaagaggaaaactgagccatctgcctggagtcaagacactggagatgctaatacaaatggaaaagactggggaaggagttggagtgaccgttcaatattttctggcattgtggtaagaagtgttagaaaaatttaactttatttaaaattactaatcttgtacatttttaatttttcagaaatagaaaaaaaaactatgaatagaaaaataagtactgctctgcaggaaagaggaaaactgagccatctgcctggagtcaagacactggagatgctaatacaaatggaaaagactggggaaggagttggagtgaccgttcaatattttctggcattggtaagaagtgttagaaaaatttaactttatttaaaattactaatcttgtacatttttaatttttcagaaatagaaaaaaaaactatgaatag

SEQ ID NO: 466181 - DNA, 992 bp, Homo sapiens
  misc_feature (841)..(842): n is a, c, g, or t
  misc_feature (850)..(850): n is a, c, g, or t
  misc_feature (854)..(854): n is a, c, g, or t
  misc_feature (857)..(857): n is a, c, g, or t
  misc_feature (862)..(862): n is a, c, g, or t
  misc_feature (872)..(872): n is a, c, g, or t
gtccccgcgcgcggcgtggatcgcggcccaagccgccattgttccgccgagggaggacagcggggcctggcgctggcgccgagacgccgcttagcggccgccactggagacactccctcccgcctcccgggtctcctggcggcggcggagtgaggctgacagcggggaacctgggagacccctccgccctccccgcggtggcagcggccgatccccggctccggcgcgagggacggccgcgatgcgctcggcctgaggttacccggcccggcccttcctcgcttccctcgactattccactgcgtctccgcgccccggcgtcatcctgcgagtccctctgacgggagggaagatggctgcacggagctggcaggacgagctggcccagcaggccgaggagggctcggcccggctgcgggaaatgctctcggtcggcctaggctttctgcgcaccgagctgggcctcgacctggggctggagccgaaacggtaccccggctgggtgatcctggtgggcactggcgcgctcgggctgctgctgctgtttctgctgggctacggctgggccgcggcttgcgccggcgcccgcaaaaagcggaggagcccgccccgcaagcgggaggaggcggcggccgtgccggccgcggccccgacgacctggccttgctgaagaatctccggagcgaggaacagaagaagaagaaccggaagaaactgtccgagaagcccaaaccaaatgggcggactgttgaagtggctgagggtgaagctgttcgaacacctcaaagtgtaacagcaaagcagccaccagagattgacaagaaaaatgaaaagcagtcanngaccatangagnaancaagncagtgctaangcggcaaaccagctccgcctgatggaggagttgtgaggagctggaactaattgtccaggggaacggaggcggtacgggagggggccggctggccgggcaccactccgggaaaaaccacgc

SEQ ID NO: 466182 - DNA, 605 bp, Homo sapiens
  misc_feature (6)..(6): n is a, c, g, or t
  misc_feature (34)..(34): n is a, c, g, or t
ggaacnctgcgacttttcactacaggaaacatgntctttacccttgcgatgtgggaaaacccctttcgacttattactatgagatagacacatcattttcaggcactgtgtaattctattgtaataaactggcaggtatctttgtaactataaatagtgcatgctcagccatgtacactgtaaatagcctttaccaaacgtgtttgacaaggaccataattaacatcacttagtgaattgtgataaagaaaaaaaagccatgatttattcgatgtgattggcttgtttttatgtggcgccaagaacgaacctgtttaacagctgtaaccaatggtactgatctatccatccaatgttgtcattatatttgactgtggttcaacagtattgcgttgtcagactaggaaagctaaacgaacaaaatggttttagttttgctgaagactggccttattaatggacagctttcctaacaagagattattaacttttatcaggtgttaacatctgtttcaggaacatggcagtatgtttacatgtcagaagttttgtttaattctatggtatttctaaattgacttgtttaaataaattcagcaaatgga

SEQ ID NO: 466183 - DNA, 2440 bp, Homo sapiens
caggtatatactccccccccttgtgggggctggtggcgccgagggggccccttgggccccgggtttgggggcccccctccccaaaaaaaaaaaaaaaaaaaaaaaaaaaaaaaaaaaaaaaagatggcagctatataaatgataaaattaattacattctctttcacatgcatgaggtgcaaactctgtcacaagtattttaattaccttttaccttgtttcatagatctttatgtgacataaaaacagtttctggcacggtggctcacgcctgtaatcctagcactttgggaggctgaggcaggtggatcacctgaggtcaggagtttgagaccagcctggccaatatggtgaaaccccatctctacaaaatttgcaaaaagtagatgggtgtggtagtgggcgcctgtaatcccagctactcaggaggttgaggcagagaatcgcttgaacccggggggtggaggttgcagtgagctgagatcgcaccactgcactccagcatgaaagagcgagactcaatctcaaaaaaaaaaaagtttctggcacctgaacaggaactggtttccatcatcaactcagaaagcactaaaatctaggtggtgattcagggaggagcaggggaagacagcctcctatggtggcatgaataagatgcttccagaactagtagggaaataactaacctcttcaggctttatcaggcctggaggggaaccttgctcatgttagcaagaaaggtatcctagagaagccactcaaaaggctccctaatccagcctgtctccacatacatactgaaaattcttccctactctgaggcagggtgtagtggtttaggggtttctccagactggaatcctacctatctgtaccgacaattgagcaaacaacagttgagagagtccaaaaaaaaaagtattaaaatgtgattgatgtaatttaccatgtttactttatgcatgcattttattggggaggggaggtcagaataattcacccaaatctagtggtcttatttcataggctaatctggtttatatttgcattaaagatactggagggcaatatttacagagtttagtttttcttaattaaaaacagtcctctattaatatagtgtgaaatatctttcaaaatttagagtttaggtttaagatgtctactagatatctttaagattttcctgtaaactcactgcacaaactggaattactttccaaaagacttagggaatgcaaatatgttactcataagatgcattgagtattgtaaataaaacaaaccatttttgatttgtttaaattgctcgttacagttctcttgtggggagggactttgtcagtcattttgcatcttaagctagactaaactttttgttgttgttttcctaaaaccataggtgcaagctttgccgctgggaagtcatattgaattaagcacttttgaaaatgtcactgtttgtgacacacaatgttctctacagaaaacttcttctatcttatgtcattttagcagtagatgtagctgcctgccaccaggtgcaatatgtcatttgcatcagccttttcagttaaggaaattaaaacttggcatgcattagttcatatgtatgaggttggctgtgtccccaaacagcaattgcttgtacaagatagaagtttgcttctcagctgggcatggtggctcatgcctgtaatccaagctctttgggaggccaacgcgggaggattgtttgagcccaggagtttgaaaccatcctgagcaatagagagacccccatctcgacaaaaaaaaaaaaaaaaaattagaaacaaaaaaaagattgtttctctttcatattaaagtttgggaaggcaatccagagcccatatgacattatgcagggtcagggatccgggttctttctatattgttcctccccattctcaacctgtagctttttttttaatctcctttctaaagtggaagatgcgcgacccagaggggaggactccggtctcaaaaaaaaaaaaaaaaaaaaaaaaaaaaaaaaaaaaaaaaaaaaaaaaaaaaaaaaaaaaaaaaaaaaaaataatacatacaaacgaaaataaaagctaacttgaccaattcgccctatggtgaggggtattacaatttactggccgtcaatttacaacttgggtgctgggcaacccctggcgttccccaattttatggcctggcattatatccccctctcgccaggttcctttttttgccgaataggcccgtagggacggccttcccaacagttgccccgctctttatgccatgggtatttgaaggcccctctttttccccgcggccacatcccttctttttctaataaatggcccgaaatatgggtgagtggtcgctccgctcggaacatttgttcaaatttaaggaacgttttcttatcacacaggttattact

SEQ ID NO: 466184 - DNA, 405 bp, Homo sapiens
tgttatgttcaagcctcctgtttttaaattaaggcaatccttggtgatcaaaggatagtaggggaagtgagtaataaatataagtcaagcaatcatagaaatgtgaaaatatcccagttttaagaagtcatgtacctgttttttaatattcattttcttttctttaagtttcttcaggattgaatgaaaacctcactgtcaatggaggaggctggaatgaaaagtctgtaaaactctcctcacagatcagtgcaggtgaggagaagtggaactccgtttcacctgcttctgcaggaaagaggaaaactgagccatctgcctggagtcaagacactggagatgctaatacaaatggaaaagactggggaaggagttggagtgaccgttcaatattttctggcattg

SEQ ID NO: 466185 - DNA, 970 bp, Homo sapiens
  misc_feature (819)..(820): n is a, c, g, or t
  misc_feature (828)..(828): n is a, c, g, or t
  misc_feature (832)..(832): n is a, c, g, or t
  misc_feature (835)..(835): n is a, c, g, or t
  misc_feature (840)..(840): n is a, c, g, or t
  misc_feature (850)..(850): n is a, c, g, or t
attacggctaggtagaggctgggtgtgaatcggccgagcggggcctggcgctggcgccgagacgccgcttagcggccgccactggagacactccctcccgcctcccgggtctcctggcggcggcggagtgaggctgacagcggggaacctgggagacccctccgccctccccgcggtggcagcggccgatccccggctccggcgcgagggacggccgcgatgcgctcggcctgaggttacccggcccggcccttcctcgcttccctcgactattccactgcgtctccgcgccccggcgtcatcctgcgagtccctctgacgggagggaagatggctgcacggagctggcaggacgagctggcccagcaggccgaggagggctcggcccggctgcgggaaatgctctcggtcggcctaggctttctgcgcaccgagctgggcctcgacctggggctggagccgaaacggtaccccggctgggtgatcctggtgggcactggcgcgctcgggctgctgctgctgtttctgctgggctacggctgggccgcggcttgcgccggcgcccgcaaaaagcggaggagcccgccccgcaagcgggaggaggcggcggccgtgccggccgcggccccgacgacctggccttgctgaagaatctccggagcgaggaacagaagaagaagaaccggaagaaactgtccgagaagcccaaaccaaatgggcggactgttgaagtggctgagggtgaagctgttcgaacacctcaaagtgtaacagcaaagcagccaccagagattgacaagaaaaatgaaaagcagtcanngaccatangagnaancaagncagtgctaangcggcaaaccagctccgcctgatggaggagttgtgaggagctggaactaattgtccaggggaacggaggcggtacgggagggggccggctggccgggcaccactccgggaaaaaccacgc

SEQ ID NO: 466186 - DNA, 5280 bp, Homo sapiens
gtccccgcgcgcggcgtggatcgcggcccaagccgccattgttccgccgagggaggacagcggggcctggcgctggcgccgagacgccgcttagcggccgccactggagacactccctcccgcctcccgggtctcctggcggcggcggagtgaggctgacagcggggaacctgggagacccctccgccctccccgcggtggcagcggccgatccccggctccggcgcgagggacggccgcgatgcgctcggcctgaggttacccggcccggcccttcctcgcttccctcgactattccactgcgtctccgcgccccggcgtcatcctgcgagtccctctgacgggagggaagatggctgcacggagctggcaggacgagctggcccagcaggccgaggagggctcggcccggctgcgggaaatgctctcggtcggcctaggctttctgcgcaccgagctgggcctcgacctggggctggagccgaaacggtaccccggctgggtgatcctggtgggcactggcgcgctcgggctgctgctgctgtttctgctgggctacggctgggccgcggcttgcgccggcgcccgcaaaaagcggaggagcccgccccgcaagcgggaggaggcggcggccgtgccggccgcggccccgacgacctggccttgctgaagaatctccggagcgaggaacagaagaagaagaaccggaagaaactgtccgagaagcccaaaccaaatgggcggactgttgaagtggctgagggtgaagctgttcgaacacctcaaagtgtaacagcaaagcagccaccagagattgacaagaaaaatgaaaagtcaaagaaaaataagaagaaatcaaagtcagatgctaaagcagtgcaaaacagttcacgccatgatggaaaggaagttgatgaaggagcctgggaaactaaaattagtcacagagagaaacgacagcagcgtaaacgtgataaggtgctgactgattctggttcattggattcaactatccctgggatagaaaataccatcacagttaccaccgagcaacttacaaccgcatcatttcctgttggttccaagaagaataaaggtgattctcatctaaatgttcaagttagcaactttaaatctggaaaaggagattctacacttcaggtttcttcaggattgaatgaaaacctcactgtcaatggaggaggctggaatgaaaagtctgtaaaactctcctcacagatcagtgcaggtgaggagaagtggaactccgtttcacctgcttctgcaggaaagaggaaaactgagccatctgcctggagtcaagacactggagatgctaatacaaatggaaaagactggggaaggagttggagtgaccgttcaatattttctggcattgggtctactgctgagccagtttctcagtctaccacttctgattatcagtgggatgttagccgtaatcaaccctatatcgatgatgaatggtctgggttaaatggtctgtcttctgctgatcccaactctgattggaatgcaccagcagaagagtggggcaattgggtagacgaagaaagagcttcacttctaaagtcccaggaaccaattcctgatgatcaaaaggtctcagatgatgataaagaaaagggagagggagctcttccaactgggaaatccaaaaagaaaaaaaagaaaaagaagaagcaaggtgaagataactctactgcacaggacacagaagaattagaaaaagagattagagaagaccttccagtgaatacctctaaaacccgtccaaaacaggaaaaagctttttccttgaagaccataagcactagtgatccagccgaagtactcgtcaaaaatagccagcctatcaagactcttccacctgctacttctaccgagccatctgtaatcttatcaaaaagtgattctgacaagagctcttcccaagtgccgccaatactacaagagacagataaatccaagtcaaataccaagcaaaatagtgtgcctccttcacagaccaagtctgaaactagctgggaatctcccaaacaaataaaaaagaagaaaaaagccagacgagaaacgtgaaattttttttcctgaattggacatgtgtttgcaaacacttgtcttgaagattatgctgtttatgcaataatttgtgaacatgtacagagttttatataaatttaaaccaatttttaaaacaaaactgcggacaccaccataaaaatggaatcaaaagaaagttaatttatgaaattaagaggtcagcagaatatactcagtgatggaagacacttgggaaagtctttttaatagaacaagaacgatcttaatttaagaatattatcctggtttaacaacagtgccctgtttacaacagattgtgccctatctcatctgcagccgaggaataaaggattctgattagaaagagggttgcctacagattagtaagcaattccttggatcttatgcacagaacttgtaccatttgaatctgttttatgcttaaatcaaagtgctttgatcaaatgcataacctgccatatctttacatatttgttggtagcaatttgtattaaagaaatcacaagtgcaaataaaaagtcatttatcatttgtttaactaaactgtcatggtttagtttacaatttttaaaaagttcttaaaatactgaaaatgcagttgacacttgtgtatggcttatgaagttatttttgatagtcttacattacttgaattgttcaaagtacagtatattttaaattaagaaaagtgaactatatgtatttgttttatacatttaaggcttagactcataaataatgctattgtttatgatttgaaaactttcaggcaaaatccaatttacatttttcccttccctagcaattacttttttccagcttcaactcttcttagttactaatactttgttgactttaaaaatgaaatcattcacaaacttttggtatatgatggagaatgaaaaactagagtcagacagctttaattgacattgtcaacacctccagttatcaggaatacatttttttactgccttaacctgtagtgcgtagaatatgcatcaatttcttgaaggagattcatgtttttataagaattttcatgtaattattgcaattgtggtcaaataaggaacgtttcctgcttgaaattatattgatttaaatgatgtgtgagatgtttcaccattttcaggcactgtgtaattctattgtaataaactggcaggtatctttgtaactataaatagtgcatgctcagccatgtacactgtaaatagcctttaccaaacgtgtttgacaaggaccataattaacatcacttagtgaattgtgataaagaaaaaaaagccatgatttattcgatgtgattggcttgtttttatgtggcgccaagaacgaacctgtttaacagctgtaaccaatggtactgatctatccatccaatgttgtcattatatttgactgtggttcaacagtattgcgttgtcagactaggaaagctaaacgaacaaaatggttttagttttgctgaagactggccttattaatggacagctttcctaacaagagattattaacttttatcaggtgttaacatctgtttcaggaacatggcagtatgtttacatgtcagaagttttgtttaattctatggtatttctaaattgacttgtttaaataaattcagcaaatggatagcattgttttttatttgcttcaatatgggggtagataatagctaaagagccaaggatgaatttcttcaaatgactttattctgttagctttacataggtgttggaggattcctaaggtgtcagcattttgtaaaggtaccacaaaggagaagttgatagggaatctaattttagaatgtgccaaatggtctgtgctcaacaatataattgaactctctcaactctacctcaccatttctttatctcaaaattctgttggctttgtcaaacgttggattttatttctgcagcctagtatctccccattctaccacctatgccagatgttaaagacagcagatgttttgaggagaatggcattgtggagatgcagagatgcgttgctaagttgaggtggatccagtatagagatacctctatttcttctttatggctcaagagctaggacttggattcttggcctcccaaagtgctggtgttacaggtgtgagccaccacacctggccaacatgtggctttcagttcttacttgaagacagctgctctagctagaaacttcctatcggcatctgagccagctggtagagggcattacctcccccacccccaagaacacttcttggaagttacacacaatacataaacttcaatttcaaacagttgcttggtcccactagccatgaagctggatgggacgtaatattctatctgggttgtcatgggccaaattaacattttgagattctgttaggaagatgagaattggataatgggcacctctaacagtgtctgtcagagttgacatacattgtgtatctcctgcaccaaagcatttttgagatcaagtgttcttccagctgagcagaaatttggaaggctattcagtgctgcttagtgtagcagctaataatgttccaacttctatatgatagtttgctttttgttttttgtttttttctagagacagagtctcgttgcccaggctggtctccaattcctgggttcaagcaatcctcctgactcagcctcctaaatgctgggattacaggcatgaaccactgtgcccagtctatatataatagattttagaagaaatttctgccactcagtgactgctttaaattctagagacagaggctgagagaaacttagtagcctgcctgcgcatactgcaagtacagactatataacaagttgaaagagaatcaccctggtatataatattttaaaacatgaaaaaggcattactattgttctggtctaagtactctaacaggacgatgatttctaaccctagcatcatgacatgtatatagtgtgttgtaagacatttgccagctaatagttacagtactgaagcttgtgaatacgttaattgagaaaactttaagcaggttcaaagttatcccatgatagtggcattcttatttgtatatatgtgctttccttttttatttgtatcaaggcatttaaaatgaatatatgtaacatgtacctaagttttaaaagcataataaaatgaacacatctgaaa

SEQ ID NO: 466187 - DNA, 6837 bp, Homo sapiens
gtccccgcgcgcggcgtggatcgcggcccaagccgccattgttccgccgagggaggacagcggggcctggcgctggcgccgagacgccgcttagcggccgccactggagacactccctcccgcctcccgggtctcctggcggcggcggagtgaggctgacagcggggaacctgggagacccctccgccctccccgcggtggcagcggccgatccccggctccggcgcgagggacggccgcgatgcgctcggcctgaggttacccggcccggcccttcctcgcttccctcgactattccactgcgtctccgcgccccggcgtcatcctgcgagtccctctgacgggagggaagatggctgcacggagctggcaggacgagctggcccagcaggccgaggagggctcggcccggctgcgggaaatgctctcggtcggcctaggctttctgcgcaccgagctgggcctcgacctggggctggagccgaaacggtaccccggctgggtgatcctggtgggcactggcgcgctcgggctgctgctgctgtttctgctgggctacggctgggccgcggcttgcgccggcgcccgcaaaaagcggaggagcccgccccgcaagcgggaggaggcggcggccgtgccggccgcggccccgacgacctggccttgctgaagaatctccggagcgaggaacagaagaagaagaaccggaagaaactgtccgagaagcccaaaccaaatgggcggactgttgaagtggctgagggtgaagctgttcgaacacctcaaagtgtaacagcaaagcagccaccagagattgacaagaaaaatgaaaagtcaaagaaaaataagaagaaatcaaagtcagatgctaaagcagtgcaaaacagttcacgccatgatggaaaggaagttgatgaaggagcctgggaaactaaaattagtcacagagagaaacgacagcagcgtaaacgtgataaggtgctgactgattctggttcattggattcaactatccctgggatagaaaataccatcacagttaccaccgagcaacttacaaccgcatcatttcctgttggttccaagaagaataaaggtgattctcatctaaatgttcaagttagcaactttaaatctggaaaaggagattctacacttcaggtttcttcaggattgaatgaaaacctcactgtcaatggaggaggctggaatgaaaagtctgtaaaactctcctcacagatcagtgcaggtgaggagaagtggaactccgtttcacctgcttctgcaggaaagaggaaaactgagccatctgcctggagtcaagacactggagatgctaatacaaatggaaaagactggggaaggagttggagtgaccgttcaatattttctggcattgggtctactgctgagccagtttctcagtctaccacttctgattatcagtgggatgttagccgtaatcaaccctatatcgatgatgaatggtctgggttaaatggtctgtcttctgctgatcccaactctgattggaatgcaccagcagaagagtggggcaattgggtagacgaagaaagagcttcacttctaaagtcccaggaaccaattcctgatgatcaaaaggtctcagatgatgataaagaaaagggagagggagctcttccaactgggaaatccaaaaagaaaaaaaagaaaaagaagaagcaaggtgaagataactctactgcacaggacacagaagaattagaaaaagagattagagaagaccttccagtgaatacctctaaaacccgtccaaaacaggaaaaagctttttccttgaagaccataagcactagtgatccagccgaagtactcgtcaaaaatagccagcctatcaagactcttccacctgctacttctaccgagccatctgtaatcttatcaaaaagtgattctgacaagagctcttcccaagtgccgccaatactacaagagacagataaatccaagtcaaataccaagcaaaatagtgtgcctccttcacagaccaagtctgaaactagctgggaatctcccaaacaaataaaaaagaagaaaaaagccagacgagaaacgtgaaattttttttcctgaattggacatgtgtttgcaaacacttgtcttgaagattatgctgtttatgcaataatttgtgaacatgtacagagttttatataaatttaaaccaatttttaaaacaaaactgcggacaccaccataaaaatggaatcaaaagaaagttaatttatgaaattaagaggtcagcagaatatactcagtgatggaagacacttgggaaagtctttttaatagaacaagaacgatcttaatttaagaatattatcctggtttaacaacagtgccctgtttacaacagattgtgccctatctcatctgcagccgaggaataaaggattctgattagaaagagggttgcctacagattagtaagcaattccttggatcttatgcacagaacttgtaccatttgaatctgttttatgcttaaatcaaagtgctttgatcaaatgcataacctgccatatctttacatatttgttggtagcaatttgtattaaagaaatcacaagtgcaaataaaaagtcatttatcatttgtttaactaaactgtcatggtttagtttacaatttttaaaaagttcttaaaatactgaaaatgcagttgacacttgtgtatggcttatgaagttatttttgatagtcttacattacttgaattgttcaaagtacagtatattttaaattaagaaaagtgaactatatgtatttgttttatacatttaaggcttagactcataaataatgctattgtttatgatttgaaaactttcaggcaaaatccaatttacatttttcccttccctagcaattacttttttccagcttcaactcttcttagttactaatactttgttgactttaaaaatgaaatcattcacaaacttttggtatatgatggagaatgaaaaactagagtcagacagctttaattgacattgtcaacacctccagttatcaggaatacatttttttactgccttaacctgtagtgcgtagaatatgcatcaatttcttgaaggagattcatgtttttataagaattttcatgtaattattgcaattgtggtcaaataaggaacgtttcctgcttgaaattatattgatttaaatgatgtgtgagatgtttcaccattttcaggcactgtgtaattctattgtaataaactggcaggtatctttgtaactataaatagtgcatgctcagccatgtacactgtaaatagcctttaccaaacgtgtttgacaaggaccataattaacatcacttagtgaattgtgataaagaaaaaaaagccatgatttattcgatgtgattggcttgtttttatgtggcgccaagaacgaacctgtttaacagctgtaaccaatggtactgatctatccatccaatgttgtcattatatttgactgtggttcaacagtattgcgttgtcagactaggaaagctaaacgaacaaaatggttttagttttgctgaagactggccttattaatggacagctttcctaacaagagattattaacttttatcaggtgttaacatctgtttcaggaacatggcagtatgtttacatgtcagaagttttgtttaattctatggtatttctaaattgacttgtttaaataaattcagcaaatggatagcattgttttttatttgcttcaatatgggggtagataatagctaaagagccaaggatgaatttcttcaaatgactttattctgttagctttacataggtgttggaggattcctaaggtgtcagcattttgtaaaggtaccacaaaggagaagttgatagggaatctaattttagaatgtgccaaatggtctgtgctcaacaatataattgaactctctcaactctacctcaccatttctttatctcaaaattctgttggctttgtcaaacgttggattttatttctgcagcctagtatctccccattctaccacctatgccagatgttaaagacagcagatgttttgaggagaatggcattgtggagatgcagagatgcgttgctaagttgaggtggatccagtatagagatacctctatttcttctttatggctcaagagctaggacttggattttgttttaagagatggcagctggccgggtgcagtggctcacgtctgtaatcccagcactttgggaggccgaggcaggtggatcacgaggtcaggagttcaagaccagcctggccaagagggtgaaaccccatctttactaaaaatacaaaaaaaaaaattagctgggtgtggtggtgggctcctgtaatcccagctactcaggaggctaaggcagagaatcatttgaacccaggagacggagtttgcaaagccaagatcgtgccactgcactccagcctgggcaacagaaggagactccgtctcaaaaaaaaaaaaaagatggcagctatataaatgataaaattaattacattctctttcacatgcatgaggtgcaaactctgtcacaagtattttaattaccttttaccttgtttcatagatctttatgtgacataaaaacagtttctggcacggtggctcacgcctgtaatcctagcactttgggaggctgaggcaggtggatcacctgaggtcaggagtttgagaccagcctggccaatatggtgaaaccccatctctacaaaatttgcaaaaagtagatgggtgtggtagtgggcgcctgtaatcccagctactcaggaggttgaggcagagaatcgcttgaacccggggggtggaggttgcagtgagctgagatcgcaccactgcactccagcatgaaagagcgagactcaatctcaaaaaaaaaaaagtttctggcacctgaacaggaactggtttccatcatcaactcagaaagcactaaaatctaggtggtgattcagggaggagcaggggaagacagcctcctatggtggcatgaataagatgcttccagaactagtagggaaataactaacctcttcaggctttatcaggcctggaggggaaccttgctcatgttagcaagaaaggtatcctagagaagccactcaaaaggctccctaatccagcctgtctccacatacatactgaaaattcttccctactctgaggcagggtgtagtggtttaggggtttctccagactggaatcctacctatctgtaccgacaattgagcaaacaacagttgagagagtccaaaaaaaaaagtattaaaatgtgattgatgtaatttaccatgtttactttatgcatgcattttattggggaggggaggtcagaataattcacccaaatctagtggtcttatttcataggctaatctggtttatatttgcattaaagatactggagggcaatatttacagagtttagtttttcttaattaaaaacagtcctctattaatatagtgtgaaatatctttcaaaatttagagtttaggtttaagatgtctactagatatctttaagattttcctgtaaactcactgcacaaactggaattactttccaaaagacttagggaatgcaaatatgttactcataagatgcattgagtattgtaaataaaacaaaccatttttgatttgtttaaattgctcgttacagttctcttgtggggagggactttgtcagtcattttgcatcttaagctagactaaactttttgttgttgttttcctaaaaccataggtgcaagctttgccgctgggaagtcatattgaattaagcacttttgaaaatgtcactgtttgtgacacacaatgttctctacagaaaacttcttctatcttatgtcattttagcagtagatgtagctgcctgccaccaggtgcaatatgtcatttgcatcagccttttcagttaaggaaattaaaacttggcatgcattagttcatatgtatgaggttggctgtgtccccaaacagcaattgcttgtacaagatagaagtttgcttctcagctgggcatggtggctcatgcctgtaatccaagctctttgggaggccaacgcgggaggattgtttgagcccaggagtttgaaaccatcctgagcaatagagagacccccatctcgacaaaaaaaaaaaaaaaaaattagaaacaaaaaaaagattgtttctctttcatattaaagtttgggaaggcaatccagagcccatatgacattatgcagggtcagggatccgggttctttctatattgttcctccccattctcaacctgtagctttttttttaatctcctttctaaagtggaagatgcgcgacccagaggggaggactccggtctcaaaaaaaaaaaaaaaaaaaaaaaaaaaaaaaaaaaaaaaaaaaaaaaaaaaaaaaaaaaaaaaaaaaaaaataatacatacaaacgaaaataaaagctaacttgaccaattcgccctatggtgaggggtattacaatttactggccgtcaatttacaacttgggtgctgggcaacccctggcgttccccaattttatggcctggcattatatccccctctcgccaggttcctttttttgccgaataggcccgtagggacggccttcccaacagttgccccgctctttatgccatgggtatttgaaggcccctctttttccccgcggccacatcccttctttttctaataaatggcccgaaatatgggtgagtggtcgctccgctcggaacatttgttcaaatttaaggaacgttttcttatcacacaggttattact

SEQ ID NO: 466188 - DNA, 5232 bp, Homo sapiens
gtccccgcgcgcggcgtggatcgcggcccaagccgccattgttccgccgagggaggacagcggggcctggcgctggcgccgagacgccgcttagcggccgccactggagacactccctcccgcctcccgggtctcctggcggcggcggagtgaggctgacagcggggaacctgggagacccctccgccctccccgcggtggcagcggccgatccccggctccggcgcgagggacggccgcgatgcgctcggcctgaggttacccggcccggcccttcctcgcttccctcgactattccactgcgtctccgcgccccggcgtcatcctgcgagtccctctgacgggagggaagatggctgcacggagctggcaggacgagctggcccagcaggccgaggagggctcggcccggctgcgggaaatgctctcggtcggcctaggctttctgcgcaccgagctgggcctcgacctggggctggagccgaaacggtaccccggctgggtgatcctggtgggcactggcgcgctcgggctgctgctgctgtttctgctgggctacggctgggccgcggcttgcgccggcgcccgcaaaaagcggaggagcccgccccgcaagcgggaggaggcggcggccgtgccggccgcggccccgacgacctggccttgctgaagaatctccggagcgaggaacagaagaagaagaaccggaagaaactgtccgagaagcccaaaccaaatgggcggactgttgaagtggctgagggtgaagctgttcgaacacctcaaagtgtaacagcaaagcagccaccagagattgacaagaaaaatgaaaagtcaaagaaaaataagaagaaatcaaagtcagatgctaaagcagtgcaaaacagttcacgccatgatggaaaggaagttgatgaaggagcctgggaaactaaaattagtcacagagagaaacgacagcagcgtaaacgtgataaggtgctgactgattctggttcattggattcaactatccctgggatagaaaataccatcacagttaccaccgagcaacttacaaccgcatcatttcctgttggttccaagaagaataaaggtgattctcatctaaatgttcaagttagcaactttaaatctggaaaaggagattctacacttcaggtttcttcaggattgaatgaaaacctcactgtcaatggaggaggctggaatgaaaagtctgtaaaactctcctcacagatcagtgcaggtgaggagaagtggaactccgtttcacctgcttctgcaggaaagaggaaaactgagccatctgcctggagtcaagacactggagatgctaatacaaatggaaaagactggggaaggagttggagtgaccgttcaatattttctggcattgggtctactgctgagccagtttctcagtctaccacttctgattatcagtgggatgttagccgtaatcaaccctatatcgatgatgaatggtctgggttaaatggtctgtcttctgctgatcccaactctgattggaatgcaccagcagaagagtggggcaattgggtagacgaagaaagagcttcacttctaaagtcccaggaaccaattcctgatgatcaaaaggtctcagatgatgataaagaaaagggagagggagctcttccaactgggaaatccaaaaagaaaaaaaagaaaaagaagaagcaaggtgaagataactctactgcacaggacacagaagaattagaaaaagagattagagaagaccttccagtgaatacctctaaaacccgtccaaaacaggaaaaagctttttccttgaagaccataagcactagtgatccagccgaagtactcgtcaaaaatagccagcctatcaagactcttccacctgctacttctaccgagccatctgtaatcttatcaaaaagtgattctgacaagagctcttcccaagtgccgccaatactacaagagacagataaatccaagtcaaataccaagcaaaatagtgtgcctccttcacagaccaagtctgaaactagctgggaatctcccaaacaaataaaaaagaagaaaaaagccagacgagaaacgtgaaattttttttcctgaattggacatgtgtttgcaaacacttgtcttgaagattatgctgtttatgcaataatttgtgaacatgtacagagttttatataaatttaaaccaatttttaaaacaaaactgcggacaccaccataaaaatggaatcaaatggaagacacttgggaaagtctttttaatagaacaagaacgatcttaatttaagaatattatcctggtttaacaacagtgccctgtttacaacagattgtgccctatctcatctgcagccgaggaataaaggattctgattagaaagagggttgcctacagattagtaagcaattccttggatcttatgcacagaacttgtaccatttgaatctgttttatgcttaaatcaaagtgctttgatcaaatgcataacctgccatatctttacatatttgttggtagcaatttgtattaaagaaatcacaagtgcaaataaaaagtcatttatcatttgtttaactaaactgtcatggtttagtttacaatttttaaaaagttcttaaaatactgaaaatgcagttgacacttgtgtatggcttatgaagttatttttgatagtcttacattacttgaattgttcaaagtacagtatattttaaattaagaaaagtgaactatatgtatttgttttatacatttaaggcttagactcataaataatgctattgtttatgatttgaaaactttcaggcaaaatccaatttacatttttcccttccctagcaattacttttttccagcttcaactcttcttagttactaatactttgttgactttaaaaatgaaatcattcacaaacttttggtatatgatggagaatgaaaaactagagtcagacagctttaattgacattgtcaacacctccagttatcaggaatacatttttttactgccttaacctgtagtgcgtagaatatgcatcaatttcttgaaggagattcatgtttttataagaattttcatgtaattattgcaattgtggtcaaataaggaacgtttcctgcttgaaattatattgatttaaatgatgtgtgagatgtttcaccattttcaggcactgtgtaattctattgtaataaactggcaggtatctttgtaactataaatagtgcatgctcagccatgtacactgtaaatagcctttaccaaacgtgtttgacaaggaccataattaacatcacttagtgaattgtgataaagaaaaaaaagccatgatttattcgatgtgattggcttgtttttatgtggcgccaagaacgaacctgtttaacagctgtaaccaatggtactgatctatccatccaatgttgtcattatatttgactgtggttcaacagtattgcgttgtcagactaggaaagctaaacgaacaaaatggttttagttttgctgaagactggccttattaatggacagctttcctaacaagagattattaacttttatcaggtgttaacatctgtttcaggaacatggcagtatgtttacatgtcagaagttttgtttaattctatggtatttctaaattgacttgtttaaataaattcagcaaatggatagcattgttttttatttgcttcaatatgggggtagataatagctaaagagccaaggatgaatttcttcaaatgactttattctgttagctttacataggtgttggaggattcctaaggtgtcagcattttgtaaaggtaccacaaaggagaagttgatagggaatctaattttagaatgtgccaaatggtctgtgctcaacaatataattgaactctctcaactctacctcaccatttctttatctcaaaattctgttggctttgtcaaacgttggattttatttctgcagcctagtatctccccattctaccacctatgccagatgttaaagacagcagatgttttgaggagaatggcattgtggagatgcagagatgcgttgctaagttgaggtggatccagtatagagatacctctatttcttctttatggctcaagagctaggacttggattcttggcctcccaaagtgctggtgttacaggtgtgagccaccacacctggccaacatgtggctttcagttcttacttgaagacagctgctctagctagaaacttcctatcggcatctgagccagctggtagagggcattacctcccccacccccaagaacacttcttggaagttacacacaatacataaacttcaatttcaaacagttgcttggtcccactagccatgaagctggatgggacgtaatattctatctgggttgtcatgggccaaattaacattttgagattctgttaggaagatgagaattggataatgggcacctctaacagtgtctgtcagagttgacatacattgtgtatctcctgcaccaaagcatttttgagatcaagtgttcttccagctgagcagaaatttggaaggctattcagtgctgcttagtgtagcagctaataatgttccaacttctatatgatagtttgctttttgttttttgtttttttctagagacagagtctcgttgcccaggctggtctccaattcctgggttcaagcaatcctcctgactcagcctcctaaatgctgggattacaggcatgaaccactgtgcccagtctatatataatagattttagaagaaatttctgccactcagtgactgctttaaattctagagacagaggctgagagaaacttagtagcctgcctgcgcatactgcaagtacagactatataacaagttgaaagagaatcaccctggtatataatattttaaaacatgaaaaaggcattactattgttctggtctaagtactctaacaggacgatgatttctaaccctagcatcatgacatgtatatagtgtgttgtaagacatttgccagctaatagttacagtactgaagcttgtgaatacgttaattgagaaaactttaagcaggttcaaagttatcccatgatagtggcattcttatttgtatatatgtgctttccttttttatttgtatcaaggcatttaaaatgaatatatgtaacatgtacctaagttttaaaagcataataaaatgaacacatctgaaa

SEQ ID NO: 466189 - DNA, 4689 bp, Homo sapiens
gtccccgcgcgcggcgtggatcgcggcccaagccgccattgttccgccgagggaggacagcggggcctggcgctggcgccgagacgccgcttagcggccgccactggagacactccctcccgcctcccgggtctcctggcggcggcggagtgaggctgacagcggggaacctgggagacccctccgccctccccgcggtggcagcggccgatccccggctccggcgcgagggacggccgcgatgcgctcggcctgaggttacccggcccggcccttcctcgcttccctcgactattccactgcgtctccgcgccccggcgtcatcctgcgagtccctctgacgggagggaagatggctgcacggagctggcaggacgagctggcccagcaggccgaggagggctcggcccggctgcgggaaatgctctcggtcggcctaggctttctgcgcaccgagctgggcctcgacctggggctggagccgaaacggtaccccggctgggtgatcctggtgggcactggcgcgctcgggctgctgctgctgtttctgctgggctacggctgggccgcggcttgcgccggcgcccgcaaaaagcggaggagcccgccccgcaagcgggaggaggcggcggccgtgccggccgcggccccgacgacctggccttgctgaagaatctccggagcgaggaacagaagaagaagaaccggaagaaactgtccgagaagcccaaaccaaatgggcggactgttgaagtggctgagggtgaagctgttcgaacacctcaaagtgtaacagcaaagcagccaccagagattgacaagaaaaatgaaaagtcaaagaaaaataagaagaaatcaaagtcagatgctaaagcagtgcaaaacagttcacgccatgatggaaaggaagttgatgaaggagcctgggaaactaaaattagtcacagagagaaacgacagcagcgtaaacgtgataaggtgctgactgattctggttcattggattcaactatccctgggatagaaaataccatcacagttaccaccgagcaacttacaaccgcatcatttcctgttggttccaagaagaataaaggtgattctcatctaaatgttcaagttagcaactttaaatctggaaaaggagattctacacttcaggtttcttcaggattgaatgaaaacctcactgtcaatggaggaggctggaatgaaaagtctgtaaaactctcctcacagatcagtgcaggtgaggagaagtggaactccgtttcacctgcttctgcaggaaagaggaaaactgagccatctgcctggagtcaagacactggagatgctaatacaaatggaaaagactggggaaggagttggagtgaccgttcaatattttctggcattgggtctactgctgagccagtttctcagtctaccacttctgattatcagtgggatgttagccgtaatcaaccctatatcgatgatgaatggtctgggttaaatggtctgtcttctgctgatcccaactctgattggaatgcaccagcagaagagtggggcaattgggtagacgaagaaagagcttcacttctaaagtcccaggaaccaattcctgatgatcaaaaggtctcagatgatgataaagaaaagggagagggagctcttccaactgggaaatccaaaaagaaaaaaaagaaaaagaagaagcaaggtgaagataactctactgcacaggacacagaagaattagaaaaagagattagagaagaccttccagtgaatacctctaaaacccgtccaaaacaggaaaaagctttttccttgaagaccataagcactagtgatccagccgaagtactcgtcaaaaatagccagcctatcaagactcttccacctgctacttctaccgagccatctgtaatcttatcaaaaagtgattctgacaagagctcttcccaagtgccgccaatactacaagagacagataaatccaagtcaaataccaagcaaaatagtgtgcctccttcacagaccaagtctgaaactagctgggaatctcccaaacaaataaaaaagaagaaaaaagccagacgagaaacgtgaaattttttttcctgaattggacatgtgtttgcaaacacttgtcttgaagattatgctgtttatgcaataatttgtgaacatgtacagagttttatataaatttaaaccaatttttaaaacaaaactgcggacaccaccataaaaatggaatcaaaagaaagttaatttatgaaattaagaggtcagcagaatatactcagtgatggaagacacttgggaaagtctttttaatagaacaagaacgatcttaatttaagaatattatcctggtttaacaacagtgccctgtttacaacagattgtgccctatctcatctgcagccgaggaataaaggattctgattagaaagagggttgcctacagattagtaagcaattccttggatcttatgcacagaacttgtaccatttgaatctgttttatgcttaaatcaaagtgctttgatcaaatgcataacctgccatatctttacatatttgttggtagcaatttgtattaaagaaatcacaagtgcaaataaaaagtcatttatcatttgtttaactaaactgtcatggtttagtttacaatttttaaaaagttcttaaaatactgaaaatgcagttgacacttgtgtatggcttatgaagttatttttgatagtcttacattacttgaattgttcaaagtacagtatattttaaattaagaaaagtgaactatatgtatttgttttatacatttaaggcttagactcataaataatgctattgtttatgatttgaaaactttcaggcaaaatccaatttacatttttcccttccctagcaattacttttttccagcttcaactcttcttagttactaatactttgttgactttaaaaatgaaatcattcacaaacttttggtatatgatggagaatgaaaaactagagtcagacagctttaattgacattgtcaacacctccagttatcaggaatacatttttttactgccttaacctgtagtgcgtagaatatgcatcaatttcttgaaggagattcatgtttttataagaattttcatgtaattattgcaattgtggtcaaataaggaacgtttcctgcttgaaattatattgatttaaatgatgtgtgagatgtttcaccattttcaggcactgtgtaattctattgtaataaactggcaggtatctttgtaactataaatagtgcatgctcagccatgtacactgtaaatagcctttaccaaacgtgtttgacaaggaccataattaacatcacttagtgaattgtgataaagaaaaaaaagccatgatttattcgatgtgattggcttgtttttatgtggcgccaagaacgaacctgtttaacagctgtaaccaatggtactgatctatccatccaatgttgtcattatatttgactgtggttcaacagtattgcgttgtcagactaggaaagctaaacgaacaaaatggttttagttttgctgaagactggccttattaatggacagctttcctaacaagagattattaacttttatcaggtgttaacatctgtttcaggaacatggcagtatgtttacatgtcagaagttttgtttaattctatggtatttctaaattgacttgtttaaataaattcagcaaatggatagcattgttttttatttgcttcaatatgggggtagataatagctaaagagccaaggatgaatttcttcaaatgactttattctgttagctttacataggtgttggaggattcctaaggtgtcagcattttgtaaaggtaccacaaaggagaagttgatagggaatctaattttagaatgtgccaaatggtctgtgctcaacaatataattgaactctctcaactctacctcaccatttctttatctcaaaattctgttggctttgtcaaacgttggattttatttctgcagcctagtatctccccattctaccacctatgccagatgttaaagacagcagatgttttgaggagaatggcattgtggagatgcagagatgcgttgctaagttgaggtggatccagtatagagatacctctatttcttctttatggctcaagagctaggacttggattaggcatgaaccactgtgcccagtctatatataatagattttagaagaaatttctgccactcagtgactgctttaaattctagagacagaggctgagagaaacttagtagcctgcctgcgcatactgcaagtacagactatataacaagttgaaagagaatcaccctggtatataatattttaaaacatgaaaaaggcattactattgttctggtctaagtactctaacaggacgatgatttctaaccctagcatcatgacatgtatatagtgtgttgtaagacatttgccagctaatagttacagtactgaagcttgtgaatacgttaattgagaaaactttaagcaggttcaaagttatcccatgatagtggcattcttatttgtatatatgtgctttccttttttatttgtatcaaggcatttaaaatgaatatatgtaacatgtacctaagttttaaaagcataataaaatgaacacatctgaaa

SEQ ID NO: 466190 - DNA, 4990 bp, Homo sapiens
gtccccgcgcgcggcgtggatcgcggcccaagccgccattgttccgccgagggaggacagcggggcctggcgctggcgccgagacgccgcttagcggccgccactggagacactccctcccgcctcccgggtctcctggcggcggcggagtgaggctgacagcggggaacctgggagacccctccgccctccccgcggtggcagcggccgatccccggctccggcgcgagggacggccgcgatgcgctcggcctgaggttacccggcccggcccttcctcgcttccctcgactattccactgcgtctccgcgccccggcgtcatcctgcgagtccctctgacgggagggaagatggctgcacggagctggcaggacgagctggcccagcaggccgaggagggctcggcccggctgcgggaaatgctctcggtcggcctaggctttctgcgcaccgagctgggcctcgacctggggctggagccgaaacggtaccccggctgggtgatcctggtgggcactggcgcgctcgggctgctgctgctgtttctgctgggctacggctgggccgcggcttgcgccggcgcccgcaaaaagcggaggagcccgccccgcaagcgggaggaggcggcggccgtgccggccgcggccccgacgacctggccttgctgaagaatctccggagcgaggaacagaagaagaagaaccggaagaaactgtccgagaagcccaaaccaaatgggcggactgttgaagtggctgagggtgaagctgttcgaacacctcaaagtgtaacagcaaagcagccaccagagattgacaagaaaaatgaaaagtcaaagaaaaataagaagaaatcaaagtcagatgctaaagcagtgcaaaacagttcacgccatgatggaaaggaagttgatgaaggagcctgggaaactaaaattagtcacagagagaaacgacagcagcgtaaacgtgataaggtgctgactgattctggttcattggattcaactatccctgggatagaaaataccatcacagttaccaccgagcaacttacaaccgcatcatttcctgttggttccaagaagaataaaggtgattctcatctaaatgttcaagttagcaactttaaatctggaaaaggagattctacacttcaggtttcttcaggattgaatgaaaacctcactgtcaatggaggaggctggaatgaaaagtctgtaaaactctcctcacagatcagtgcaggtgaggagaagtggaactccgtttcacctgcttctgcaggaaagaggaaaactgagccatctgcctggagtcaagacactggagatgctaatacaaatggaaaagactggggaaggagttggagtgaccgttcaatattttctggcattgggtctactgctgagccagtttctcagtctaccacttctgattatcagtgggatgttagccgtaatcaaccctatatcgatgatgaatggtctgggttaaatggtctgtcttctgctgatcccaactctgattggaatgcaccagcagaagagtggggcaattgggtagacgaagaaagagcttcacttctaaagtcccaggaaccaattcctgatgatcaaaaggtctcagatgatgataaagaaaagggagagggagctcttccaactgggaaatccaaaaagaaaaaaaagaaaaagaagaagcaaggtgaagataactctactgcacaggacacagaagaattagaaaaagagattagagaagaccttccagtgaatacctctaaaacccgtccaaaacaggaaaaagctttttccttgaagaccataagcactagtgatccagccgaagtactcgtcaaaaatagccagcctatcaagactcttccacctgctacttctaccgagccatctgtaatcttatcaaaaagtgattctgacaagagctcttcccaagtgccgccaatactacaagagacagataaatccaagtcaaataccaagcaaaatagtgtgcctccttcacagaccaagtctgaaactagctgggaatctcccaaacaaataaaaaagaagaaaaaagccagacgagaaacgtgaaattttttttcctgaattggacatgtgtttgcaaacacttgtcttgaagattatgctgtttatgcaataatttgtgaacatgtacagagttttatataaatttaaaccaatttttaaaacaaaactgcggacaccaccataaaaatggaatcaaaagaaagttaatttatgaaattaagaggtcagcagaatatactcagtgatggaagacacttgggaaagtctttttaatagaacaagaacgatcttaatttaagaatattatcctggtttaacaacagtgccctgtttacaacagattgtgccctatctcatctgcagccgaggaataaaggattctgattagaaagagggttgcctacagattagtaagcaattccttggatcttatgcacagaacttgtaccatttgaatctgttttatgcttaaatcaaagtgctttgatcaaatgcataacctgccatatctttacatatttgttggtagcaatttgtattaaagaaatcacaagtgcaaataaaaagtcatttatcatttgtttaactaaactgtcatggtttagtttacaatttttaaaaagttcttaaaatactgaaaatgcagttgacacttgtgtatggcttatgaagttatttttgatagtcttacattacttgaattgttcaaagtacagtatattttaaattaagaaaagtgaactatatgtatttgttttatacatttaaggcttagactcataaataatgctattgtttatgatttgaaaactttcaggcaaaatccaatttacatttttcccttccctagcaattacttttttccagcttcaactcttcttagttactaatactttgttgactttaaaaatgaaatcattcacaaacttttggtatatgatggagaatgaaaaactagagtcagacagctttaattgacattgtcaacacctccagttatcaggaatacatttttttactgccttaacctgtagtgcgtagaatatgcatcaatttcttgaaggagattcatgtttttataagaattttcatgtaattattgcaattgtggtcaaataaggaacgtttcctgcttgaaattatattgatttaaatgatgtgtgagatgtttcaccattttcaggcactgtgtaattctattgtaataaactggcaggtatctttgtaactataaatagtgcatgctcagccatgtacactgtaaatagcctttaccaaacgtgtttgacaaggaccataattaacatcacttagtgaattgtgataaagaaaaaaaagccatgatttattcgatgtgattggcttgtttttatgtggcgccaagaacgaacctgtttaacagctgtaaccaatggtactgatctatccatccaatgttgtcattatatttgactgtggttcaacagtattgcgttgtcagactaggaaagctaaacgaacaaaatggttttagttttgctgaagactggccttattaatggacagctttcctaacaagagattattaacttttatcaggtgttaacatctgtttcaggaacatggcagtatgtttacatgtcagaagttttgtttaattctatggtatttctaaattgacttgtttaaataaattcagcaaatggatagcattgttttttatttgcttcaatatgggggtagataatagctaaagagccaaggatgaatttcttcaaatgactttattctgttagctttacataggtgttggaggattcctaaggtgtcagcattttgtaaaggtaccacaaaggagaagttgatagggaatctaattttagaatgtgccaaatggtctgtgctcaacaatataattgaactctctcaactctacctcaccatttctttatctcaaaattctgttggctttgtcaaacgttggattttatttctgcagcctagtatctccccattctaccacctatgccagatgttaaagacagcagatgttttgaggagaatggcattgtggagatgcagagatgcgttgctaagttgaggtggatccagtatagagatacctctatttcttctttatggctcaagagctaggacttggattttgttttaagagatggcagctggccgggtgcagtggtcatgcctgtaatccaagctctttgggaggccaacgcgggaggattgtttgagcccaggagtttgaaaccatcctgagcaatagagagacccccatctcgacaaaaaaaaaaaaaaaaaattagaaacaaaaaaaagattgtttctctttcatattaaagtttgggaaggcaatccagagcccatatgacattatgcagggtcagggatccgggttctttctatattgttcctccccattctcaacctgtagctttttttttaatctcctttctaaagtggaagatgcgcgacccagaggggaggactccggtctcaaaaaaaaaaaaaaaaaaaaaaaaaaaaaaaaaaaaaaaaaaaaaaaaaaaaaaaaaaaaaaaaaaaaaaataatacatacaaacgaaaataaaagctaacttgaccaattcgccctatggtgaggggtattacaatttactggccgtcaatttacaacttgggtgctgggcaacccctggcgttccccaattttatggcctggcattatatccccctctcgccaggttcctttttttgccgaataggcccgtagggacggccttcccaacagttgccccgctctttatgccatgggtatttgaaggcccctctttttccccgcggccacatcccttctttttctaataaatggcccgaaatatgggtgagtggtcgctccgctcggaacatttgttcaaatttaaggaacgttttcttatcacacaggttattact

SEQ ID NO: 466191 - DNA, 3558 bp, Homo sapiens
  misc_feature (3544)..(3544): n is a, c, g, or t
gtccccgcgcgcggcgtggatcgcggcccaagccgccattgttccgccgagggaggacagcggggcctggcgctggcgccgagacgccgcttagcggccgccactggagacactccctcccgcctcccgggtctcctggcggcggcggagtgaggctgacagcggggaacctgggagacccctccgccctccccgcggtggcagcggccgatccccggctccggcgcgagggacggccgcgatgcgctcggcctgaggttacccggcccggcccttcctcgcttccctcgactattccactgcgtctccgcgccccggcgtcatcctgcgagtccctctgacgggagggaagatggctgcacggagctggcaggacgagctggcccagcaggccgaggagggctcggcccggctgcgggaaatgctctcggtcggcctaggctttctgcgcaccgagctgggcctcgacctggggctggagccgaaacggtaccccggctgggtgatcctggtgggcactggcgcgctcgggctgctgctgctgtttctgctgggctacggctgggccgcggcttgcgccggcgcccgcaaaaagcggaggagcccgccccgcaagcgggaggaggcggcggccgtgccggccgcggccccgacgacctggccttgctgaagaatctccggagcgaggaacagaagaagaagaaccggaagaaactgtccgagaagcccaaaccaaatgggcggactgttgaagtggctgagggtgaagctgttcgaacacctcaaagtgtaacagcaaagcagccaccagagattgacaagaaaaatgaaaagtcaaagaaaaataagaagaaatcaaagtcagatgctaaagcagtgcaaaacagttcacgccatgatggaaaggaagttgatgaaggagcctgggaaactaaaattagtcacagagagaaacgacagcagcgtaaacgtgataaggtgctgactgattctggttcattggattcaactatccctgggatagaaaataccatcacagttaccaccgagcaacttacaaccgcatcatttcctgttggttccaagaagaataaaggtgattctcatctaaatgttcaagttagcaactttaaatctggaaaaggagattctacacttcaggtttcttcaggattgaatgaaaacctcactgtcaatggaggaggctggaatgaaaagtctgtaaaactctcctcacagatcagtgcaggtgaggagaagtggaactccgtttcacctgcttctgcaggaaagaggaaaactgagccatctgcctggagtcaagacactggagatgctaatacaaatggaaaagactggggaaggagttggagtgaccgttcaatattttctggcattgggtctactgctgagccagtttctcagtctaccacttctgattatcagtgggatgttagccgtaatcaaccctatatcgatgatgaatggtctgggttaaatggtctgtcttctgctgatcccaactctgattggaatgcaccagcagaagagtggggcaattgggtagacgaagaaagagcttcacttctaaagtcccaggaaccaattcctgatgatcaaaaggtctcagatgatgataaagaaaagggagagggagctcttccaactgggaaatccaaaaagaaaaaaaagaaaaagaagaagcaaggtgaagataactctactgcacaggacacagaagaattagaaaaagagattagagaagaccttccagtgaatacctctaaaacccgtccaaaacaggaaaaagctttttccttgaagaccataagcactagtgatccagccgaagtactcgtcaaaaatagccagcctatcaagactcttccacctgctacttctaccgagccatctgtaatcttatcaaaaagtgattctgacaagagctcttcccaagtgccgccaatactacaagagacagataaatccaagtcaaataccaagcaaaatagtgtgcctccttcacagaccaagtctgaaactagctgggaatctcccaaacaaataaaaaagaagaaaaaagccagacgagaaacgtgaaattttttttcctgaattggacatgtgtttgcaaacacttgtcttgaagattatgctgtttatgcaataatttgtgaacatgtacagagttttatataaatttaaaccaatttttaaaacaaaactgcggacaccaccataaaaatggaatcaaaagaaagttaatttatgaaattaagaggtcagcagaatatactcagtgatggaagacacttgggaaagtctttttaatagaacaagaacgatcttaatttaagaatattatcctggtttaacaacagtgccctgtttacaacagattgtgccctatctcatctgcagccgaggaataaaggattctgattagaaagagggttgcctacagattagtaagcaattccttggatcttatgcacagaacttgtaccatttgaatctgttttatgcttaaatcaaagtgctttgatcaaatgcataacctgccatatctttacatatttgttggtagcaatttgtattaaagaaatcacaagtgcaaataaaaagtcatttatcatttgtttaactaaactgtcatggtttagtttacaatttttaaaaagttcttaaaatactgaaaatgcagttgacacttgtgtatggcttatgaagttatttttgatagtcttacattacttgaattgttcaaagtacagtatattttaaattaagaaaagtgaactatatgtatttgttttatacatttaaggcttagactcataaataatgctattgtttatgatttgaaaactttcaggcaaaatccaatttacatttttcccttccctagcaattacttttttccagcttcaactcttcttagttactaatactttgttgactttaaaaatgaaatcattcacaaacttttggtatatgatggagaatgaaaaactagagtcagacagctttaattgacattgtcaacacctccagttatcaggaatacatttttttactgccttaacctgtagtgcgtagaatatgcatcaatttcttgaaggagattcatgtttttataagaattttcatgtaattattgcaattgtggtcaaataaggaacgtttcctgcttgaaattatattgatttaaatgatgtgtgagatgtttcaccattttcaggcactgtgtaattctattgtaataaactggcaggtatctttgtaactataaatagtgcatgctcagccatgtacactgtaaatagcctttaccaaacgtgtttgacaaggaccataattaacatcacttagtgaattgtgataaagaaaaaaaagccatgatttattcgatgtgattggcttgtttttatgtggcgccaagaacgaacctgtttaacagctgtaaccaatggtactgatctatccatccaatgttgtcattatatttgactgtggttcaacagtattgactgttcatataatnggttcctgccgcta

SEQ ID NO: 466192 - DNA, 4602 bp, Homo sapiens
gaaagaggaaaactgagccatctgcctggagtcaagacactggagatgctaatacaaatggaaaagactggggaaggagttgggggtgaagctgttcgaacacctcaaagtgtaacagcaaagcagccaccagagattgacaagaaaaatgaaaagtcaaagaaaaataagaagaaatcaaagtcagatgctaaagcagtgcaaaacagttcacgccatgatggaaaggaagttgatgaaggagcctgggaaactaaaattagtcacagagagaaacgacagcagcgtaaacgtgataaggtgctgactgattctggttcattggattcaactatccctgggatagaaaataccatcacagttaccaccgagcaacttacaaccgcatcatttcctgttggttccaagaagaataaaggtgattctcatctaaatgttcaagttagcaactttaaatctggaaaaggagattctacacttcaggtttcttcaggattgaatgaaaacctcactgtcaatggaggaggctggaatgaaaagtctgtaaaactctcctcacagatcagtgcaggtgaggagaagtggaactccgtttcacctgcttctgcaggaaagaggaaaactgagccatctgcctggagtcaagacactggagatgctaatacaaatggaaaagactggggaaggagttggagtgaccgttcaatattttctggcattgggtctactgctgagccagtttctcagtctaccacttctgattatcagtgggatgttagccgtaatcaaccctatatcgatgatgaatggtctgggttaaatggtctgtcttctgctgatcccaactctgattggaatgcaccagcagaagagtggggcaattgggtagacgaagaaagagcttcacttctaaagtcccaggaaccaattcctgatgatcaaaaggtctcagatgatgataaagaaaagggagagggagctcttccaactgggaaatccaaaaagaaaaaaaagaaaaagaagaagcaaggtgaagataactctactgcacaggacacagaagaattagaaaaagagattagagaagaccttccagtgaatacctctaaaacccgtccaaaacaggaaaaagctttttccttgaagaccataagcactagtgatccagccgaagtactcgtcaaaaatagccagcctatcaagactcttccacctgctacttctaccgagccatctgtaatcttatcaaaaagtgattctgacaagagctcttcccaagtgccgccaatactacaagagacagataaatccaagtcaaataccaagcaaaatagtgtgcctccttcacagaccaagtctgaaactagctgggaatctcccaaacaaataaaaaagaagaaaaaagccagacgagaaacgtgaaattttttttcctgaattggacatgtgtttgcaaacacttgtcttgaagattatgctgtttatgcaataatttgtgaacatgtacagagttttatataaatttaaaccaatttttaaaacaaaactgcggacaccaccataaaaatggaatcaaaagaaagttaatttatgaaattaagaggtcagcagaatatactcagtgatggaagacacttgggaaagtctttttaatagaacaagaacgatcttaatttaagaatattatcctggtttaacaacagtgccctgtttacaacagattgtgccctatctcatctgcagccgaggaataaaggattctgattagaaagagggttgcctacagattagtaagcaattccttggatcttatgcacagaacttgtaccatttgaatctgttttatgcttaaatcaaagtgctttgatcaaatgcataacctgccatatctttacatatttgttggtagcaatttgtattaaagaaatcacaagtgcaaataaaaagtcatttatcatttgtttaactaaactgtcatggtttagtttacaatttttaaaaagttcttaaaatactgaaaatgcagttgacacttgtgtatggcttatgaagttatttttgatagtcttacattacttgaattgttcaaagtacagtatattttaaattaagaaaagtgaactatatgtatttgttttatacatttaaggcttagactcataaataatgctattgtttatgatttgaaaactttcaggcaaaatccaatttacatttttcccttccctagcaattacttttttccagcttcaactcttcttagttactaatactttgttgactttaaaaatgaaatcattcacaaacttttggtatatgatggagaatgaaaaactagagtcagacagctttaattgacattgtcaacacctccagttatcaggaatacatttttttactgccttaacctgtagtgcgtagaatatgcatcaatttcttgaaggagattcatgtttttataagaattttcatgtaattattgcaattgtggtcaaataaggaacgtttcctgcttgaaattatattgatttaaatgatgtgtgagatgtttcaccattttcaggcactgtgtaattctattgtaataaactggcaggtatctttgtaactataaatagtgcatgctcagccatgtacactgtaaatagcctttaccaaacgtgtttgacaaggaccataattaacatcacttagtgaattgtgataaagaaaaaaaagccatgatttattcgatgtgattggcttgtttttatgtggcgccaagaacgaacctgtttaacagctgtaaccaatggtactgatctatccatccaatgttgtcattatatttgactgtggttcaacagtattgcgttgtcagactaggaaagctaaacgaacaaaatggttttagttttgctgaagactggccttattaatggacagctttcctaacaagagattattaacttttatcaggtgttaacatctgtttcaggaacatggcagtatgtttacatgtcagaagttttgtttaattctatggtatttctaaattgacttgtttaaataaattcagcaaatggatagcattgttttttatttgcttcaatatgggggtagataatagctaaagagccaaggatgaatttcttcaaatgactttattctgttagctttacataggtgttggaggattcctaaggtgtcagcattttgtaaaggtaccacaaaggagaagttgatagggaatctaattttagaatgtgccaaatggtctgtgctcaacaatataattgaactctctcaactctacctcaccatttctttatctcaaaattctgttggctttgtcaaacgttggattttatttctgcagcctagtatctccccattctaccacctatgccagatgttaaagacagcagatgttttgaggagaatggcattgtggagatgcagagatgcgttgctaagttgaggtggatccagtatagagatacctctatttcttctttatggctcaagagctaggacttggattcttggcctcccaaagtgctggtgttacaggtgtgagccaccacacctggccaacatgtggctttcagttcttacttgaagacagctgctctagctagaaacttcctatcggcatctgagccagctggtagagggcattacctcccccacccccaagaacacttcttggaagttacacacaatacataaacttcaatttcaaacagttgcttggtcccactagccatgaagctggatgggacgtaatattctatctgggttgtcatgggccaaattaacattttgagattctgttaggaagatgagaattggataatgggcacctctaacagtgtctgtcagagttgacatacattgtgtatctcctgcaccaaagcatttttgagatcaagtgttcttccagctgagcagaaatttggaaggctattcagtgctgcttagtgtagcagctaataatgttccaacttctatatgatagtttgctttttgttttttgtttttttctagagacagagtctcgttgcccaggctggtctccaattcctgggttcaagcaatcctcctgactcagcctcctaaatgctgggattacaggcatgaaccactgtgcccagtctatatataatagattttagaagaaatttctgccactcagtgactgctttaaattctagagacagaggctgagagaaacttagtagcctgcctgcgcatactgcaagtacagactatataacaagttgaaagagaatcaccctggtatataatattttaaaacatgaaaaaggcattactattgttctggtctaagtactctaacaggacgatgatttctaaccctagcatcatgacatgtatatagtgtgttgtaagacatttgccagctaatagttacagtactgaagcttgtgaatacgttaattgagaaaactttaagcaggttcaaagttatcccatgatagtggcattcttatttgtatatatgtgctttccttttttatttgtatcaaggcatttaaaatgaatatatgtaacatgtacctaagttttaaaagcataataaaatgaacacatctgaaa

SEQ ID NO: 466193 - DNA, 4165 bp, Homo sapiens
ccgccggctctagaggaccccttcgattggcgggcaacttacaaccgcatcatttcctgttggttccaagaagaataaaggtgattctcatctaaatgttcaagttagcaactttaaatctggaaaaggagattctacacttcaggtttcttcaggattgaatgaaaacctcactgtcaatggaggaggctggaatgaaaagtctgtaaaactctcctcacagatcagtgcaggtgaggagaagtggaactccgtttcacctgcttctgcaggaaagaggaaaactgagccatctgcctggagtcaagacactggagatgctaatacaaatggaaaagactggggaaggagttggagtgaccgttcaatattttctggcattgatggtctgtcttctgctgatcccaactctgattggaatgcaccagcagaagagtggggcaattgggtagacgaagaaagagcttcacttctaaagtcccaggaaccaattcctgatgatcaaaaggtctcagatgatgataaagaaaagggagagggagctcttccaactgggaaatccaaaaagaaaaaaaagaaaaagaagaagcaaggtgaagataactctactgcacaggacacagaagaattagaaaaagagattagagaagaccttccagtgaatacctctaaaacccgtccaaaacaggaaaaagctttttccttgaagaccataagcactagtgatccagccgaagtactcgtcaaaaatagccagcctatcaagactcttccacctgctacttctaccgagccatctgtaatcttatcaaaaagtgattctgacaagagctcttcccaagtgccgccaatactacaagagacagataaatccaagtcaaataccaagcaaaatagtgtgcctccttcacagaccaagtctgaaactagctgggaatctcccaaacaaataaaaaagaagaaaaaagccagacgagaaacgtgaaattttttttcctgaattggacatgtgtttgcaaacacttgtcttgaagattatgctgtttatgcaataatttgtgaacatgtacagagttttatataaatttaaaccaatttttaaaacaaaactgcggacaccaccataaaaatggaatcaaaagaaagttaatttatgaaattaagaggtcagcagaatatactcagtgatggaagacacttgggaaagtctttttaatagaacaagaacgatcttaatttaagaatattatcctggtttaacaacagtgccctgtttacaacagattgtgccctatctcatctgcagccgaggaataaaggattctgattagaaagagggttgcctacagattagtaagcaattccttggatcttatgcacagaacttgtaccatttgaatctgttttatgcttaaatcaaagtgctttgatcaaatgcataacctgccatatctttacatatttgttggtagcaatttgtattaaagaaatcacaagtgcaaataaaaagtcatttatcatttgtttaactaaactgtcatggtttagtttacaatttttaaaaagttcttaaaatactgaaaatgcagttgacacttgtgtatggcttatgaagttatttttgatagtcttacattacttgaattgttcaaagtacagtatattttaaattaagaaaagtgaactatatgtatttgttttatacatttaaggcttagactcataaataatgctattgtttatgatttgaaaactttcaggcaaaatccaatttacatttttcccttccctagcaattacttttttccagcttcaactcttcttagttactaatactttgttgactttaaaaatgaaatcattcacaaacttttggtatatgatggagaatgaaaaactagagtcagacagctttaattgacattgtcaacacctccagttatcaggaatacatttttttactgccttaacctgtagtgcgtagaatatgcatcaatttcttgaaggagattcatgtttttataagaattttcatgtaattattgcaattgtggtcaaataaggaacgtttcctgcttgaaattatattgatttaaatgatgtgtgagatgtttcaccattttcaggcactgtgtaattctattgtaataaactggcaggtatctttgtaactataaatagtgcatgctcagccatgtacactgtaaatagcctttaccaaacgtgtttgacaaggaccataattaacatcacttagtgaattgtgataaagaaaaaaaagccatgatttattcgatgtgattggcttgtttttatgtggcgccaagaacgaacctgtttaacagctgtaaccaatggtactgatctatccatccaatgttgtcattatatttgactgtggttcaacagtattgcgttgtcagactaggaaagctaaacgaacaaaatggttttagttttgctgaagactggccttattaatggacagctttcctaacaagagattattaacttttatcaggtgttaacatctgtttcaggaacatggcagtatgtttacatgtcagaagttttgtttaattctatggtatttctaaattgacttgtttaaataaattcagcaaatggatagcattgttttttatttgcttcaatatgggggtagataatagctaaagagccaaggatgaatttcttcaaatgactttattctgttagctttacataggtgttggaggattcctaaggtgtcagcattttgtaaaggtaccacaaaggagaagttgatagggaatctaattttagaatgtgccaaatggtctgtgctcaacaatataattgaactctctcaactctacctcaccatttctttatctcaaaattctgttggctttgtcaaacgttggattttatttctgcagcctagtatctccccattctaccacctatgccagatgttaaagacagcagatgttttgaggagaatggcattgtggagatgcagagatgcgttgctaagttgaggtggatccagtatagagatacctctatttcttctttatggctcaagagctaggacttggattcttggcctcccaaagtgctggtgttacaggtgtgagccaccacacctggccaacatgtggctttcagttcttacttgaagacagctgctctagctagaaacttcctatcggcatctgagccagctggtagagggcattacctcccccacccccaagaacacttcttggaagttacacacaatacataaacttcaatttcaaacagttgcttggtcccactagccatgaagctggatgggacgtaatattctatctgggttgtcatgggccaaattaacattttgagattctgttaggaagatgagaattggataatgggcacctctaacagtgtctgtcagagttgacatacattgtgtatctcctgcaccaaagcatttttgagatcaagtgttcttccagctgagcagaaatttggaaggctattcagtgctgcttagtgtagcagctaataatgttccaacttctatatgatagtttgctttttgttttttgtttttttctagagacagagtctcgttgcccaggctggtctccaattcctgggttcaagcaatcctcctgactcagcctcctaaatgctgggattacaggcatgaaccactgtgcccagtctatatataatagattttagaagaaatttctgccactcagtgactgctttaaattctagagacagaggctgagagaaacttagtagcctgcctgcgcatactgcaagtacagactatataacaagttgaaagagaatcaccctggtatataatattttaaaacatgaaaaaggcattactattgttctggtctaagtactctaacaggacgatgatttctaaccctagcatcatgacatgtatatagtgtgttgtaagacatttgccagctaatagttacagtactgaagcttgtgaatacgttaattgagaaaactttaagcaggttcaaagttatcccatgatagtggcattcttatttgtatatatgtgctttccttttttatttgtatcaaggcatttaaaatgaatatatgtaacatgtacctaagttttaaaagcataataaaatgaacacatctgaaa

SEQ ID NO: 466194 - DNA, 4143 bp, Homo sapiens
taaattcgcggccgcgtcgacgtgattctcatctaaatgttcaagttagcaactttaaatctggaaaaggagattctacacttcaggtttcttcaggattgaatgaaaacctcactgtcaatggaggaggctggaatgaaaagtctgtaaaactctcctcacagatcagtgcaggtgaggagaagtggaactccgtttcacctgcttctgcaggaaagaggaaaactgagccatctgcctggagtcaagacactggagatgctaatacaaatggaaaagactggggaaggagttggagtgaccgttcaatattttctggcattgaatcaaccctatatcgatgatgaatggtctgggttaaatggtctgtcttctgctgatcccaactctgattggaatgcaccagcagaagagtggggcaattgggtagacgaagaaagagcttcacttctaaagtcccaggaaccaattcctgatgatcaaaaggtctcagatgatgataaagaaaagggagagggagctcttccaactgggaaatccaaaaagaaaaaaaagaaaaagaagaagcaaggtgaagataactctactgcacaggacacagaagaattagaaaaagagattagagaagaccttccagtgaatacctctaaaacccgtccaaaacaggaaaaagctttttccttgaagaccataagcactagtgatccagccgaagtactcgtcaaaaatagccagcctatcaagactcttccacctgctacttctaccgagccatctgtaatcttatcaaaaagtgattctgacaagagctcttcccaagtgccgccaatactacaagagacagataaatccaagtcaaataccaagcaaaatagtgtgcctccttcacagaccaagtctgaaactagctgggaatctcccaaacaaataaaaaagaagaaaaaagccagacgagaaacgtgaaattttttttcctgaattggacatgtgtttgcaaacacttgtcttgaagattatgctgtttatgcaataatttgtgaacatgtacagagttttatataaatttaaaccaatttttaaaacaaaactgcggacaccaccataaaaatggaatcaaaagaaagttaatttatgaaattaagaggtcagcagaatatactcagtgatggaagacacttgggaaagtctttttaatagaacaagaacgatcttaatttaagaatattatcctggtttaacaacagtgccctgtttacaacagattgtgccctatctcatctgcagccgaggaataaaggattctgattagaaagagggttgcctacagattagtaagcaattccttggatcttatgcacagaacttgtaccatttgaatctgttttatgcttaaatcaaagtgctttgatcaaatgcataacctgccatatctttacatatttgttggtagcaatttgtattaaagaaatcacaagtgcaaataaaaagtcatttatcatttgtttaactaaactgtcatggtttagtttacaatttttaaaaagttcttaaaatactgaaaatgcagttgacacttgtgtatggcttatgaagttatttttgatagtcttacattacttgaattgttcaaagtacagtatattttaaattaagaaaagtgaactatatgtatttgttttatacatttaaggcttagactcataaataatgctattgtttatgatttgaaaactttcaggcaaaatccaatttacatttttcccttccctagcaattacttttttccagcttcaactcttcttagttactaatactttgttgactttaaaaatgaaatcattcacaaacttttggtatatgatggagaatgaaaaactagagtcagacagctttaattgacattgtcaacacctccagttatcaggaatacatttttttactgccttaacctgtagtgcgtagaatatgcatcaatttcttgaaggagattcatgtttttataagaattttcatgtaattattgcaattgtggtcaaataaggaacgtttcctgcttgaaattatattgatttaaatgatgtgtgagatgtttcaccattttcaggcactgtgtaattctattgtaataaactggcaggtatctttgtaactataaatagtgcatgctcagccatgtacactgtaaatagcctttaccaaacgtgtttgacaaggaccataattaacatcacttagtgaattgtgataaagaaaaaaaagccatgatttattcgatgtgattggcttgtttttatgtggcgccaagaacgaacctgtttaacagctgtaaccaatggtactgatctatccatccaatgttgtcattatatttgactgtggttcaacagtattgcgttgtcagactaggaaagctaaacgaacaaaatggttttagttttgctgaagactggccttattaatggacagctttcctaacaagagattattaacttttatcaggtgttaacatctgtttcaggaacatggcagtatgtttacatgtcagaagttttgtttaattctatggtatttctaaattgacttgtttaaataaattcagcaaatggatagcattgttttttatttgcttcaatatgggggtagataatagctaaagagccaaggatgaatttcttcaaatgactttattctgttagctttacataggtgttggaggattcctaaggtgtcagcattttgtaaaggtaccacaaaggagaagttgatagggaatctaattttagaatgtgccaaatggtctgtgctcaacaatataattgaactctctcaactctacctcaccatttctttatctcaaaattctgttggctttgtcaaacgttggattttatttctgcagcctagtatctccccattctaccacctatgccagatgttaaagacagcagatgttttgaggagaatggcattgtggagatgcagagatgcgttgctaagttgaggtggatccagtatagagatacctctatttcttctttatggctcaagagctaggacttggattcttggcctcccaaagtgctggtgttacaggtgtgagccaccacacctggccaacatgtggctttcagttcttacttgaagacagctgctctagctagaaacttcctatcggcatctgagccagctggtagagggcattacctcccccacccccaagaacacttcttggaagttacacacaatacataaacttcaatttcaaacagttgcttggtcccactagccatgaagctggatgggacgtaatattctatctgggttgtcatgggccaaattaacattttgagattctgttaggaagatgagaattggataatgggcacctctaacagtgtctgtcagagttgacatacattgtgtatctcctgcaccaaagcatttttgagatcaagtgttcttccagctgagcagaaatttggaaggctattcagtgctgcttagtgtagcagctaataatgttccaacttctatatgatagtttgctttttgttttttgtttttttctagagacagagtctcgttgcccaggctggtctccaattcctgggttcaagcaatcctcctgactcagcctcctaaatgctgggattacaggcatgaaccactgtgcccagtctatatataatagattttagaagaaatttctgccactcagtgactgctttaaattctagagacagaggctgagagaaacttagtagcctgcctgcgcatactgcaagtacagactatataacaagttgaaagagaatcaccctggtatataatattttaaaacatgaaaaaggcattactattgttctggtctaagtactctaacaggacgatgatttctaaccctagcatcatgacatgtatatagtgtgttgtaagacatttgccagctaatagttacagtactgaagcttgtgaatacgttaattgagaaaactttaagcaggttcaaagttatcccatgatagtggcattcttatttgtatatatgtgctttccttttttatttgtatcaaggcatttaaaatgaatatatgtaacatgtacctaagttttaaaagcataataaaatgaacacatctgaaa

SEQ ID NO: 466195 - DNA, 2469 bp, Homo sapiens
gtccccgcgcgcggcgtggatcgcggcccaagccgccattgttccgccgagggaggacagcggggcctggcgctggcgccgagacgccgcttagcggccgccactggagacactccctcccgcctcccgggtctcctggcggcggcggagtgaggctgacagcggggaacctgggagacccctccgccctccccgcggtggcagcggccgatccccggctccggcgcgagggacggccgcgatgcgctcggcctgaggttacccggcccggcccttcctcgcttccctcgactattccactgcgtctccgcgccccggcgtcatcctgcgagtccctctgacgggagggaagatggctgcacggagctggcaggacgagctggcccagcaggccgaggagggctcggcccggctgcgggaaatgctctcggtcggcctaggctttctgcgcaccgagctgggcctcgacctggggctggagccgaaacggtaccccggctgggtgatcctggtgggcactggcgcgctcgggctgctgctgctgtttctgctgggctacggctgggccgcggcttgcgccggcgcccgcaaaaagcggaggagcccgccccgcaagcgggaggaggcggcggccgtgccggccgcggccccgacgacctggccttgctgaagaatctccggagcgaggaacagaagaagaagaaccggaagaaactgtccgagaagcccaaaccaaatgggcggactgttgaagtggctgagggtgaagctgttcgaacacctcaaagtgtaacagcaaagcagccaccagagattgacaagaaaaatgaaaagtcaaagaaaaataagaagaaatcaaagtcagatgctaaagcagtgcaaaacagttcacgccatgatggaaaggaagttgatgaaggagcctgggaaactaaaattagtcacagagagaaacgacagcagcgtaaacgtgataaggtgctgactgattctggttcattggattcaactatccctgggatagaaaataccatcacagttaccaccgagcaacttacaaccgcatcatttcctgttggttccaagaagaataaaggtgattctcatctaaatgttcaagttagcaactttaaatctggaaaaggagattctacacttcaggtttcttcaggattgaatgaaaacctcactgtcaatggaggaggctggaatgaaaagtctgtaaaactctcctcacagatcagtgcaggtgaggagaagtggaactccgtttcacctgcttctgcaggaaagaggaaaactgagccatctgcctggagtcaagacactggagatgctaatacaaatggaaaagactggggaaggagttggagtgaccgttcaatattttctggcattgggtctactgctgagccagtttctcagtctaccacttctgattatcagtgggatgttagccgtaatcaaccctatatcgatgatgaatggtctgggttaaatggtctgtcttctgctgatcccaactctgattggaatgcaccagcagaagagtggggcaattgggtagacgaagaaagagcttcacttctaaagtcccaggaaccaattcctgatgatcaaaaggtctcagatgatgataaagaaaagggagagggagctcttccaactgggaaatccaaaaagaaaaaaaagaaaaagaagaagcaaggtgaagataactctactgcacaggacacagaagaattagaaaaagagattagagaagaccttccagtgaatacctctaaaacccgtccaaaacaggaaaaagctttttccttgaagaccataagcactagtgatccagccgaagtactcgtcaaaaatagccagcctatcaagactcttccacctgctacttctaccgagccatctgtaatcttatcaaaaagtgattctgacaagagctcttcccaagtgccgccaatactacaagagacagataaatccaagtcaaataccaagcaaaatagtgtgcctccttcacagaccaagtctgaaactagctgggaatctcccaaacaaataaaaaagaagaaaaaagccagacgagaaacgtgaaattttttttcctgaattggacatgtgtttgcaaacacttgtcttgaagattatgctgtttatgcaataatttgtgaacatgtacagagttttatataaatttaaaccaatttttaaaacaaaactgcggacaccaccataaaaatggaatcaaaagaaagttaatttatgaaattaagaggtcagcagaatatactcagtgatggaagacacttgggaaagtctttttaatagaacaagaacgatcttaatttaagaatattatcctggtttaacaacagtgccctgtttacaacagattgtgccctatctcatctgcagcctgtgtaagctattataattaaaatggttttccggaaaaaaaaaaaa

SEQ ID NO: 466196 - DNA, 1930 bp, Homo sapiens
  misc_feature (1640)..(1640): n is a, c, g, or t
  misc_feature (1643)..(1643): n is a, c, g, or t
  misc_feature (1930)..(1930): n is a, c, g, or t
gtccccgcgcgcggcgtggatcgcggcccaagccgccattgttccgccgagggaggacagcggggcctggcgctggcgccgagacgccgcttagcggccgccactggagacactccctcccgcctcccgggtctcctggcggcggcggagtgaggctgacagcggggaacctgggagacccctccgccctccccgcggtggcagcggccgatccccggctccggcgcgagggacggccgcgatgcgctcggcctgaggttacccggcccggcccttcctcgcttccctcgactattccactgcgtctccgcgccccggcgtcatcctgcgagtccctctgacgggagggaagatggctgcacggagctggcaggacgagctggcccagcaggccgaggagggctcggcccggctgcgggaaatgctctcggtcggcctaggctttctgcgcaccgagctgggcctcgacctggggctggagccgaaacggtaccccggctgggtgatcctggtgggcactggcgcgctcgggctgctgctgctgtttctgctgggctacggctgggccgcggcttgcgccggcgcccgcaaaaagcggaggagcccgccccgcaagcgggaggaggcggcggccgtgccggccgcggccccgacgacctggccttgctgaagaatctccggagcgaggaacagaagaagaagaaccggaagaaactgtccgagaagcccaaaccaaatgggcggactgttgaagtggctgagggtgaagctgttcgaacacctcaaagtgtaacagcaaagcagccaccagagattgacaagaaaaatgaaaagtcaaagaaaaataagaagaaatcaaagtcagatgctaaagcagtgcaaaacagttcacgccatgatggaaaggaagttgatgaaggagcctgggaaactaaaattagtcacagagagaaacgacagcagcgtaaacgtgataaggtgctgactgattctggttcattggattcaactatccctgggatagaaaataccatcacagttaccaccgagcaacttacaaccgcatcatttcctgttggttccaagaagaataaaggtgattctcatctaaatgttcaagttagcaactttaaatctggaaaaggagattctacacttcaggtttcttcaggattgaatgaaaacctcactgtcaatggaggaggctggaatgaaaagtctgtaaaactctcctcacagatcagtgcaggtgaggagaagtggaactccgtttcacctgcttctgcaggaaagaggaaaactgagccatctgcctggagtcaagacactggagatgctaatacaaatggaaaagactggggaaggagttggagtgaccgttcaatattttctggcattgggtctactgctgagccagtttctcagtctaccacttctgattatcagtgggatgttagccgtaatcaaccctatatcgatgatgaatggtctgggttaaatggtctgtcttctgctgatcccaactctgattggaatgcaccagcagaagagtggggcaattgggtagacgaagaaagagcttcacttctaaagtcccaggaaccaattcctgatgatcaaaaggtctcagatgatgatanganagggagagggagctcttcactgggacatccacagaaaaagcaacgcagagccggggagatactctacggacggaaccgaggatagaaagagataaggagactcaggaaaactataacggcaaaaggaaaggtacctgaagcaaagaggtacacgagagcggagaatgggactataattccggttaggactgattaaagagagggagccggccaaaaagaaacacagacaggcacagagagacacaaaaaaagacgagtgttatctataacaccacaaagtaaaggan

SEQ ID NO: 466197 - DNA, 1578 bp, Homo sapiens
gtccccgcgcgcggcgtggatcgcggcccaagccgccattgttccgccgagggaggacagcggggcctggcgctggcgccgagacgccgcttagcggccgccactggagacactccctcccgcctcccgggtctcctggcggcggcggagtgaggctgacagcggggaacctgggagacccctccgccctccccgcggtggcagcggccgatccccggctccggcgcgagggacggccgcgatgcgctcggcctgaggttacccggcccggcccttcctcgcttccctcgactattccactgcgtctccgcgccccggcgtcatcctgcgagtccctctgacgggagggaagatggctgcacggagctggcaggacgagctggcccagcaggccgaggagggctcggcccggctgcgggaaatgctctcggtcggcctaggctttctgcgcaccgagctgggcctcgacctggggctggagccgaaacggtaccccggctgggtgatcctggtgggcactggcgcgctcgggctgctgctgctgtttctgctgggctacggctgggccgcggcttgcgccggcgcccgcaaaaagcggaggagcccgccccgcaagcgggaggaggcggcggccgtgccggccgcggccccgacgacctggccttgctgaagaatctccggagcgaggaacagaagaagaagaaccggaagaaactgtccgagaagcccaaaccaaatgggcggactgttgaagtggctgagggtgaagctgttcgaacacctcaaagtgtaacagcaaagcagccaccagagattgacaagaaaaatgaaaagtcaaagaaaaataagaagaaatcaaagtcagatgctaaagcagtgcaaaacagttcacgccatgatggaaaggaagttgatgaaggagcctgggaaactaaaattagtcacagagagaaacgacagcagcgtaaacgtgataaggtgctgactgattctggttcattggattcaactatccctgggatagaaaataccatcacagttaccaccgagcaacttacaaccgcatcatttcctgttggttccaagaagaataaaggtgattctcatctaaatgttcaagttagcaactttaaatctggaaaaggagattctacacttcaggtttcttcaggattgaatgaaaacctcactgtcaatggaggaggctggaatgaaaagtctgtaaaactctcctcacagatcagtgcaggtgaggagaagtggaactccgtttcacctgcttctgcaggaaagaggaaaactgagccatctgcctggagtcaagacactggagatgctaatacaaatggaaaagactggggaaggagttggagtgaccgttcaatattttctggcattgggtctactgctgagccagtttctcagtctaccacttctgattatcagtgggatgttagccgtaatcaaccctatatcgatgatgaatggtctgggttaaatggtctgtcttctgctgatcccattcccagccacatggcagagaaaaaaatcataataaaatggctttattttctggta

SEQ ID NO: 466198 - DNA, 1829 bp, Homo sapiens
gtccccgcgcgcggcgtggatcgcggcccaagccgccattgttccgccgagggaggacagcggggcctggcgctggcgccgagacgccgcttagcggccgccactggagacactccctcccgcctcccgggtctcctggcggcggcggagtgaggctgacagcggggaacctgggagacccctccgccctccccgcggtggcagcggccgatccccggctccggcgcgagggacggccgcgatgcgctcggcctgaggttacccggcccggcccttcctcgcttccctcgactattccactgcgtctccgcgccccggcgtcatcctgcgagtccctctgacgggagggaagatggctgcacggagctggcaggacgagctggcccagcaggccgaggagggctcggcccggctgcgggaaatgctctcggtcggcctaggctttctgcgcaccgagctgggcctcgacctggggctggagccgaaacggtaccccggctgggtgatcctggtgggcactggcgcgctcgggctgctgctgctgtttctgctgggctacggctgggccgcggcttgcgccggcgcccgcaaaaagcggaggagcccgccccgcaagcgggaggaggcggcggccgtgccggccgcggccccgacgacctggccttgctgaagaatctccggagcgaggaacagaagaagaagaaccggaagaaactgtccgagaagcccaaaccaaatgggcggactgttgaagtggctgagggtgaagctgttcgaacacctcaaagtgtaacagcaaagcagccaccagagattgacaagaaaaatgaaaagtcaaagaaaaataagaagaaatcaaagtcagatgctaaagcagtgcaaaacagttcacgccatgatggaaaggaagttgatgaaggagcctgggaaactaaaattagtcacagagagaaacgacagcagcgtaaacgtgataaggtgctgactgattctggttcattggattcaactatccctgggatagaaaataccatcacagttaccaccgagcaacttacaaccgcatcatttcctgttggttccaagaagaataaaggtgattctcatctaaatgttcaagttagcaactttaaatctggaaaaggagattctacacttcaggtttcttcaggattgaatgaaaacctcactgtcaatggaggaggctggaatgaaaagtctgtaaaactctcctcacagatcagtgcaggtgaggagaagtggaactccgtttcacctgcttctgcaggaaagaggaaaactgagccatctgcctggagtcaagacactggagatgctaatacaaatggaaaagactggggaaggagttggagtgaccgttcaatattttctggcattgtggtaagaagtgttagaaaaatttaactttatttaaaattactaatcttgtacatttttaatttttcagaaatagaaaaaaaaactatgaatagaaaaataagtactgctctgcagaaataatagtaataattaactcatctcacatcctttttgtagagcaaggtgggaattaaataagtaaataacatcatttactctttacatagtgctttcacatactttatcacatttgattatcaacatagctaactggtgtaattatatattcttagtgatgtgatacatgtaatgtgtgggtagactttttgattaatttcaacaattctgttgagtctaaataaaaatagtaaatggaagtacagttgataacatccacttatattttacagttgcacttcagcctgggtgacagagtgagatcctgtctc

SEQ ID NO: 466199 - DNA, 719 bp, Homo sapiens
gacaatgtttatgtaagcagcagaaatgccttttacctcccactgtgattctgaggccccctcagccatgtggaattgtgaatacttggcaggacaacaggcagacaaggagcagcctgggctacaccctcctccatccagcttggcagggaaggtcttggtgcctcagttgaaacttccaatttaacatcctgacacacactactccctcttcctgtgatcatcagaacaagataaaaccttgtgtgtctggatagttctcatctgttaagattcaggtaaagaaacgccttctttgggaagttgtttatatcctcttccatcagactgagctaattattcctcttcaaacccacacagtgttccatgtaaactattatagtctttgctacactgagtcactctggaatcagatgccaagattcaagtcttcctttcacgaactatatgatcttggggtattcttccccttttagagcctgagttttttaaacttaccttttggagtttttgtcagaattaagttagatgattttaaggtatattaagttcttagatcagtccctgagagaactgaggtgacatttattttgtcactgaacatctgtatgtgtttggggagaaaggaagtgtgggctatattctggaaggacaagacagcagtgtgttaattattatgtaaggagtgagaaatgtcatatgtttttcttaaaatttct

SEQ ID NO: 466200 - DNA, 1601 bp, Homo sapiens
tctgtggattctttcagctttcctggtatgttcttgtggcagttcttagagcaaaagttcatggtgtgtgtctacacatgccactctgtccgacctagtgggggctgcaagttagttttgcctcctatccgccattttccctctattggaagtacacttgaagtgagagtacctttggaaaagattggtgactcttggaactgggtgcctggaaaagccatggacactcaatgccagcccatgaatgcagcggggagggaggctgtaccctgcaaagccacaggggtggagctgcccaagactatgggaacccacctcttgcatcagcatgacctggatgtgagacctggagtcaaaggagatcatcttgcagctttaagatttgactgccctgcttgatttcagacttgcatggggcctgtagcccctttgttttggccaatttcccccatttggaatggctatatctacccaatacctgtacccccattgtatctaggaagtaactagcttgcttttgattttacaggctcataggaggaagggacttgccttgtctcagatgacactttggacttttgggttaatgctgaaaagagttaaactttgggggactgtagggaagacatgattggttttgaaatgtgaggacatgagatttggaggggccaggggtggaatgatatggtttggctctgtgtccccacccaaatctcaacttgaattgtatctccaataattcccatgtgttgtgagagggacccagtgggaaataatttgaatcacgggggcagttcccccatactgttctcatggtagtgaataagtctcatgagatctaatggttttataagggttttctgttttttcatcttcctcgtcttctcttgctgctgccatataagaaatgccttttacctcccactgtgattctgaggccccctcagccatgtggaattgtgaatacttggcaggacaacaggcagacaaggagcagcctgggctacaccctcctccatccagcttggcagggaaggtcttggtgcctcagttgaaacttccaatttaacatcctgacacacactactccctcttcctgtgatcatcagaacaagataaaaccttgtgtgtctggatagttctcatctgttaagattcaggtaaagaaacgccttctttgggaagttgtttatatcctcttccatcagactgagctaattattcctcttcaaacccacacagtgttccatgtaaactattatagtctttgctacactgagtcactctggaatcagatgccaagattcaagtcttcctttcacgaactatatgatcttggggtattcttccccttttagagcctgagttttttaaacttaccttttggagtttttgtcagaattaagttagatgattttaaggtatattaagttcttagatcagtccctgagagaactgaggtgacatttattttgtcactgaacatctgtatgtgtttggggagaaaggaagtgtgggctatattctggaaggacaagacagcagtgtgttaattattatgtaaggagtgagaaatgtcatatgtttttcttaaaatttct

SEQ ID NO: 466201 - DNA, 988 bp, Homo sapiens
gactgggatcagtcgctaaggccgatggcagggcaggaaagatcactagatgcaggcagggtccgggggcagaggcccctgtactggggccagtctcacagctccaggctccatcatctttactgccgacccagcaatctcctttcctgtagctccagcccaagcctgggccctggctcttcctggactcaattgggtcaggggaccatccctgagccaatcgctggcactgggaggctgtggcatttcaattggccaggcttgtatcaagcacctaggggtggagttgccctgtcctcaccgcagggaagcaaagcctccaagtgccattgtgtctcctgggctgggcaagcgcatttcatctcctctgcaccaaaaacagcctgaggacttgtgaactggtctggaagtcgagagctcttttttgatttcatcattaaattgctttgcaaaaagggacactttctggtttaatttcttctgtcactaatactgaatcatgtgtagctgtccaaaagaaaaaaggatctgttgttgctattccttgtcaaacataaagttatggtttaaattcagtgaagttttttgagcagctgaggtcacctcttagttggtagaataattttgccatttttcaacctgtgtttcacacaaggttattaaaggaaaagtgctaacaactttgaaatgagaagctggaagtttaaacgtgtttgtcttgagtcatagcataaggcacagttgcaatgctttgctctctgtgtcttatcacttagaccacattcttatttttgtacttccactcaccttgaccagagtagaggatcacataaagggtatattttccaaataaagctgtttggatcatcatagttttaacaaagacaatccctaacatctgtagagtgcattctccacactgctgccagggttgtttgactaagtccctaagacaagttcttagcacgttacttggttgctttaaaaa

SEQ ID NO: 466202 - DNA, 2438 bp, Homo sapiens
gcactgcacgggacgatgtcctgcacaccgggcacacctagggctttgcatccacaccagtattgcttccttagatcctcacagctgccagtccagagtttcccaaagtaccctcaactggtcactgccgctgcactgggcgggcaggacgaggagccgcaggccccaggctccacctcagaccctcaatctgaagctgcaaggtggggccccggggctcctgcacctgtccactgtgagggtcccaggctccaagctccggcatcctctggcatccggtgccctgcagaccaccatccctatagaaccctggccctacagatccccagccctataaacctgcagtcctacagatccctggctctgcagagcctggtcctgtggaccgagcacagtacggatggaggggaggtctgggtgaggggggcgcccttgggagacgcacagacggcacacggccagcaagctgaggtgccctccccaccccacgaccaccattaatgctgaaatccaagaccctgggctcgaggacgcagaacgactcgtggtttgcaaagtgtggcacccccagacgctccagcatccgcgtggtctgggaactgacttcgttagaaatgcagtttcctgggcccacccaaggcctcctgagtcagaaacaatctgtgccttaagagaggcctcggggggattctggggcctggtaaagtttgggaactgctggtctacaccatgaggagaaacgctggacccggcctaagaagaggccctccctcctgtctgacaatgagccatgagaagaccatgggaaaaaaaagaggccaccagaaaccctattgccgaggtcctggcaaggaagaaaaggacagaagagctaatttccctacaagaacacgggtctaggaaacagaaaataaaggaagcttccatttcatgggcagagacatctcggcaaataggctgagcccatgtccccagagctctgagtaattaaattttgagaaaagtgggtcaggctgtggttccatttcttaggtctgagtcatcaaaggatggtgacatttactgctaatatgagattgtgccctcccgattaacggtgggtctgccttccccagcccactgattcaaatgttaatctcctttggcaacactctcatagacacacgcaggattaatacttgtatccttcaatccaatcaaattgacactcagtagtaaccaccacaagggccgctgtgggctccgcctgcaggatcgaggcacatccaccagccaggccagaaactttaaaaccgacacttggcaaagcactgagagagagcagacgagtcaattatatgggagaatgtaaatagaggagaagcgggagccataatgtaacatcgccctcccgggagtttaaaaagacatgaaattgtcggatccagctggacccggcttgccctgcggcagaacccacagcctcacgctcaaccggcaggttccacgtgccatctcctcctctcccgtccagctggggccgggtcacggtaaggagagaaacgtcgccctgccacgagctcctcaaacacaccaggccctgcacgtggagtcagccagggacacccatgtgaacgcagaaggagggaagagagcaagattaaagccagaggtggaggaggaccccacgaaggagggtcatttctgcaataaaaggaaggagaagagaaggagggaaggccagtttcacatcacctcctccaggaagctccccagctctccccagtgcaattaaccctcccagactgtcggatgcaagacccagcacatcccatggagggccctgagtaaaattcacaatggtctgcctgtcagactgtgagctcctggaaggaaacgaggggtcccatcccatttgcctcggtctccccaagataggcccgacccaggtgaaaaggcaaaagccttcagggtccaggcaggttatgctgatgtgcagagaggcctgggaagtggtggagactgtggctgctgcatccctcttgaaggcactggagtaaaaagagaagggatggagggacaaagggaaggaaggaaggggatgggagagagggagggaggaagagagggaggaaagaaggaaggagggaaggatggagggggaaggagaaagaaaggaacttaaaagctgtgttggccaaatggaatggctctgctcccaggaccctgtttggactgggcccccaggccaggactatagctcagggccctggccttctccccggggagagctgataaaccgatgggaagtgagaagagggaactgtgacaagtcaaagagtgaccatgccaggcgaagggccgttgctggcttagggccccacagcaggaatggaagacatctgcctggcatccctgccccctgactcctaggctctgtcccttctcaggcccgggtg

SEQ ID NO: 466203 - DNA, 1766 bp, Homo sapiens
tatagtaggatgatttataatcctttgggtatatacccagtaatgggatcaccaggtcaaatggtatttctggttctagatccttgaggaatcaccacactgtttttatgtcattttgtggcatttatttacagaaaaaaaagaggccaccagaaaccctattgccgaggtcctggcaaggaagaaaaggacagaagagctaatttccctacaagaacacgggtctaggaaacagaaaataaaggaagcttccatttcatgggcagagacatctcggcaaataggctgagcccatgtccccagagctctgagtaattaaattttgagaaaagtgggtcaggctgtggttccatttcttaggtctgagtcatcaaaggatggtgacatttactgctaatatgagattgtgccctcccgattaacggtgggtctgccttccccagcccactgattcaaatgttaatctcctttggcaacactctcatagacacacgcaggattaatacttgtatccttcaatccaatcaaattgacactcagtagtaaccaccacaagggccgctgtgggctccgcctgcaggatcgaggcacatccaccagccaggccagaaactttaaaaccgacacttggcaaagcactgagagagagcagacgagtcaattatatgggagaatgtaaatagaggagaagcgggagccataatgtaacatcgccctcccgggagtttaaaaagacatgaaattgtcggatccagctggacccggcttgccctgcggcagaacccacagcctcacgctcaaccggcaggttccacgtgccatctcctcctctcccgtccagctggggccgggtcacggtaaggagagaaacgtcgccctgccacgagctcctcaaacacaccaggccctgcacgtggagtcagccagggacacccatgtgaacgcagaaggagggaagagagcaagattaaagccagaggtggaggaggaccccacgaaggagggtcatttctgcaataaaaggaaggagaagagaaggagggaaggccagtttcacatcacctcctccaggaagctccccagctctccccagtgcaattaaccctcccagactgtcggatgcaagacccagcacatcccatggagggccctgagtaaaattcacaatggtctgcctgtcagactgtgagctcctggaaggaaacgaggggtcccatcccatttgcctcggtctccccaagataggcccgacccaggtgaaaaggcaaaagccttcagggtccaggcaggttatgctgatgtgcagagaggcctgggaagtggtggagactgtggctgctgcatccctcttgaaggcactggagtaaaaagagaagggatggagggacaaagggaaggaaggaaggggatgggagagagggagggaggaagagagggaggaaagaaggaaggagggaaggatggagggggaaggagaaagaaaggaacttaaaagctgtgttggccaaatggaatggctctgctcccaggaccctgtttggactgggcccccaggccaggactatagctcagggccctggccttctccccggggagagctgataaaccgatgggaagtgagaagagggaactgtgacaagtcaaagagtgaccatgccaggcgaagggccgttgctggcttagggccccacagcaggaatggaagacatctgcctggcatccctgccccctgactcctaggctctgtcccttctcaggcccgggtg

SEQ ID NO: 466204 - DNA, 795 bp, Homo sapiens
tattagtttgataaggctagtataatgaaatattgcagactggctggcttaagcaacagaaatttatttgctcaaagttctggagtctggcagtccaatatggaatgtttcaatgaagacgcagctaaggcaccaacttgggacagtgccttgcaagaatacggaactgttattcaggatgcagtatatgcattggatcagggatgtttatgcagtgctttgccactaacacgaaaaatacatgggtccatggaccaagaagatggaagcagaagtgaccccacttatcatcactgtcagacccacttggtgcctcttggtacttccttgtccaactatggctatgaatggacaaacatcacaactaaagaagagtacggttacaaaaacacagatctgtgaggaatgagggtttgggacacactatgaggtacattagcaagactggcagaggtgttcactgagggtttagagaattagcctgtataataagggaataagaggtagtggaattttagctaggcatatggatattcagttttagcctccacttcccagcctactttgcaaccagttatggtcatgtgattagttctcatcaatggaaatggaagagcttgatctaatttcagccagttaaaatagcaccatagggattgaagaagcaacaagatggaagaaacaatgtcctcaaatgactaactgaagataggagagctgccccaccaacctggactactcactactagactgttacttgacagagaaataaatcggtatattatttaagtcccg

SEQ ID NO: 466205 - DNA, 1268 bp, Homo sapiens
cttctggcagcttaggtctcacttaatggctgagggctccaggactcaggcccctgggaaagggcccccactcagcatccagttcctgcgagcccagtatgaaggcttgaagaggcagcagaggacccaggcccacctcctggtgcttccaaaaggaggaaacacacctgctcctgcagaatcgatggtcaatgctgtttggattaacaaggagagaagaagctcactgtccctggaagaggcagattctgaggtggaggggaggctggaggaggctgcccagggctgccttcaggcccccaagtctccatggcacacgcacctggagatgcattgtttggtccaaacctccccccaggacaccagtcatcaagtacatcataggggcaagcttgtgggatctgatcaaaggctccctcctgaaggagacacacacttgtttgaaaccaatcagatgactcagcaaggaaccggaatcccagaggctgcccagcttccatgccaggtgggcaatacccaaacaaaggcagtggaatctggcttaaaattcagcactcaatgtcctctttccataaagaacccacacaggtctggcaaaccagcttactatccatttccccagaggaaaacacccaggatctcccaagctgcccggaacctgggcttatatggctcagcgtgaagctttctattctgccagatgtcttgaccttgaggccacctatggccttatagaagaaccaaggaggcagagccacaacgaggtctctagctatgagcaagaactggactaacctaattataggaattgtgggagacgaacttcacaatggtaacatggttttacccttccaataagaagagacttcccaggccaaattgcccacagtttaggatgaagaggactgtctggtcagtgcagccccattctgacattactatgaggtcctggatatccattccttggggaggaccagtaagacatctgctccatccctggaactggataattttggaacataaaccagggacctagccaacagaatgccttagcaatgcccaggggtcaatgggcgtggcattcttgttttcaatgtcttctgatgatttctcatatattctggagaagacaagctctgagaattcagatgctttttctggtggctatgtctggggggccatctcacttagaagtcacaacactcattggcagtgatcacatcatttcaatttgggcttcccaaagtatggtcacccagggtatgaag

SEQ ID NO: 466206 - DNA, 1832 bp, Homo sapiens
cgctggcgccggcgcccgcgcaccgcgccccgtagcccttgcgctccctcgcgcgtcggaggctctagtgaggctcagagtctaggtgcggtccgccaccgccggccccgctccgcccggccccaccaccgccggtccctcggccccctcggcgaccacctcctcccgcacgcaccgtccgcctttgcgcctctccgagctgagccgcgcgtcccgagcccagcctctccggggaggagggacccgtcggcgcggcgtgggtcgggagcgggcgcctgggactacttctcgtttgaaagttttcagaggccaaaagtttgagccggggctgcggaaggatccggctctggcggttgccgcgctcggcgacaactggcgactgaaatttgcatgtgaataagcggaggagcccggggcggaatggggagggcgaggccgcggacagccgtgtgcaccggccccgtggccgcggctttaggcgtccagaggatcgatcgccgccagacatccctggccgtgattgcccgagcacttgaccgcgagggatgggggcgccgcggcctctgggcaggggactccgggcgccccgagggagcagccgggaccagtgcctcgcggacggattgtgccccgctcccccaagggggacccgcgtcgacacgctcctcggtcaccgtcctcctcctgcccgggcgccgcctgcctaaggtggccccagaaagcacaaacgggtcgggcggatctgccgctggcgccggcgcagcccttcccacgtgctccttccggctgatttatttctccaccacgatgccaggcacgggcaccctgtgccaagcctgaggccccctgcgggtgctgaggggagagtggcttaggcgttgcaccccaggagactgaactgggtcagttcccccttgtttgctgccagagaaatgggggtaccattgtcagggagggaagctgaggctcagagacatcatgaggatgccagctcaaggcccagccaggccttggtcctcagctgctgtcatccagtaggctcaagcccagaggcctccagggtgtccagcctccagggtgcctcctacgcagcctccacgtccccatccactgcagcccctgaccatcgggcacaccgtggggccttcgctggccgccgggcctcaggttctgctgcaccaagtgatttttaaagccccatctgcctttctccacttataaagaacttgggacatttcctcgaggttgggcatttttccagatgtggtttcagtgtctcgcttgctacctggtcccctgtgctgggcggtccgctgtgacgcacctggcagtccttgctctaggatggattcgggccggcccttgttctgagaacagagaacggcccttgttctgaggaggctggggtctggaatctgcttcctggtcccctgctgtgtgcagacagccaccgtcacccaggcccaggggtgcctgcaggagtgggctccaggtctgtcactcgtcactcatggggggctgtgggttgactcgtattcccccaaaagactcgctgtatacccccagagcttgtgagcaggacctgttttggagatgggtctttgcagatgtcgtcgagttaagacaaggccatgctggagtggggcctgccctaatccaacgactggggcccttggcaggagagggagagccttgggagggggcccggtcctgtgacacccagattttggatttctggccttcggaactgagagagcacacatttctgcggtttgaagccaccaaatttttggtaatttgttctggccaggaaattaataccagggataaag

SEQ ID NO: 466207 - DNA, 907 bp, Homo sapiens
ggaagggggtaggcccctggcaagtaggagggaagctgaggctcagagacatcatgaggatgccagctcaaggcccagccaggccttggtcctcagctgctgtcatccagtaggctcaagcccagaggcctccagggtgtccagcctccagggtgcctcctacgcagcctccacgtccccatccactgcagcccctgaccatcgggcacaccgtggggccttcgctggccgccgggcctcaggttctgctgcaccaagtgatttttaaagccccatctgcctttctccacttataaagaacttgggacatttcctcgaggttgggcatttttccagatgtggtttcagtgtctcgcttgctacctggtcccctgtgctgggcggtccgctgtgacgcacctggcagtccttgctctaggatggattcgggccggcccttgttctgagaacagagaacggcccttgttctgaggaggctggggtctggaatctgcttcctggtcccctgctgtgtgcagacagccaccgtcacccaggcccaggggtgcctgcaggagtgggctccaggtctgtcactcgtcactcatggggggctgtgggttgactcgtattcccccaaaagactcgctgtatacccccagagcttgtgagcaggacctgttttggagatgggtctttgcagatgtcgtcgagttaagacaaggccatgctggagtggggcctgccctaatccaacgactggggcccttggcaggagagggagagccttgggagggggcccggtcctgtgacacccagattttggatttctggccttcggaactgagagagcacacatttctgcggtttgaagccaccaaatttttggtaatttgttctggccaggaaattaataccagggataaag

SEQ ID NO: 466208 - DNA, 942 bp, Homo sapiens
agtgcggggacgtcctgtggcgggtaccctgctgggtcctgggtgggggccaccaccaggcagctgtgggaacattccagaccacctaggagtagggccccttcaccgtttgaagctgactgtaaaaaacatctgacctgtgtgcaaagctcaagcccagaggcctccagggtgtccagcctccagggtgcctcctacgcagcctccacgtccccatccactgcagcccctgaccatcgggcacaccgtggggccttcgctggccgccgggcctcaggttctgctgcaccaagtgatttttaaagccccatctgcctttctccacttataaagaacttgggacatttcctcgaggttgggcatttttccagatgtggtttcagtgtctcgcttgctacctggtcccctgtgctgggcggtccgctgtgacgcacctggcagtccttgctctaggatggattcgggccggcccttgttctgagaacagagaacggcccttgttctgaggaggctggggtctggaatctgcttcctggtcccctgctgtgtgcagacagccaccgtcacccaggcccaggggtgcctgcaggagtgggctccaggtctgtcactcgtcactcatggggggctgtgggttgactcgtattcccccaaaagactcgctgtatacccccagagcttgtgagcaggacctgttttggagatgggtctttgcagatgtcgtcgagttaagacaaggccatgctggagtggggcctgccctaatccaacgactggggcccttggcaggagagggagagccttgggagggggcccggtcctgtgacacccagattttggatttctggccttcggaactgagagagcacacatttctgcggtttgaagccaccaaatttttggtaatttgttctggccaggaaattaataccagggataaag

SEQ ID NO: 466209 - DNA, 1247 bp, Homo sapiens
gagataccatttcatgaggactgtccaggcatacttttgcttgagttccttagaggcctggagcactgactgcaggttgccatccacctgcatcgtggtgaccttgaccgtatggtgagaggccagcagagttgcatggacagcttctgtattgctcatgttcctgcatggcaaacacaggtgaagctcatcatcttccaccagcagctgctgcagaaggataggtcaatgccaccgggagggcagttcagacacagaatgtgcattatctggatggcatcaggtaaatgattcttccctccaatgcttagtcattggagggaagctgtaaggggtgcaacatccaatgaagctctgccagtccttgttctacttgttaattaaacctaattgagagaagctctacatcatgaaacaactggaaaccgatacatgaccacgtgagttaggaccccaggctctgagccgagttggggatggtcggctgctctctcccgccgcacctggaggattactaggatccatctgaaggcagagctcaggtccctggagccacgcctgattcaactgcaaattccctgagctccccgagctgggcgctgttgggaggtggctggtggcgagccaaatgcgtctctgcccagctaggggatgcagtcacggggcgtcagagctgtgagttccccacccagtccggtggggtccacggggaggcgttcacctgctcactccgtaaccaaaaccaccttcctcatcatcagcgtgataagcacgaaaaccgagcacgcaagcaacagagaccacagcagtttcccagtttatttctatccgagactgacccagcggctccacccacggctcagccgtcgccccctagtaccgcaccggagcacccagggatgccagcctcccgggcccagcccagcgccgcccgcgccagtcccgcccggcggccgcagtgagggggcctctgctggccgcgaggcgcaggaactcagcccctacccttctcccactccaactccttccaagacaagagatcagtatttgacaactctaactctgaaaataagaatagtcttattccagggccagacccaaaggctcaatgtgaaagttcctggactcagaggtgtcacgtaaggaaagaaagtgagtggaaacttgggagtgtggctgtcccatgaagagctcaccctctggaaaacagaaaagggtcctaatcttggaggtttgacactcatcat

SEQ ID NO: 466210 - DNA, 918 bp, Homo sapiens
aatcttctcacctcagcacccccctcaaccccgcactgagtagatggaaccacaggcgcgcccgccgccccgccggtcgcaggcgtcacggcagccccagcagcctgggccccgccaccgcctccgcggcagccccggtcggcgcaagtgcggcgcgcgctgggggagggggcgcggcggagcgctaggctggcgtcgggccaccgcgggattaagtttctcagtcacgcgtgagtgtctgtgcgttttgatccgaagctcctcgccgggtcgttacttcagaagagaagacagtgagcgtgggcgaggcgaggcatccagaggccccggcgacccctgctccccagtcctccgccccctcgcgtcgcggccctgggcgggcgccgcgagccgggggtggcggcgggccgtggggcggtggggcggtgcgcttgccccaccccgcgcggcccggcgcttcgcggaagccgctgctgtggcttttttaaaaggatggggtctagaagtttcctttgctactcgcaagtctccactccccccagccccgcggtggataatcctagacctttcagcacccccgccacccctttcttttgctctcgctgactaagaggttgagttgcaggttggctacattttgtatatttggaaacgtacaaagtactctgaatttcatgaaatattttgaggcaaagttggactggaatgtccccaaatatggtagagcaaatagcacatctgccagagaaagatcctacactttaaagagaagaagcagacaacttcctggtgaatttaggactgcttgatggtgttgcaattttatttgttgagttaatgaaaccattagagccattcttcccaatctggccagctaagttaaaaataaataaataaataaaaggagacaaactctta

SEQ ID NO: 466211 - DNA, 1613 bp, Homo sapiens
gtttatgctcaatttcaataatatggtgcaaagatggaccagcctcacgcaaagggccatacaggaattcatttattcatccatgcacaaagtcatttattcatgcatctatgaagcattgattcactctttcattcatgaattcttaaatgtattcattaatctgttcagcaaattgccatttaaagcttaccatgcaaaaactgccaaattaagctgtgtgtggaatgaagatgattccccatcttcacaaaatgcatctttaagaggggagggaaaagaccttaggataaaaatagtaaatattaggtcattacaaaatatgtgttacaagtcaagtgtaaaagtccaaaaacaagatttacttttgtttggggcagaggtgtgggggataggaagtatattggtcaggagaaggaggtctttaagctgaagcatgacaagtagggggaatttgaagagaatcacccaagggaactagaagaatctgtgcaatgagctgagaaaacacagtagctatggaggaaaaggtgctgaggagtagctgggggctcttttttgctggagtgcagggattggagagtcctaggatgctaacagaagcttgaaagacaaggaagagttagatcatgaagggccgcaaataccaagctaaggagctaggactttgatcctgcacatggtagtgagctggtgaagggttttggaggaatttatactatcagaaatcggtttaatgaggtttaatttggtggttcagtttgcacagaaaattcaatgacgtatttggttgtttgctttcccctcctaaatgcatttaacatccctgtaacactgtgcctagcacataacagggatttttttttatgccttggggttctgtttctgattttctttctgtgtgtttctccattatgttgttgcatttttctctatttacgttatctccctttccctttttctctctgtccctccctccttcttcctctctattcttcccctccccttgtttttatgcctgattatgtggacacagacaaggattaaaacagggcacctgcccttgaggagtttacaatctgctgggctgaggatcaacacatgttcaaaaagagaggaaagaagtcaagggagatcatgccagatggacttaatttcaatgaagaacaggcatttccatggaaagagacaagttgctgcgtgaaaaaagaaggagttgggggaatttgaaaggaagctgaaaagctggcgacagggcttccattacgtagacagtcatcctgacatggtacctgaacaaatcccatcaaggacagattctcagtcttgaagaggcagcacagtaaaggggaaagatcatgagttttggggccaggttcccttggatattgtggggtccccacacttctggatgatgttggataactctttgagacttaggcttcacatctgtaaaatggaaatacttatttttcagagttgtcataaacactaaatgatttgacttatatcaacctaattcctactggctcattgaactcagctcagctgtcccctctgttcggatgccttccccagtggggcttagttaggtatccctgctggataccctg

SEQ ID NO: 466212 - DNA, 1292 bp, Homo sapiens
ggcatatgaatattttaaaatgtacagaaccactctagagttaatgtggtttataaaaatgactttctgtgaagaaggggggctgcagggaggaacaaagcaatcaccaaagcgcacacttgctcatgagaaaaagcacactttgaaaaatgaagtgttccctgtcattagctttcagtcaagcttcccatcaggaaacttttgcatcagatgtgactggaccttgaggggggacgcctgctatgcaggtcctggccctcctgtgagctggaacagatggttccttcacacacatctaaataaagctgtaatggtgctggcccacaaacacggcacaggtgaacctttctatacaaaaaggaaagtgtttcttggatgttgtgtaaaaatcaatttctacagtgccactggttttcattttagacacagtttgtcttcttttttggatatctcatcaatagactgctgttcttcgtagtctaggctagtaccattatgtctttagaatacctccccgccaccccctagagagactttggcatgtttatttctaatacttgaagaaaaggaattttttatttcagatgcatattctcctttactgtcaacacacttaaaagaacatattcaatacatcaaagtactcaaatcaacactgtcaggtggattgcctacgggcaaaaagccctggttacatggggttttagcaagacctgtatttgacacaacttgccttgggcaataagtttggcaatgaccaatgcaagcaatgcaagaaaaaaataaaaataaaaactatgtcacataagtaagactgtaaaggaatgggaagaatgggaagaacttaccctatttagcagaaaatgggattgtgacacaaatgcagtaggtggtggacccaaagcacttctgaagcacaatctggatatcattcttgttgaaccacgaggacctcctgcagacatatacaactaaagaggatagtatgctatcaacagacaaatgatgaagaaaaatagcctcttgaaaatgaaaaccaatgcaaagttctaaagtctctggcagcagacactgaaaatcctctcctgagaagacattacctgcatggttctcaagtggaggtgaaactttacaaaacgataagaaaagtagaagacactttattgataaaatatccacattcgaaaatagttgtgctttcaaatcctggatctgccatttactatctgtgagactgagactgtgtgcaaatggtttagccattttgaacctgtttcctcatctgtaaaatg

SEQ ID NO: 466213 - DNA, 1791 bp, Homo sapiens
tccttccaaggcgtcctggcccttcaccgccgaccgaagcggaagctgaagccgcctttcttcctgctgtagccattgagctcctcagccaggttccctaacgggccgctggtcttctcccccgcagcagggaggaagccggtggcctcactgccttcgtcctgcctcccgaagcggaatctgcagccagcatgctctctgcccgatgtctgcagccccctggctatgacaagcagggcctgtggctgtgaagctctcagccaccgagaggaaccccacacggagtggggtcggggccccatggccaggtcggcccagcgttctccagctccgaggccacccatggcgtctgtgggctctcttctgtccagtagagggaagcaggcgcccagcggcaggaagaggaagtagatcagggggggttcatgcaccccttcaagaatctggtagaaagtggggatgctcatcacgggacaggcggccccagcgcgagtcagggcttcaggccccacagccaggaagggacaggaaaagcacgggcacccctgtgacccacatgcacccctgtgccccgcaggcacccctgtgccccgcacgcacccctgtgccctgcatgcacccctgtgccccgcacacacccctgtgccctgcacgcgcccctgtgcccctcaggccaagccccactttgctgtgtttgacatgttgagctcccagaaaaggttctgctttgaaaccaccagggcccggaggaggcgaggcgtgagggtggtggggctggtggtgcaggaagccgctctgggggtggagtccgtggaccacctcgaagcctgtggggttccctgggaagctgtcctgacataggtccaggccaggagtcccatccccaggcgtctccacctctgcccctcccacctctgcccttcccacctctgcccccaacctgtgccccctccctcttctacccacccacctttgtccccccacctctggccctccctggtctggccccacgtatgtccccccacctctgcccttccctcctctgccccccaaacctctgccccttcctcctctgctcctccctcctctgcccccacctctacccccaactctggcctcccacctctgcctccccacctctgcccctccctcctctgcccccacctctacccgcaactctggcctcccacctctgcctccccacctctgcccctccctcctctgcccccacctctaccccccacctctgcccctccctcctctgcccccctacctctgccctccctcctctggcacccccacctctgccccctcaagctgtcagagcagtgggcattgtgctggctgagtgaaagtccatggtggagggaagagtgggattcgtcttctgtgaacccggacttgaaaacctccggccgcacgggggggtgtgagactccccggctgcccgcccccgacaggtgccagacagaggccgagcacagggcaaggccactgccgctctttctactggccccgtgcggcacctcccacacaggcactcgataaatactggattttattaaataaactccagggattgttttatccgtaagcctcaaattgatgttatgaataaatagccatgggggactgttcattcaataacgtgtctcagttccttggaactctgtccccagccacagggacccacaggatagtttatcaccccggggacccgggagggatgcaccgatgccgcaggacccgggttcatcctccagagcccagaccccaggaggaccgacccca

SEQ ID NO: 466214 - DNA, 1807 bp, Homo sapiens
ttcccatcagcccctgccctgggctccatggaccctggcaaccctggttcgagccccaggtgcgcttcgcgcccgctagggttacccagaagccggcagaaagcccatgagaggaaggtaagacacctggggcaaaggaaaaaaaaaccgcgcttgcagaaaagcggggcctggctcctccacggacgaaggtgccttcccatcagcccctgcgctgggccctggggaacctggtgtccctggctggaaaccagggtgcaccttggacccgctaggggtaccccaaggagagcagaaagcccatgaggggaaggtgaggcacctgcggcagagaaagaagaaaaaccgcgcagcggagaagcggggcctgggtcccccactgacgaaagtgtctttccgtcagcccttgagctgggtcccgaggacgctgacatccctggttcgagcccacgctgcgcctcaggctgctacgagtaccccaaggaggaaagaaggcccaaaagtttcagctgaggtttgaggcaggagagatgaggcacctgtggcagaaaaaaaaaaaaaaacaaaaaaaaacaaaaaaacctcgcagcggagaactggtgcctgggtctcccagggacgaaagtgccttcccatcagccactgcgcttggccccatggaacctggcctccatggttcgagcccagggtgcgcctcgggccgctaggggtaccccaaagtgtgcagaaggcccatgaggggaagctcctgcttcaggtgcagaaacacagctatttccagtgccagctgttgagccagtgccagcaccaggggcagagccccttccagggacagcgctggagctagaggaagctccagagccttcctgccgctgccctgggactgcacaggaccagcccagtgagaagctgcctgacttcatggcacctcctgtagagccaccggcctcagccctggagctgaaagtgtggctggagctagaggtggcagagagggggtgaccagcacagctccagccagcagctcccacactgctcccagtcctgggcacagtggaagctatggaggcagagaccagggtgtgcaacctgggctcctctgcctcactggagagggacttctctcattcagcagagcagcagccctgctgctgaaggccctgctgctactgctgctgggggtgtttgcctgcctgcaggaggtgctggagagcaagaaaaggagcctgtgagcaggggttccagcaggtcctccggctcccagaggtgacctcctcctccaggaatggaggtttgccctcagctgggcatctgggccatttgcctctaatgtgctgcccaggatggcctcttcttgacaggtggacagggtctcgcgggagttctctggatttcttgtatcagcatgtggacctctttagcaagattgaggacagtttcctcaattatatcctcaaaaacgttttccaagttgctcactttctcttcttctctgttagaaatgccagtgcagaagtgacaaagtgccaaaagcgccctgtcccagtgggtactagtcttcagcaggggcagagctgctggagaaacctaagaagcagcctctttcagcccacgttccttgggtcccaacaggatgaccactgctggatctgcagcagtgcactaggaaggggacagagggcaagagatgaccacctctctaaatctgttcctaggctttggtgtgcccctttcagcagctgatatcgtgatcgtgtttcctttgacccaaggggtggctttggcaagctgtattcctccttccctt

SEQ ID NO: 466215 - DNA, 3389 bp, Homo sapiens
  misc_feature (1078)..(1078): n is a, c, g, or t
  misc_feature (1101)..(1101): n is a, c, g, or t
  misc_feature (1107)..(1107): n is a, c, g, or t
  misc_feature (1125)..(1125): n is a, c, g, or t
  misc_feature (1160)..(1160): n is a, c, g, or t
  misc_feature (1163)..(1163): n is a, c, g, or t
  misc_feature (1181)..(1182): n is a, c, g, or t
  misc_feature (1192)..(1192): n is a, c, g, or t
  misc_feature (1203)..(1203): n is a, c, g, or t
  misc_feature (1246)..(1246): n is a, c, g, or t
  misc_feature (1249)..(1250): n is a, c, g, or t
  misc_feature (1272)..(1272): n is a, c, g, or t
  misc_feature (1302)..(1302): n is a, c, g, or t
  misc_feature (1305)..(1305): n is a, c, g, or t
tttgtcatggttgtagatattccatagtcagagcccattattaggctgtgccagctcgggggcggagtctcattattttctgaatcatgagttgatgtaaagggagtggcaactgttttatctacatcaattgatatgctcatatgatttgtcttatctagcctgttgatgtggttggtggcattcattagttttcgaatggtgaattagatttaaattcatgactaaaacaccaaaagcaaaggcaacaaaagcgaaaattgacaaatgagacctaattaaactaaagagcttctgcacagcaaaataaattatcatcagagtgaacaagcaacctacagaatcggagaagttttttggaatctatccatctgaaaaagagctaatatccatattccacaaggaacttaaacaaatttataagaaaaaaatcaaaaagtgggcaaaggatatgaacagacacttctcaaaagaagaaatctatgtgggcaacaaaatatgaaaaaagctcatcatcagtaatcatcaaagaaatgcaagtcaaaaccaaatgagataccatcttacttcagttagaatgactattattaagaagacaaaaatgacagatactgctgagtatgcagagaaaagagaactctcatacactgttggtgggaatataaattctggagcccaatctgctggacagcctgggaccgtccattttcggggtggtgggcaacctggtggccatcgtggtgctgtgcaagtcgcgcaaggagcagaaggagaccaccttctacacagttatgcggctgactgccaccgacctgttgttcactttgctggtgagccaggtgaccatcgccatgtacacgaagggcgggtaacctgggggccagctgctgtgtgagtacagcatcttcagcctgttcttcttcagtcagtccggcctcagcatcgtctgtgccgtgatacctatacaggtaatttgtgttagacattcttagaagagtttcaaaagttttatgtttttatctgggttataaacagagtcctcaaatgcacacaaaggaaatcatgccatgattgaatntcagcaggaataagtttattttncctatncaaaattaaaatactttngttgtgtttgaaaatgtgttttaaagatatgtttntgnaaaaagtttaagtaaatnnttaatcatgnccccttttctntcccaagaaataatttcatatatagtttatttaaattttttancannaatgtagcataatttttttaanttgtatattttatttaacccaatatatatncanaatattgggtcaatatgtaatcaatataaaattattagagatagtttgcgttcttttttcatatgaaatctttgaaatccattgtgtattttaaattttaggatgtctcaactcaaatgtgaaattttcatggagaatatttgaactgtatttagattaatacaaattgcagttaaaaagtttaatatagatttaccagggggtgtgcagcccacttgccaatcagatcgctgctgagcggtcccgcagccaacccccgaagagcagcctgctggcttccccagtgcccaggagttggggatgtcctacaaacctaccacacctgcccccagcagcacccccggctccagcacccctgggccaggcactctggtccctacaggaagcgtcccgtcaccgtcgggctcagggccgggagccactgcccctttcagaccgctgtttaaagactttggaccgcctaccatcggttgtgtgcaggccatgaaaccacctggtgcccagggctcccagagtacctacacggaactgctgttggtcacaggggagatgggcaaagtgatccggcccacctatgctggcagcaagagcgctgcggagcgcctgaagagagaggaagctctaaaagcaactgaagatttacgtgaagaagctgcccaggcgttggcccagagtgacaggaagtgccatgagttcaacaggcaggtcacagttcagtggaaagaaaaggatttccagggcatgttgaagtgccacaaagagggcgaggccctcctcatcctcaacctggtgacagacttgaagccccagatgctgttggacacagtgccctgtatccccgcctacatcctctacatgtgcatccggctcgcggaccaaaccaatgatgatctcaaggtgcactccctgatgacctccaccaccaacggcattaaggaagtcctgaagaagcacagtgatgactttgagatgacgtcattcttgttatccaacacctgccaccttcttcactgtctgaagcggtacagcggggatgagggcttcatgactcagaatactgcaaagcacaacgaacactgccttaagaactttgacctcaccgaataccgtcaggtactgagcgacctttccattcagatctaccagcacctctttaaaattgccgagggtgtgttacagccgatgatagtttctgccatgttggaaaattagagcattcagggtctatctggtgtgaagcccactggctcccagaagcactcctccagcatggcagatgaggataactcataccgcctggaagctatcatccgccagatgaatgcctttcatacagtcatgtgtgaccagggcttggaccctgagatcatcctgtaggtattcaaacagctcttctacatgatcaacgcagtgactcttaatgacctgctcctgcggaaggacgtctgctcttggagcacaggcatgcaactcaggtacaatataagtcagcttgaggagtggctttggggaagaaaccttcaccagagtggagtagttcagaccatggaacctctgatccaagcagcccagctcctgcaattaaagaagaaaacccaggaggatgcagaggccatctgctccctgtgtgcctctctcagcacccagcagattgtcaaaattttaaacctttagcctcccctgaatgaatttgaagaacaggtaacagtggcctttatacaaatgatccaggcacaactacaagagcagaatggccctcagcaactgctattagatgccaagcaaatgtttcctgttttgtttccatttcatccatcttccctaaccatggagtcaatcccagcatgtctcaatctggagttcctcaatgaagtagacgcatgtttagtctgattcccaatgtgaacaaaaaggaagtatagacagtaaagtaaattcaaggatctgttaaatctggtaaaagtagatcaaatcagagattgacagcctgtggagggtgcctgaactatacagaattaacacaactatggcgttattttttgtacatactgctcagaataaaaacacttgaaatgtgaaaaatt

SEQ ID NO: 466216 - DNA, 2801 bp, Homo sapiens
cgtgcgctcgaggcctgagggacccgctgttggtgccacctgccctgctctgcgcctctccgcgcctgcgccggcgccctgcgccccctccgcgcctgcgccggcggtctgcgcctctctgcctttgcgaagggcgctctgcctttgcgaagggcgctctccctttgcgagggcagaggtgccttctcgtcagcacagaccgggagagcatcgcgagggcggagctgagttctcctctgcacagacttcggagatacagcgaaggcggagcagtgttctcctcagcacagacccgggcgggcgcgccgggggcaccgcgagggcggagctgcgttctgctcagcacacacccgggggacaccgcgaaggcagagcagcgttctcagcacagaccttgggggcactgcctcgctttgggactactcgggaccgcatagacgactcagcttcacactccagggctgtgtaccaccagccactgtcatgttaaccccttcccaggccagtgtgtccttggcctggagcccaatctgctggacagcctgggaccgtccattttcggggtggtgggcaacctggtggccatcgtggtgctgtgcaagtcgcgcaaggagcagaaggagaccaccttctacacagttatgcggctgactgccaccgacctgttgttcactttgctggtgagccaggtgaccatcgccatgtacacgaagggcgggtaacctgggggccagctgctgtgtgagtacagcatcttcagcctgttcttcttcagtcagtccggcctcagcatcgtctgtgccgtgatacctatacaggatgtctcaactcaaatgtgaaattttcatggagaatatttgaactgtatttagattaatacaaattgcagttaaaaagtttaatatagatttaccagggggtgtgcagcccacttgccaatcagatcgctgctgagcggtcccgcagccaacccccgaagagcagcctgctggcttccccagtgcccaggagttggggatgtcctacaaacctaccacacctgcccccagcagcacccccggctccagcacccctgggccaggcactctggtccctacaggaagcgtcccgtcaccgtcgggctcagggccgggagccactgcccctttcagaccgctgtttaaagactttggaccgcctaccatcggttgtgtgcaggccatgaaaccacctggtgcccagggctcccagagtacctacacggaactgctgttggtcacaggggagatgggcaaagtgatccggcccacctatgctggcagcaagagcgctgcggagcgcctgaagagagaggaagctctaaaagcaactgaagatttacgtgaagaagctgcccaggcgttggcccagagtgacaggaagtgccatgagttcaacaggcaggtcacagttcagtggaaagaaaaggatttccagggcatgttgaagtgccacaaagagggcgaggccctcctcatcctcaacctggtgacagacttgaagccccagatgctgttggacacagtgccctgtatccccgcctacatcctctacatgtgcatccggctcgcggaccaaaccaatgatgatctcaaggtgcactccctgatgacctccaccaccaacggcattaaggaagtcctgaagaagcacagtgatgactttgagatgacgtcattcttgttatccaacacctgccaccttcttcactgtctgaagcggtacagcggggatgagggcttcatgactcagaatactgcaaagcacaacgaacactgccttaagaactttgacctcaccgaataccgtcaggtactgagcgacctttccattcagatctaccagcacctctttaaaattgccgagggtgtgttacagccgatgatagtttctgccatgttggaaaattagagcattcagggtctatctggtgtgaagcccactggctcccagaagcactcctccagcatggcagatgaggataactcataccgcctggaagctatcatccgccagatgaatgcctttcatacagtcatgtgtgaccagggcttggaccctgagatcatcctgtaggtattcaaacagctcttctacatgatcaacgcagtgactcttaatgacctgctcctgcggaaggacgtctgctcttggagcacaggcatgcaactcaggtacaatataagtcagcttgaggagtggctttggggaagaaaccttcaccagagtggagtagttcagaccatggaacctctgatccaagcagcccagctcctgcaattaaagaagaaaacccaggaggatgcagaggccatctgctccctgtgtgcctctctcagcacccagcagattgtcaaaattttaaacctttagcctcccctgaatgaatttgaagaacaggtaacagtggcctttatacaaatgatccaggcacaactacaagagcagaatggccctcagcaactgctattagatgccaagcaaatgtttcctgttttgtttccatttcatccatcttccctaaccatggagtcaatcccagcatgtctcaatctggagttcctcaatgaagtagacgcatgtttagtctgattcccaatgtgaacaaaaaggaagtatagacagtaaagtaaattcaaggatctgttaaatctggtaaaagtagatcaaatcagagattgacagcctgtggagggtgcctgaactatacagaattaacacaactatggcgttattttttgtacatactgctcagaataaaaacacttgaaatgtgaaaaatt

SEQ ID NO: 466217 - DNA, 7036 bp, Homo sapiens
gtatctccctgcttcctgtttgtatcagagtgaaatgacggagccagatcccccaccagggggactgagaagacaacagaagaattgtctatttcacagcaatattaccagtgacttgaaagcatttacagacaagtttggttttgatgtcctcatcctgttctccagctatctgtcagaggagcagcagccgagacgacagattgctgtgtactcagaaaacatggagctgtgcagtcagatttgctgtgagctggaagagtgtcagaacccttgcctagaactggagccctttgactgtggctgtgatgagatcctggtgtaccaacaagaggacccttcagtgacttgtgatcaggtggttctcgttgtcaaggaagtcatcaacaggaggtgtccagagatggtctccaatagccggacatcctcaacagaagccgtggcaggcagtgcccccctctcccaggggtcttctgggattatggaattgtatggttctgacatagagccacaacccagctctgtgaatttcatagagaaccctccagatctcaatgattctaaccaggctcaggtggatgccaatgtagaccttgttagcccagacagcggactggctaccattaggagcagccgctcatccaaggagagctctgttttcctcagtgacgacagccccgtgggagaaggtgctgggcctcaccacacccttctcccagggcttgactcctacagccccatccctgaaggggcggtggcggaggaacatgcatggtctggagaacacggtgagcacttcgacctcttcaattttgacccagcacccatggcttctgggcagtcccagcaatcttctcattctgcagactactccccagcagatgacttcttccccaacagtgacctgtcagaaggacagctccccgctgggcctgaaggacttgatggcatgggaaccaacatgtctaattattcatccagttcacttttgtcaggggctggcaaagatagccttgtggaacatgatgaggagtttgtccagagacaagacagtcccagagataactctgaaagaaatttgagcctgacagattttgtgggagatgaatccccttccccagaaaggctaaaaaatactggaaagaggatcccaccaacacccatgaatagtttagtagaaagctcgccatccactgaagaaccagcctcactctatacagaagatatgacccaaaaagcaactgacacaggtcacatggggccacctcagacccatgcacggtgcagcagctggtggggtggtttggaaattgactccaaaaatattgcagatgcgtggagttccagtgaacaggaatctgttttccagagccctgaatcatggaaagagcataagccaagctccattgataggagagcctcagattctgtatttcaaccaaagagcctcgaatttacaaagtcaggtccctgggagtctgaatttggtcagcctgaactgggtagcaatgatattcaagacaaaaatgaggaaagcttgccgttccagaacctgcccatggagaagtcacctttgccaaatacatctccccaaggaacaaaccacctgatagaagactttgcttctttgtggcattctggtcgctctcccacagccatgcccgagccctggggaaatcctacagatgatggtgaaccagcagctgtggcgccattcccagcctggagtgcatttggtaaagaagatcatgatgaagctttaaaaaatacctggaatttgcacccaacaagcagcaagacaccttctgttagggacccgaatgagtgggccatggcaaaaagtgggtttgccttttcttcttcagaactactggacaattcacccagtgagataaacaatgaagcagctccagaaatctggggcaagaaaaacaatgactccagggatcacatctttgcacctggaaatcccagttctgatctggatcacacatggactaattctaagccaccaaaagaagatcagaatggtttagtggatcctaaaactaggggcaaggtatatgaaaaggtagattcctggaacctttttgaggagaatatgaagaaaggagggtcagatgtcctagttccttgggaagattccttcttatcttacaaatgttctgattacagtgcatccaacctaggagaagattcggtgccttcccccttagataccaattattccacctcagactcttacacatcaccaacatttgctggagacgaaaaggaaactgaacacaagccatttgctaaagaggaaggttttgagtcaaaagatggtaactccacggcagaggagactgacattcctcctcagtcactgcaacagtcatctcgaaatcgaatcagttcaggtcctgggaacctagacatgtgggcttcacctcatacagataacagttctgaaataaataccactcacaacctggatgaaaatgaactcaagacagagcacacagatggtaagaatatctccatggaggatgacgtcggggaaagcagccagtccagttacgacgaccccagcatgatgcaactgtacaatgaaacaaaccgacaactcacacttttgcacagcagcaccaactcccggcagacggcccctgacagtctcgacttgtggaacagagtgattttggaggatactcagtccactgcaacgatctcagatatggacaatgatttggactgggatgactgcagtgggggtgcggcaatccccagtgatggtcaaacagaaggatacatggctgaaggttccgagccggaaacccgatttacagtgagacagctggaaccctggggcttggagtatcaggaagcaaatcaggtagattgggagctccctgcctctgatgagcataccaaggacagtgctcccagtgaacatcacacattgaatgagaaaagtgggcagctaattgcaaacagtatttgggattctgtcatgagagataaagacatgtcatcattcatgttaccaggctcctcacatatcacagattcagagcaaagggaattgcctcctgaaatccccagccattcagcaaatgttaaagacactcattccccagatgcgccagcagcctctggaaccagtgaatcagaggcacttatatctcatcttgacaagcaggacacagagagggaaaccctgcaaagtgatgcagcatccttggcgactaggcttgagaatccagggtattttccacacccagatccatggaaaggtcatggcgatggacaaagtgaaagtgagaaggaagcccagggagccactgacagggggcaccttgatgaagaggaggtgatcgcctctggtgtggagaatgcctcagggatttctgaaaaagggcagagtgaccaggaactgtcttctctggttgcatctgaacatcaggaaatctgcattaaatcaggcaaaatcagctctcttgctgtcactttcagtcctcaaaccgaggaaccagaggaagttttagagtatgaggaggggtcttacaatctagactcccgtgatgtgcaaacagggatgtccgcagataacctgcagccaaaagatacccatgaaaaacacctcatgagtcaaagaaattcaggtgaaactactgagacttcagatgggatgaatttcacaaaatatgtatctgtacctgaaaaggatcttgagaaaactgaagaatgtaactttctagagccagagaacgtgggtggagggccacctcacagagttccccgaagtcttgattttggggacgtccctatagacagtgatgtgcatgtcagcagcacatgttctgagataaccaaaaatcttgacgttaaggggtctgaaaatagccttccaggagccggttcgtctggaaattttgacagagatactatttctagtgagtatactcattcaagtgcatcaagtcctgagttaaatgactcttcagttgcactgtcctcctggggccagcaacccagttctgggtatcaagaagaaaaccaaggcaactggagtgaacagaatcaccaagaatctgaactaattaccactgatggccaagtagaaatagttaccaaagtgaaggatttagagaaaaacagaataaatgagtttgaaaagagctttgatcgcaaaactcctacatttttagagatctggaatgactcagttgatggtgattccttttcctctttatccagtcctgaaacaggcaaatattctgaacattcagggacacatcaggaaagcaatctaattgctagctaccaggagaaaaatgaacatgacatttctgcaactgtgcagccagaggatgccagggtcatttcaacaagctcaggttctgatgatgacagtgtcggtggtgaagagtcaatagaggaagagatccaggtggccaactgccacgttgctgaggatgaatccagagcttgggattcattgaatgaatctaataagttcttggtcacagctgatcctaagtctgaaaatatttatgactacctagacagctcagagccagcagagaatgagaataagtcaaacccattctgtgacaatcaacaaagcagccctgatccctggactttctcaccattaacggagactgaaatgcagattacagcagtggagaaggagaagagatcttctccagaaacagggacaacaggagatgttgcatggcaaatatctcccaaagcttcgttcccaaagaacgaagataattctcaactggaaatgctgggcttctcagctgatagcactgagtggtggaaggcctcaccccaggaagggagactaattgaaagtccatttgaaagggagctgtctgactccagtggtgtgttggagataaattcttcagtacaccaaaatgccagtccctggggagtaccagttcagggtgatattgagcccgtggaaacacactatactaatccttttagtgacaaccatcagtcaccctttctggaaggtaatgggaagaactcccatgagcaactctggaacattcaaccaaggcagccagacccagatgctgacaagttcagccagcttgtaaaattagaccaaattaaagaaaaggactcaagagagcaaacctttgtgtctgctgctggtgatgagctgactcctgaaacacctacccaagagcagtgtcaggacaccatgctgccagtctgtgatcatccggacacagcctttactcacgcagaggaaaatagttgtgttacatctaatgtttcaactaatgaaggtcaagaaacaaatcagtgggaacaagaaaaatcatacctaggtgagatgacaaattcaagcattgccacagaaaattttcctgctgtcagttctcccacccaactgataatgaagccaggctctgaatgggatggctctaccccaagtgaggactcccgaggtacctttgtgccagatattttacatggcaactttcaagagggtgggcagctggcctctgccgcgcctgacttgtggatagatgctaagaagcccttcagtttgaaagcagatggtgagaatcctgatatcctgacgcactgcgaacatgacagcaattctcaggcttccgacagccctgatatatgtcacgattctgaagcaaagcaagagactgagaagcacctcagtgcttgcatgggacctgaagtggaatccagtgagctttgtctcactgagccagagatagatgaagaacccatttatgagcctggacgggagtttgtcccatccaatgcagaactcgattctgaaaacgcaactgtgctgcctccaattggctatcaagcagacataaagggctcctctcagcccgcctctcataaaggttcacctgaaccttctgaaataaacggtgacaacagtacaggtttacaagtatcagaaaaaggagccagcccagatatggcaccaattttggaaccagttgacagaagaatcccaaggattgaaaatgtggcaactagcatttttgtaactcaccaagagccaactccagaaggtgacggttcttggatatcagacagcttttctcctgaaagtcagcctggtgcaagagctttgtttgatggtgatccacatttatccacagagaatcctgccttggttcctgatgctttgctagcctcagacacttgtctggatataagcgaagctgcctttgaccacagtttcagcgatgcctcaggtctcaacacatccacgggaacaatagatgacatgagtaaactgacattatccgaaggccatccggaaacgccagttgatggggacctagggaagcaagatatctgctcatctgaagcctcgtggggtgattttgaatatgatgtaatgggccagaatatcgatgaagatttactgagagagcctgaacacttcctgtatggtggtgaccctcctttggaggaagattctctgaagcagtcgctggcaccgtacacacctccctttgatttgtcttatctcacagaacctgcccagagtgctgaaacaatagaggaagctgggtctccagaggatgaatctctgggatgcagagcagcagagatagtgctttctgcacttcctgatcgaagaagtgagggaaaccaggctgagaccaaaaacagactgcctggatcccagctggctgtgctgcatattcgtgaagaccctgagtccgtttatttgccggtaggagcaggctccaacattttgtctccatcaaacgttgactgggaagtagaaacagataattctgatttaccagcaggtggagacataggaccaccaaatggtaagaaacattccattcttccacttccaagaaactgctgcgttgattaaactagtgcatatttgtaagacacactcttcctaccaatgagggtagagagaaaactaactacattttcaaggcatgcctcactaagtcctgtattataacagcagtaaaatctagtgcatatgtaatacctattcctgatagtgcac

SEQ ID NO: 466218 - DNA, 1063 bp, Homo sapiens
ttatcaaagctgatttcagggagcaaagttcccaccaggagaggccacagcctcattagagagttctgggaatgatgaaaagccaggccgccgtgcacatccctgggacaattaggccttgtccctctgccttcaaaggcaatctcactgtctctgcgcgtgtgtgcgcacgtgagaggagaaaccggagatcacgaggctgcctgccggcactgctacgttctctacaaacagcaaactcgaaaatgccgtatttccctgataaataattcccattctaagggattccaccccccattccaagtcccctccaaaaatatatattgaaagaaaacaaaatcacaaggaaacacattttctactcttgtagcagaaaagggctggtaacggatttttggtgtctgcataagctgagagcaagtggctctaacctgggtttctgctgccagagaaggggcctggaaggttctccctgtgaggagatggggcagccctactgggacactgcaataactctgcttcctctaacctttcggctgggtcccgtgctccagggctttcatcatgtccttcatacctctgaagccactccaggctccctggccctcctgtggcttctgttgggccctgccaggcgggccagccagggcaggggcagagggcgaatgaccctctcccctcccagcccagagaagcggggggtgcgggcagccatgtctggggaaggaggcagatgtcacagctgtgccaggttcctcctactgcagggtgagcctgagcttgtcttctggaaaatgcggactgatgccctttctgcaaggtttgagtcctggattctgagcctgttggattctgctgcagcctgctcctacctaggaaaggagggaagcttccgaggccccagtgagatgtctctgccagccacaggggcacaggagggctaaatccagtggccctctcccttctctccctagcttgggttcctttgtgccaccccgcgagcggggtgtgtgtgccccaagccgacatgggcacctacagatgaggcctggtgggctgaacc

SEQ ID NO: 466219 - DNA, 5023 bp, Homo sapiens
tgcctgggcacccataagcttatcaagcttcttcaatgtctccacccttgagagggaggtaactgatgtggactctgtggttgggagaagctcagtgggtgaacggaggacattggcccaatctagaaggctttctgaaagagccctctccttggaggaaaatggggttggatccaacttcaaaacctccactctgagcgttagcagctttttcaagcaggaaggagatcgccttagcgatgaagacttattcaagtttttagctgactacaaaagatcatcatccttacagagacgagtcaagtcaattccaggcttgctaagactggagatttctacagctccagagatcatcaattgctgtctgactcctgaaatgctgcccgtgaaaccctttcctgaaaaccggacacgcccgcacaaagagattttggaatttccaacacgagaagtatatgtccctcacactgtgtacaggtaagaaacacaggctcgggctgggcgtggtggcttacaccataatcccataactttgggaggccgaggcaggaggattgcttgagctcaggagtttgagaccagccttggcaacatggcaaaaccgtgtctctacaacatatacaaaatttagctgggcatggtggtgcatgcttgtaatcccagcaacttggcaggctgaggcaggagaatcgcttgaacccaggaggcagaggttgcagtgagccaagattgcactactgcactccagcctgggagacagaaccagactctgtctcaaaaaaaaaagaaaaaaagaaaagcaggttcttggaaaaccgttgagctcacattctgagttttatttgaataacgttttctcatccttcaacctgtcttcctacttcctaagtttcagggaaatgaaatgtgatatttatgtaacctggggagaaaccctaagctgtacatatgaaggaatggattcatttctcctcttgcacagcaccccagcaccttgtacaccctattcctccctaactcccaaccgcacactcacctcccaagcatctgcagatctacatacatattatcaaatgtacagagtactgagtgaaatggtcactgtagctatggaaagaaaccttctctatgtctacccacagaggctgaactttgtaaacaaactagcatcagcccggaacattacaataaagatccagtttatgtgtggagaagatgctagcaatgcgatgccggtcatctttggaaaatccagcgggcctgaatttctgcaggaagtgtacacagctgttacataccataataagtctcctgacttttatgaagaagtgaaaattaagctccccgctaagctcacagtaaatcaccacctcctgttcaccttctaccatatcagctgtcagcagaagcaaggagcctccgtggaaactctcctgggatattcaaaagtcccattacagaatcctcccattaagtgggctgaaggacataagggagtatttaatattgaagtgcaagctgtttcttctgtacacacccaggacaaccacctggagaagttcttcaccctctgccactccctggagagccaggtgaccttccccatccgcgtgctggatcagaaaatcagcgagatggcgctggagcatgagctgaagctcagcatcatctgcctgaactcctcccgcctggagccgctcgtgctcttcctgcacctggtgctggacaagctcttccagctgtccgtgcagcccatggtcatcgctggccagacagccaacttctcccagtttgccttcgagtccgtggtggccatcgccaacagtctgcacaacagcaaggacctgagcaaggaccagcatgggaggaactgcctgctggcttcctacgtgcactacgtcttccgcctgccagaggtgcaaagggatgtgcccaagtcagaccctcggagctaccacacgtatggccgcacatcagctgctgctgtgagttcaaagctgctgcaggcccgggtgatgagcagcagtaacccagacctcgcggggacacactccgcagcagacgaggaagtgaagaacatcatgtcttcaaagatcgccgatcgcaactgcagccgaatgtcttactattgctctggcagtagtgatgctccaagttcacctgcagccccaaggccagccagcaaaaaggaaaatgaacaggcggaaaagatgaacatcagcctggctttcttcttgtatgaccttctctccctcatggatcggggctttgtgtttaacctcatcagacattattgcagccagtctgggacaagctccttgagttttttgcagaactcaagctcctgctccagcttccaggaccagaagatcgccagcatgttcgatctgacttccgagtaccgccagcagcacttcctcaccgggctcctcttcacagaactggctgctgccctggatgccgaaggggaaggaatcagcaaagtacaaaggaaagctgtcagtgcaattcacagcctgctaagttctcacgacctggacccacgctgtgtcaaaccagaggtgaaggtcaaaatcgccgccctttacctacctttagttggcatcattttggatgctttgccacagctctgtgactttacagttgcagatactcgcagataccgcaccagtggctcggatgaagaacaagaaggagccggtgccattaaccagaatgtggctctggccatagcagggaataatttcaatttgaaaacaagtggaatagtgctgtcttccttgccctataagcagtacaacatgctgaacgcggacactactcgcaacctcatgatctgcttcctctggatcatgaaaaatgctgatcagagcctcattaggaagtggattgctgacctgccatcaacgcagctcaacaggattttagatctacttttcatctgtgtgttatgttttgagtataagggaaaacagagttctgacaaagtcagtacccaagtcctgcagaagtcaagggatgtcaaggcccggctggaagaggctttgctccgtggggaaggggccagaggggagatgatgcgccgccgggctccagggaacgaccgatttccaggcctaaatgaaaatttgagatggaagaaagagcagacacattggcggcaagctaatgagaagctagataagaacatccagttcattggcacagtgcagggattcaatgatgctgttcttccattcccccaggcgagctcggctctggactgtaaagacagcctgctgggaggtgttctgagggtgctggtgaattctctgaactgtgatcagagtaccacctacctgactcactgctttgcaacactccgtgctctcatcgccaagaattttgcaagagtaaagatgcaagtaaccatgtccctggcatctttggtgggaagagcaccagactttaatgaagagcacctgagaagatccttgaggacaattttggcctattcagaagaggacacagccatgcagatgactccttttcccacccaggtggaggaacttctctgtaatctgaatagcatcttatatgacacagtgaaaatgagggaatttcaggaagatcctgagatgcttatggatctcatgtacagaattgccaagagttaccaggcatctcctgatctgcggctgacctggctccagaacatggcagagaaacacaccaagaagaagtgctacacggaggctgccatgtgcctggtgcacgccgctgcgttagtggctgagtatctgagcatgctggaggaccacagctacctgcccgtgggcagtgtcagcttccagaatatttcttccaatgtgctggaggagtctgtggtctctgaggacaccctgtcacctgacgaggatggggtgtgcgcaggccagtacttcaccgagagtggcctggtaggcctcctggagcaggccgcggagctcttcagcacgggaggcttatatgagacagttaatgaggtctacaagctggtcatccccatcctagaagcgcatcgagaattccggaagctgacactcactcacagcaagctgcagagagccttcgacagcatcgttaacaaggatcataagagaatgtttggaacctacttccgagttggtttctttggatccaaatttggggatttggatgaacaggaatttgtctacaaagagcctgcaattaccaagcttcctgagatctcacatagactagaggcattttatggtcaatgttttggtgcagaatttgtggaagtgattaaagactccactcctgtggacaaaaccaagttggatcctaacaaggcctacatacagatcacttttgtggagccctactttgatgagtatgagatgaaagacagggtcacatactttgagaagaatttcaacctccggaggttcatgtacaccaccccgttcaccctggaggggcggcctcggggagagctgcatgagcagtacagaaggaacacagtcctgaccactatgcacgccttcccctacatcaagaccaggatcagcgtcatccagaaggaggagaagtttgaaatcaaggtgccagcactgttggtgccttctgagggctgtgaggaaagggtctgttccaggcctctctccctgacctgtggacagccctcttctccctgtgtctcttcacatcatcttccctctgtgttcgtgtccagatttcctcttctctttgttttgacaccgattgaagttgccattgaagacatgaagaagaagaccctgcagttagcagttgccattaaccaggagccgcctgatgcaaagatgcttcagatggtgctgcaaggctctgtgggagctactgtaaatcagcgtaattggatttccccacaaaagttctgagtgtacttgacatcaagggagcagaaacagagaagagaaatgcctattacattcccaagatcaggaaaaaaaaatgaggaaacgtttgcctttgtaagtgccaatcctttgataaaatg

SEQ ID NO: 466220 - DNA, 6299 bp, Homo sapiens
tgcctgggcacccataagcttatcaagcttcttcaatgtctccacccttgagagggaggtaactgatgtggactctgtggttgggagaagctcagtgggtgaacggaggacattggcccaatctagaaggctttctgaaagagccctctccttggaggaaaatggggttggatccaacttcaaaacctccactctgagcgttagcagctttttcaagcaggaaggagatcgccttagcgatgaagacttattcaagtttttagctgactacaaaagatcatcatccttacagagacgagtcaagtcaattccaggcttgctaagactggagatttctacagctccagagatcatcaattgctgtctgactcctgaaatgctgcccgtgaaaccctttcctgaaaaccggacacgcccgcacaaagagattttggaatttccaacacgagaagtatatgtccctcacactgtgtacagaaaccttctctatgtctacccacagaggctgaactttgtaaacaaactagcatcagcccggaacattacaataaagatccagtttatgtgtggagaagatgctagcaatgcgatgccggtaaggagggaaacgaacatttgcctcaaatcagggtgggctgctcacccctgtcacttcacacaagtccgggactcatcagtgtacaaagtccgtctattccaggccaatactgctcagcatgtgcaagggcttctgtgcccaggatatcagtggggaaacagggtcatctttggaaaatccagcgggcctgaatttctgcaggaagtgtacacagctgttacataccataataagtctcctgacttttatgaagaagtgaaaattaagctccccgctaagctcacagtaaatcaccacctcctgttcaccttctaccatatcagctgtcagcagaagcaaggagcctccgtggaaactctcctgggatattcatggctgccaattctcttaaatgaacgtcttcaaactggatcctactgtctcccagttgccttggaaaaattgccacccaactactccatgcattctgctgagaaagtcccattacagaatcctcccattaagtgggctgaaggacataagggagtatttaatattgaagtgcaagctgtttcttctgtacacacccaggacaaccacctggagaagttcttcaccctctgccactccctggagagccaggtgaccttccccatccgcgtgctggatcagaaaatcagcgagatggcgctggagcatgagctgaagctcagcatcatctgcctgaactcctcccgcctggagccgctcgtgctcttcctgcacctggtgctggacaagctcttccagctgtccgtgcagcccatggtcatcgctggccagacagccaacttctcccagtttgccttcgagtccgtggtggccatcgccaacagtctgcacaacagcaaggacctgagcaaggaccagcatgggaggaactgcctgctggcttcctacgtgcactacgtcttccgcctgccagaggtgcaaagggatgtgcccaagtcaggcgctcccactgccctcctagaccctcggagctaccacacgtatggccgcacatcagctgctgctgtgagttcaaagctgctgcaggcccgggtgatgagcagcagtaacccagacctcgcggggacacactccgcagcagacgaggaagtgaagaacatcatgtcttcaaagatcgccgatcgcaactgcagccgaatgtcttactattgctctggcagtagtgatgctccaagttcacctgcagccccaaggccagccagcaaaaagcatttccatgaggagcttgcccttcagatggtggtcagcaccggaatggtgagagaaacagtcttcaagtatgcctggttcttctttgagcttctggtgaaaagcatggcccagcacgtacataacatggacaaacgggacagttttcggaggactcgtttttctgaccgtttcatggatgacataactactattgttaatgtggtcacctcggaaattgcagcccttttagtaaaaccacagaaggaaaatgaacaggcggaaaagatgaacatcagcctggctttcttcttgtatgaccttctctccctcatggatcggggctttgtgtttaacctcatcagacattattgcagccagctgtcagccaagctcagtaaccttccaacgctcatttccatgaggctagagttcctgagaatcctctgtagccatgagcattacctcaatctgaaccttttttttatgaatgctgatactgctccaacatctccttgtccttccatatcttcccagaactcaagctcctgctccagcttccaggaccagaagatcgccagcatgttcgatctgacttccgagtaccgccagcagcacttcctcaccgggctcctcttcacagaactggctgctgccctggatgccgaaggggaaggaatcagcaaagtacaaaggaaagctgtcagtgcaattcacagcctgctaagttctcacgacctggacccacgctgtgtcaaaccagaggtgaaggtcaaaatcgccgccctttacctacctttagttggcatcattttggatgctttgccacagctctgtgactttacagttgcagatactcgcagataccgcaccagtggctcggatgaagaacaagaaggagccggtgccattaaccagaatgtggctctggccatagcagggaataatttcaatttgaaaacaagtggaatagtgctgtcttccttgccctataagcagtacaacatgctgaacgcggacactactcgcaacctcatgatctgcttcctctggatcatgaaaaatgctgatcagagcctcattaggaagtggattgctgacctgccatcaacgcagctcaacaggattttagatctacttttcatctgtgtgttatgttttgagtataagggaaaacagagttctgacaaagtcagtacccaagtcctgcagaagtcaagggatgtcaaggcccggctggaagaggctttgctccgtggggaaggggccagaggggagatgatgcgccgccgggctccagggaacgaccgatttccaggcctaaatgaaaatttgagatggaagaaagagcagacacattggcggcaagctaatgagaagctagataaaacaaaggccgagttagatcaagaagccttgatcagtggcaatctggctacagaagcacatttaatcatcctggatatgcaggaaaacattatccaggcgagctcggctctggactgtaaagacagcctgctgggaggtgttctgagggtgctggtgaattctctgaactgtgatcagagtaccacctacctgactcactgctttgcaacactccgtgctctcatcgccaagtttggagacttactcttcgaagaggaggtggaacagtgtttcgacctatgtcaccaagtcctgcaccactgcagcagcagcatggatgtcacccggagccaagcctgtgccaccctttacctcctcatgaggttcagttttggagccaccagtaattttgcaagagtaaagatgcaagtaaccatgtccctggcatctttggtgggaagagcaccagactttaatgaagagcacctgagaagatccttgaggacaattttggcctattcagaagaggacacagccatgcagatgactccttttcccacccaggtggaggaacttctctgtaatctgaatagcatcttatatgacacagtgaaaatgagggaatttcaggaagatcctgagatgcttatggatctcatgtacagaattgccaagagttaccaggcatctcctgatctgcggctgacctggctccagaacatggcagagaaacacaccaagaagaagtgctacacggaggctgccatgtgcctggtgcacgccgctgcgttagtggctgagtatctgagcatgctggaggaccacagctacctgcccgtgggcagtgtcagcttccagaatatttcttccaatgtgctggaggagtctgtggtctctgaggacaccctgtcacctgacgaggatggggtgtgcgcaggccagtacttcaccgagagtggcctggtaggcctcctggagcaggccgcggagctcttcagcacgggaggcttatatgagacagttaatgaggtctacaagctggtcatccccatcctagaagcgcatcgagaattccggaagctgacactcactcacagcaagctgcagagagccttcgacagcatcgttaacaaggatcataagagaatgtttggaacctacttccgagttggtttctttggatccaaatttggggatttggatgaacaggaatttgtctacaaagagcctgcaattaccaagcttcctgagatctcacatagactagaggcattttatggtcaatgttttggtgcagaatttgtggaagtgattaaagactccactcctgtggacaaaaccaagttggatcctaacaaggcctacatacagatcacttttgtggagccctactttgatgagtatgagatgaaagacagggtcacatactttgagaagaatttcaacctccggaggttcatgtacaccaccccgttcaccctggaggggcggcctcggggagagctgcatgagcagtacagaaggaacacagtcctgaccactatgcacgccttcccctacatcaagaccaggatcagcgtcatccagaaggaggagtttgttttgacaccgattgaagttgccattgaagacatgaagaagaagaccctgcagttagcagttgccattaaccaggagccgcctgatgcaaagatgcttcagatggtgctgcaaggctctgtgggagctactgtaaatcagggaccactggaagtagcccaagtgtttttggctgaaattcctgctgatccaaaactctatcgacatcacaacaagttgaggttatgctttaaggaattcatcatgagatgtggtgaagctgtagagaaaaacaagcgtctcatcacggcagaccagagggaatatcagcaggaactcaaaaagaactataacaagctaaaagagaacctcaggccaatgatcgagcggaaaattccagaactgtacaagccaatattcagagttgagagtcaaaagagggactccttccacagatctagtttcaggaaatgtgaaacccagttgtcacagggcagctaagaaaagccatcttcattcgtggagactgtggccctgcaaccctggagaaggacttgctggtacttaaaaaatgggacatttgccacccaggactgactgtacactccctgatcagccagcactctggaagctttgggatcccaggaaccatggaattattcccaaatggactctgaccagatttttgccatactggggggtggcgggatggaggatgggtactcaggcatgactgcgtatttattaaagtgtgtttttccacaatgtaccaaacaaggcataagcagcttctcctgctgactggccaatcactgcccatctgagagatgatttcctctggcccatatttgaatttattggagtaactcaaattgcctgaggaaaaatggaaaaattatccaccagtcgattcaaactgaatttcactctttataggaaggcagggcaaacttgtaggagtacgaaacattttcaataaatctacaaagggaagccttactacaattccaaaaatcatcatggttggaaatttgggaggagattatttgtgaacttgttacccttttggtaatggtggactaattgctgtatagttatttttgttttattattactgttacattaatttaacatgcatttatagaagaatacattcaaagcactgatgtaggagatacacggtacttggagcagtcagccaaaaatcacagatactgctttcacttaaatggaaacaattctccgataatgctttgctttttttcttatgtcactcttgtgtactatctatttttctcctctctgggaccaagtttctttttataaagcaataatatctctgttttcatttcagaacattgtgctgtctgtcagcatatgtatatcagctacaaaatatattcaactttgacttcttttgacaaaggactttaggaaaaagaggaacaaagacattatttgagaattaaattatatatttttaatatgactgtgaccttgactgataataaagatgtaataagaattgcaagctaaa

SEQ ID NO: 466221 - DNA, 6145 bp, Homo sapiens
gagtattgtcacatatcagcccagaaagtcacaggtacagcaactcatacttgctcccagcaccaggccagccccattctgcctccagggagtcacccaaaatagagagatgagggtaaaataagacctaggaatactatttatttgcctccatggcctttgaacttgcacatccaacgtaacggctcctgtgtgttcttgattgttccaattatcatttttcctctcgaatacctgagagcattcattattttgcaagagatttgagaatccctgtgccctaacttttctttccttgatgtgggatgttcttctgtgactagaaaccttctctatgtctacccacagaggctgaactttgtaaacaaactagcatcagcccggaacattacaataaagatccagtttatgtgtggagaagatgctagcaatgcgatgccggtaaggagggaaacgaacatttgcctcaaatcagggtgggctgctcacccctgtcacttcacacaagtccgggactcatcagtgtacaaagtccgtctattccaggccaatactgctcagcatgtgcaagggcttctgtgcccaggatatcagtggggaaacagggtcatctttggaaaatccagcgggcctgaatttctgcaggaagtgtacacagctgttacataccataataagtctcctgacttttatgaagaagtgaaaattaagctccccgctaagctcacagtaaatcaccacctcctgttcaccttctaccatatcagctgtcagcagaagcaaggagcctccgtggaaactctcctgggatattcatggctgccaattctcttaaatgaacgtcttcaaactggatcctactgtctcccagttgccttggaaaaattgccacccaactactccatgcattctgctgagaaagtcccattacagaatcctcccattaagtgggctgaaggacataagggagtatttaatattgaagtgcaagctgtttcttctgtacacacccaggacaaccacctggagaagttcttcaccctctgccactccctggagagccaggtgaccttccccatccgcgtgctggatcagaaaatcagcgagatggcgctggagcatgagctgaagctcagcatcatctgcctgaactcctcccgcctggagccgctcgtgctcttcctgcacctggtgctggacaagctcttccagctgtccgtgcagcccatggtcatcgctggccagacagccaacttctcccagtttgccttcgagtccgtggtggccatcgccaacagtctgcacaacagcaaggacctgagcaaggaccagcatgggaggaactgcctgctggcttcctacgtgcactacgtcttccgcctgccagaggtgcaaagggatgtgcccaagtcaggcgctcccactgccctcctagaccctcggagctaccacacgtatggccgcacatcagctgctgctgtgagttcaaagctgctgcaggcccgggtgatgagcagcagtaacccagacctcgcggggacacactccgcagcagacgaggaagtgaagaacatcatgtcttcaaagatcgccgatcgcaactgcagccgaatgtcttactattgctctggcagtagtgatgctccaagttcacctgcagccccaaggccagccagcaaaaagcatttccatgaggagcttgcccttcagatggtggtcagcaccggaatggtgagagaaacagtcttcaagtatgcctggttcttctttgagcttctggtgaaaagcatggcccagcacgtacataacatggacaaacgggacagttttcggaggactcgtttttctgaccgtttcatggatgacataactactattgttaatgtggtcacctcggaaattgcagcccttttagtaaaaccacagaaggaaaatgaacaggcggaaaagatgaacatcagcctggctttcttcttgtatgaccttctctccctcatggatcggggctttgtgtttaacctcatcagacattattgcagccagctgtcagccaagctcagtaaccttccaacgctcatttccatgaggctagagttcctgagaatcctctgtagccatgagcattacctcaatctgaaccttttttttatgaatgctgatactgctccaacatctccttgtccttccatatcttcccagaactcaagctcctgctccagcttccaggaccagaagatcgccagcatgttcgatctgacttccgagtaccgccagcagcacttcctcaccgggctcctcttcacagaactggctgctgccctggatgccgaaggggaaggaatcagcaaagtacaaaggaaagctgtcagtgcaattcacagcctgctaagttctcacgacctggacccacgctgtgtcaaaccagaggtgaaggtcaaaatcgccgccctttacctacctttagttggcatcattttggatgctttgccacagctctgtgactttacagttgcagatactcgcagataccgcaccagtggctcggatgaagaacaagaaggagccggtgccattaaccagaatgtggctctggccatagcagggaataatttcaatttgaaaacaagtggaatagtgctgtcttccttgccctataagcagtacaacatgctgaacgcggacactactcgcaacctcatgatctgcttcctctggatcatgaaaaatgctgatcagagcctcattaggaagtggattgctgacctgccatcaacgcagctcaacaggattttagatctacttttcatctgtgtgttatgttttgagtataagggaaaacagagttctgacaaagtcagtacccaagtcctgcagaagtcaagggatgtcaaggcccggctggaagaggctttgctccgtggggaaggggccagaggggagatgatgcgccgccgggctccagggaacgaccgatttccaggcctaaatgaaaatttgagatggaagaaagagcagacacattggcggcaagctaatgagaagctagataaaacaaaggccgagttagatcaagaagccttgatcagtggcaatctggctacagaagcacatttaatcatcctggatatgcaggaaaacattatccaggcgagctcggctctggactgtaaagacagcctgctgggaggtgttctgagggtgctggtgaattctctgaactgtgatcagagtaccacctacctgactcactgctttgcaacactccgtgctctcatcgccaagtttggagacttactcttcgaagaggaggtggaacagtgtttcgacctatgtcaccaagtcctgcaccactgcagcagcagcatggatgtcacccggagccaagcctgtgccaccctttacctcctcatgaggttcagttttggagccaccagtaattttgcaagagtaaagatgcaagtaaccatgtccctggcatctttggtgggaagagcaccagactttaatgaagagcacctgagaagatccttgaggacaattttggcctattcagaagaggacacagccatgcagatgactccttttcccacccaggtggaggaacttctctgtaatctgaatagcatcttatatgacacagtgaaaatgagggaatttcaggaagatcctgagatgcttatggatctcatgtacagaattgccaagagttaccaggcatctcctgatctgcggctgacctggctccagaacatggcagagaaacacaccaagaagaagtgctacacggaggctgccatgtgcctggtgcacgccgctgcgttagtggctgagtatctgagcatgctggaggaccacagctacctgcccgtgggcagtgtcagcttccagaatatttcttccaatgtgctggaggagtctgtggtctctgaggacaccctgtcacctgacgaggatggggtgtgcgcaggccagtacttcaccgagagtggcctggtaggcctcctggagcaggccgcggagctcttcagcacgggaggcttatatgagacagttaatgaggtctacaagctggtcatccccatcctagaagcgcatcgagaattccggaagctgacactcactcacagcaagctgcagagagccttcgacagcatcgttaacaaggatcataagagaatgtttggaacctacttccgagttggtttctttggatccaaatttggggatttggatgaacaggaatttgtctacaaagagcctgcaattaccaagcttcctgagatctcacatagactagaggcattttatggtcaatgttttggtgcagaatttgtggaagtgattaaagactccactcctgtggacaaaaccaagttggatcctaacaaggcctacatacagatcacttttgtggagccctactttgatgagtatgagatgaaagacagggtcacatactttgagaagaatttcaacctccggaggttcatgtacaccaccccgttcaccctggaggggcggcctcggggagagctgcatgagcagtacagaaggaacacagtcctgaccactatgcacgccttcccctacatcaagaccaggatcagcgtcatccagaaggaggagtttgttttgacaccgattgaagttgccattgaagacatgaagaagaagaccctgcagttagcagttgccattaaccaggagccgcctgatgcaaagatgcttcagatggtgctgcaaggctctgtgggagctactgtaaatcagggaccactggaagtagcccaagtgtttttggctgaaattcctgctgatccaaaactctatcgacatcacaacaagttgaggttatgctttaaggaattcatcatgagatgtggtgaagctgtagagaaaaacaagcgtctcatcacggcagaccagagggaatatcagcaggaactcaaaaagaactataacaagctaaaagagaacctcaggccaatgatcgagcggaaaattccagaactgtacaagccaatattcagagttgagagtcaaaagagggactccttccacagatctagtttcaggaaatgtgaaacccagttgtcacagggcagctaagaaaagccatcttcattcgtggagactgtggccctgcaaccctggagaaggacttgctggtacttaaaaaatgggacatttgccacccaggactgactgtacactccctgatcagccagcactctggaagctttgggatcccaggaaccatggaattattcccaaatggactctgaccagatttttgccatactggggggtggcgggatggaggatgggtactcaggcatgactgcgtatttattaaagtgtgtttttccacaatgtaccaaacaaggcataagcagcttctcctgctgactggccaatcactgcccatctgagagatgatttcctctggcccatatttgaatttattggagtaactcaaattgcctgaggaaaaatggaaaaattatccaccagtcgattcaaactgaatttcactctttataggaaggcagggcaaacttgtaggagtacgaaacattttcaataaatctacaaagggaagccttactacaattccaaaaatcatcatggttggaaatttgggaggagattatttgtgaacttgttacccttttggtaatggtggactaattgctgtatagttatttttgttttattattactgttacattaatttaacatgcatttatagaagaatacattcaaagcactgatgtaggagatacacggtacttggagcagtcagccaaaaatcacagatactgctttcacttaaatggaaacaattctccgataatgctttgctttttttcttatgtcactcttgtgtactatctatttttctcctctctgggaccaagtttctttttataaagcaataatatctctgttttcatttcagaacattgtgctgtctgtcagcatatgtatatcagctacaaaatatattcaactttgacttcttttgacaaaggactttaggaaaaagaggaacaaagacattatttgagaattaaattatatatttttaatatgactgtgaccttgactgataataaagatgtaataagaattgcaagctaaa

SEQ ID NO: 466222 - DNA, 5841 bp, Homo sapiens
gagtattgtcacatatcagcccagaaagtcacaggtacagcaactcatacttgctcccagcaccaggccagccccattctgcctccagggagtcacccaaaatagagagatgagggtaaaataagacctaggaatactatttatttgcctccatggcctttgaacttgcacatccaacgtaacggctcctgtgtgttcttgattgttccaattatcatttttcctctcgaatacctgagagcattcattattttgcaagagatttgagaatccctgtgccctaacttttctttccttgatgtgggatgttcttctgtgactagaaaccttctctatgtctacccacagaggctgaactttgtaaacaaactagcatcagcccggaacattacaataaagatccagtttatgtgtggagaagatgctagcaatgcgatgccggtcatctttggaaaatccagcgggcctgaatttctgcaggaagtgtacacagctgttacataccataataatggctgccaattctcttaaatgaacgtcttcaaactggatcctactgtctcccagttgccttggaaaaattgccacccaactactccatgcattctgctgagaaagtcccattacagaatcctcccattaagtgggctgaaggacataagggagtatttaatattgaagtgcaagctgtttcttctgtacacacccaggacaaccacctggagaagttcttcaccctctgccactccctggagagccaggtgaccttccccatccgcgtgctggatcagaaaatcagcgagatggcgctggagcatgagctgaagctcagcatcatctgcctgaactcctcccgcctggagccgctcgtgctcttcctgcacctggtgctggacaagctcttccagctgtccgtgcagcccatggtcatcgctggccagacagccaacttctcccagtttgccttcgagtccgtggtggccatcgccaacagtctgcacaacagcaaggacctgagcaaggaccagcatgggaggaactgcctgctggcttcctacgtgcactacgtcttccgcctgccagaggtgcaaagggatgtgcccaagtcaggcgctcccactgccctcctagaccctcggagctaccacacgtatggccgcacatcagctgctgctgtgagttcaaagctgctgcaggcccgggtgatgagcagcagtaacccagacctcgcggggacacactccgcagcagacgaggaagtgaagaacatcatgtcttcaaagatcgccgatcgcaactgcagccgaatgtcttactattgctctggcagtagtgatgctccaagttcacctgcagccccaaggccagccagcaaaaagcatttccatgaggagcttgcccttcagatggtggtcagcaccggaatggtgagagaaacagtcttcaagtatgcctggttcttctttgagcttctggtgaaaagcatggcccagcacgtacataacatggacaaacgggacagttttcggaggactcgtttttctgaccgtttcatggatgacataactactattgttaatgtggtcacctcggaaattgcagcccttttagtaaaaccacagaaggaaaatgaacaggcggaaaagatgaacatcagcctggctttcttcttgtatgaccttctctccctcatggatcggggctttgtgtttaacctcatcagacattattgcagccagctgtcagccaagctcagtaaccttccaacgctcatttccatgaggctagagttcctgagaatcctctgtagccatgagcattacctcaatctgaaccttttttttatgaatgctgatactgctccaacatctccttgtccttccatatcttcccagaactcaagctcctgctccagcttccaggaccagaagatcgccagcatgttcgatctgacttccgagtaccgccagcagcacttcctcaccgggctcctcttcacagaactggctgctgccctggatgccgaaggggaaggaatcagcaaagtacaaaggaaagctgtcagtgcaattcacagcctgctaagttctcacgacctggacccacgctgtgtcaaaccagaggtgaaggtcaaaatcgccgccctttacctacctttagttggcatcattttggatgctttgccacagctctgtgactttacagttgcagatactcgcagataccgcaccagtggctcggatgaagaacaagaaggagccggtgccattaaccagaatgtggctctggccatagcagggaataatttcaatttgaaaacaagtggaatagtgctgtcttccttgccctataagcagtacaacatgctgaacgcggacactactcgcaacctcatgatctgcttcctctggatcatgaaaaatgctgatcagagcctcattaggaagtggattgctgacctgccatcaacgcagctcaacaggattttagatctacttttcatctgtgtgttatgttttgagtataagggaaaacagagttctgacaaagtcagtacccaagtcctgcagaagtcaagggatgtcaaggcccggctggaagaggctttgctccgtggggaaggggccagaggggagatgatgcgccgccgggctccagggaacgaccgatttccaggcctaaatgaaaatttgagatggaagaaagagcagacacattggcggcaagctaatgagaagctagataaaacaaaggccgagttagatcaagaagccttgatcagtggcaatctggctacagaagcacatttaatcatcctggatatgcaggaaaacattatccaggcgagctcggctctggactgtaaagacagcctgctgggaggtgttctgagggtgctggtgaattctctgaactgtgatcagagtaccacctacctgactcactgctttgcaacactccgtgctctcatcgccaagtttggagacttactcttcgaagaggaggtggaacagtgtttcgacctatgtcaccaagtcctgcaccactgcagcagcagcatggatgtcacccggagccaagcctgtgccaccctttacctcctcatgaggttcagttttggagccaccagtaattttgcaagagtaaagatgcaagtaaccatgtccctggcatctttggtgggaagagcaccagactttaatgaagagcacctgagaagatccttgaggacaattttggcctattcagaagaggacacagccatgcagatgactccttttcccacccaggtggaggaacttctctgtaatctgaatagcatcttatatgacacagtgaaaatgagggaatttcaggaagatcctgagatgcttatggatctcatgtacagaattgccaagagttaccaggcatctcctgatctgcggctgacctggctccagaacatggcagagaaacacaccaagaagaagtgctacacggaggctgccatgtgcctggtgcacgccgctgcgttagtggctgagtatctgagcatgctggaggaccacagctacctgcccgtgggcagtgtcagcttccagaatatttcttccaatgtgctggaggagtctgtggtctctgaggacaccctgtcacctgacgaggatggggtgtgcgcaggccagtacttcaccgagagtggcctggtaggcctcctggagcaggccgcggagctcttcagcacgggaggcttatatgagacagttaatgaggtctacaagctggtcatccccatcctagaagcgcatcgagaattccggaagctgacactcactcacagcaagctgcagagagccttcgacagcatcgttaacaaggatcataagagaatgtttggaacctacttccgagttggtttctttggatccaaatttggggatttggatgaacaggaatttgtctacaaagagcctgcaattaccaagcttcctgagatctcacatagactagaggcattttatggtcaatgttttggtgcagaatttgtggaagtgattaaagactccactcctgtggacaaaaccaagttggatcctaacaaggcctacatacagatcacttttgtggagccctactttgatgagtatgagatgaaagacagggtcacatactttgagaagaatttcaacctccggaggttcatgtacaccaccccgttcaccctggaggggcggcctcggggagagctgcatgagcagtacagaaggaacacagtcctgaccactatgcacgccttcccctacatcaagaccaggatcagcgtcatccagaaggaggagtttgttttgacaccgattgaagttgccattgaagacatgaagaagaagaccctgcagttagcagttgccattaaccaggagccgcctgatgcaaagatgcttcagatggtgctgcaaggctctgtgggagctactgtaaatcagggaccactggaagtagcccaagtgtttttggctgaaattcctgctgatccaaaactctatcgacatcacaacaagttgaggttatgctttaaggaattcatcatgagatgtggtgaagctgtagagaaaaacaagcgtctcatcacggcagaccagagggaatatcagcaggaactcaaaaagaactataacaagctaaaagagaacctcaggccaatgatcgagcggaaaattccagaactgtacaagccaatattcagagttgagagtcaaaagagggactccttccacagatctagtttcaggaaatgtgaaacccagttgtcacagggcagctaagaaaagccatcttcattcgtggagactgtggccctgcaaccctggagaaggacttgctggtacttaaaaaatgggacatttgccacccaggactgactgtacactccctgatcagccagcactctggaagctttgggatcccaggaaccatggaattattcccaaatggactctgaccagatttttgccatactggggggtggcgggatggaggatgggtactcaggcatgactgcgtatttattaaagtgtgtttttccacaatgtaccaaacaaggcataagcagcttctcctgctgactggccaatcactgcccatctgagagatgatttcctctggcccatatttgaatttattggagtaactcaaattgcctgaggaaaaatggaaaaattatccaccagtcgattcaaactgaatttcactctttataggaaggcagggcaaacttgtaggagtacgaaacattttcaataaatctacaaagggaagccttactacaattccaaaaatcatcatggttggaaatttgggaggagattatttgtgaacttgttacccttttggtaatggtggactaattgctgtatagttatttttgttttattattactgttacattaatttaacatgcatttatagaagaatacattcaaagcactgatgtaggagatacacggtacttggagcagtcagccaaaaatcacagatactgctttcacttaaatggaaacaattctccgataatgctttgctttttttcttatgtcactcttgtgtactatctatttttctcctctctgggaccaagtttctttttataaagcaataatatctctgttttcatttcagaacattgtgctgtctgtcagcatatgtatatcagctacaaaatatattcaactttgacttcttttgacaaaggactttaggaaaaagaggaacaaagacattatttgagaattaaattatatatttttaatatgactgtgaccttgactgataataaagatgtaataagaattgcaagctaaa

SEQ ID NO: 466223 - DNA, 6245 bp, Homo sapiens
tgcctgggcacccataagcttatcaagcttcttcaatgtctccacccttgagagggaggtaactgatgtggactctgtggttgggagaagctcagtgggtgaacggaggacattggcccaatctagaaggctttctgaaagagccctctccttggaggaaaatggggttggatccaacttcaaaacctccactctgagcgttagcagctttttcaagcaggaaggagatcgccttagcgatgaagacttattcaagtttttagctgactacaaaagatcatcatccttacagagacgagtcaagtcaattccaggcttgctaagactggagatttctacagctccagagatcatcaattgctgtctgactcctgaaatgctgcccgtgaaaccctttcctgaaaaccggacacgcccgcacaaagagattttggaatttccaacacgagaagtatatgtccctcacactgtgtacagaaaccttctctatgtctacccacagaggctgaactttgtaaacaaactagcatcagcccggaacattacaataaagatccagtttatgtgtggagaagatgctagcaatgcgatgccggtaaggagggaaacgaacatttgcctcaaatcagggtgggctgctcacccctgtcacttcacacaagtccgggactcatcagtgtacaaagtccgtctattccaggccaatactgctcagcatgtgcaagggcttctgtgcccaggatatcagtggggaaacagggtcatctttggaaaatccagcgggcctgaatttctgcaggaagtgtacacagctgttacataccataataagtctcctgacttttatgaagaagtgaaaattaagctccccgctaagctcacagtaaatcaccacctcctgttcaccttctaccatatcagctgtcagcagaagcaaggagcctccgtggaaactctcctgggatattcatggctgccaattctcttaaatgaacgtcttcaaactggatcctactgtctcccagttgccttggaaaaattgccacccaactactccatgcattctgctgagaaagtcccattacagaatcctcccattaagtgggctgaaggacataagggagtatttaatattgaagtgcaagctgtttcttctgtacacacccaggacaaccacctggagaagttcttcaccctctgccactccctggagagccaggtgaccttccccatccgcgtgctggatcagaaaatcagcgagatggcgctggagcatgagctgaagctcagcatcatctgcctgaactcctcccgcctggagccgctcgtgctcttcctgcacctggtgctggacaagctcttccagctgtccgtgcagcccatggtcatcgctggccagacagccaacttctcccagtttgccttcgagtccgtggtggccatcgccaacagtctgcacaacagcaaggacctgagcaaggaccagcatgggaggaactgcctgctggcttcctacgtgcactacgtcttccgcctgccagaggtgcaaagggatgtgcccaagtcaggcgctcccactgccctcctagaccctcggagctaccacacgtatggccgcacatcagctgctgctgtgagttcaaagctgctgcaggcccgggtgatgagcagcagtaacccagacctcgcggggacacactccgcagcagacgaggaagtgaagaacatcatgtcttcaaagatcgccgatcgcaactgcagccgaatgtcttactattgctctggcagtagtgatgctccaagttcacctgcagccccaaggccagccagcaaaaagcatttccatgaggagcttgcccttcagatggtggtcagcaccggaatggtgagagaaacagtcttcaagtatgcctggttcttctttgagcttctggtgaaaagcatggcccagcacgtacataacatggacaaacgggacagttttcggaggactcgtttttctgaccgtttcatggatgacataactactattgttaatgtggtcacctcggaaattgcagcccttttagtaaaaccacagaaggaaaatgaacaggcggaaaagatgaacatcagcctggctttcttcttgtatgaccttctctccctcatggatcggggctttgtgtttaacctcatcagacattattgcagccagctgtcagccaagctcagtaaccttccaacgctcatttccatgaggctagagttcctgagaatcctctgtagccatgagcattacctcaatctgaaccttttttttatgaatgctgatactgctccaacatctccttgtccttccatatcttcccagaactcaagctcctgctccagcttccaggaccagaagatcgccagcatgttcgatctgacttccgagtaccgccagcagcacttcctcaccgggctcctcttcacagaactggctgctgccctggatgccgaaggggaaggaatcagcaaagtacaaaggaaagctgtcagtgcaattcacagcctgctaagttctcacgacctggacccacgctgtgtcaaaccagaggtgaaggtcaaaatcgccgccctttacctacctttagttggcatcattttggatgctttgccacagctctgtgactttacagttgcagatactcgcagataccgcaccagtggctcggatgaagaacaagaaggagccggtgccattaaccagaatgtggctctggccatagcagggaataatttcaatttgaaaacaagtggaatagtgctgtcttccttgccctataagcagtacaacatgctgaacgcggacactactcgcaacctcatgatctgcttcctctggatcatgaaaaatgctgatcagagcctcattaggaagtggattgctgacctgccatcaacgcagctcaacaggattttagatctacttttcatctgtgtgttatgttttgagtataagggaaaacagagttctgacaaagtcagtacccaagtcctgcagaagtcaagggatgtcaaggcccggctggaagaggctttgctccgtggggaaggggccagaggggagatgatgcgccgccgggctccagggaacgaccgatttccaggcctaaatgaaaatttgagatggaagaaagagcagacacattggcggcaagctaatgagaagctagataaaacaaaggccgagttagatcaagaagccttgatcagtggcaatctggctacagaagcacatttaatcatcctggatatgcaggaaaacattatccaggcgagctcggctctggactgtaaagacagcctgctgggaggtgttctgagggtgctggtgaattctctgaactgtgatcagagtaccacctacctgactcactgctttgcaacactccgtgctctcatcgccaagtttggagacttactcttcgaagaggaggtggaacagtgtttcgacctatgtcaccaagtcctgcaccactgcagcagcagcatggatgtcacccggagccaagcctgtgccaccctttacctcctcatgaggttcagttttggagccaccagtaattttgcaagagtaaagatgcaagtaaccatgtccctggcatctttggtgggaagagcaccagactttaatgaagagcacctgagaagatccttgaggacaattttggcctattcagaagaggacacagccatgcagatgactccttttcccacccaggtggaggaacttctctgtaatctgaatagcatcttatatgacacagtgaaaatgagggaatttcaggaagatcctgagatgcttatggatctcatgtacagaattgccaagagttaccaggcatctcctgatctgcggctgacctggctccagaacatggcagagaaacacaccaagaagaagtgctacacggaggctgccatgtgcctggtgcacgccgctgcgttagtggctgagtatctgagcatgctggaggaccacagctacctgcccgtgggcagtgtcagcttccagaatatttcttccaatgtgctggaggagtctgtggtctctgaggacaccctgtcacctgacgaggatggggtgtgcgcaggccagtacttcaccgagagtggcctggtaggcctcctggagcaggccgcggagctcttcagcacgggaggcttatatgagacagttaatgaggtctacaagctggtcatccccatcctagaagcgcatcgagaattccggaagctgacactcactcacagcaagctgcagagagccttcgacagcatcgttaacaaggatcataagagaatgtttggaacctacttccgagttggtttctttggatccaaatttggggatttggatgaacaggaatttgtctacaaagagcctgcaattaccaagcttcctgagatctcacatagactagaggcattttatggtcaatgttttggtgcagaatttgtggaagtgattaaagactccactcctgtggacaaaaccaagttggatcctaacaaggcctacatacagatcacttttgtggagccctactttgatgagtatgagatgaaagacagggtcacatactttgagaagaatttcaacctccggaggttcatgtacaccaccccgttcaccctggaggggcggcctcggggagagctgcatgagcagtacagaaggaacacagtcctgaccactatgcacgccttcccctacatcaagaccaggatcagcgtcatccagaaggaggagtttgttttgacaccgattgaagttgccattgaagacatgaagaagaagaccctgcagttagcagttgccattaaccaggagccgcctgatgcaaagatgcttcagatggtgctgcaaggctctgtgggagctactgtaaatcagggaccactggaagtagcccaagtgtttttggctgaaattcctgctgatccaaaactctatcgacatcacaacaagttgaggttatgctttaaggaattcatcatgagatgtggtgaagctgtagagaaaaacaagcgtctcatcacggcagaccagagggaatatcagcaggaactcaaaaagaactataacaagctaaaagagaacctcaggccaatgatcgagcggaaaattccagaactgtacaagccaatattcagagttgagagtcaaaagagggactccttccacagatctagtttcaggaaatgtgaaacccagttgtcacagggcagctaagaaaagccatcttcattcgtggagactgtggccctgcaaccctggagaaggacttgctggtacttaaaaaatgggacatttgccacccaggactgactgtacactccctgatcagccagcactctggaagctttgggatcccaggaaccatggaattattcccaaatggactctgaccagatttttgccatactggggggtggcgggatggaggatgggtactcaggcatgactgcgtatttattaaagtgtgtttttccacaatgtaccaaacaaggcataagcagcttctcctgctgactggccaatcactgcccatctgagagatgatttcctctggcccatatttgaatttattggagtaactcaaattgcctgaggaaaaatggaaaaattatccaccagtcgattcaaactgaatttcactctttataggaaggcagggcaaacttgtaggagtacgaaacattttcaataaatctacaaagggaagccttactacaattccttttggtaatggtggactaattgctgtatagttatttttgttttattattactgttacattaatttaacatgcatttatagaagaatacattcaaagcactgatgtaggagatacacggtacttggagcagtcagccaaaaatcacagatactgctttcacttaaatggaaacaattctccgataatgctttgctttttttcttatgtcactcttgtgtactatctatttttctcctctctgggaccaagtttctttttataaagcaataatatctctgttttcatttcagaacattgtgctgtctgtcagcatatgtatatcagctacaaaatatattcaactttgacttcttttgacaaaggactttaggaaaaagaggaacaaagacattatttgagaattaaattatatatttttaatatgactgtgaccttgactgataataaagatgtaataagaattgcaagctaaa

SEQ ID NO: 466224 - DNA, 1131 bp, Homo sapiens
gagctcggtacccgtgctgccacaaaggatgcccggactccttccacagatctagtttcaggaaatgtgaaacccagttgtcacagggcagctaagaaaagccatcttcattcgtggagactgtggccctgcaaccctggagaaggacttgctggtacttaaaaaatgggacatttgccacccaggactgactgtacactccctgatcagccagcactctggaagctttgggatcccaggaaccatggaattattcccaaatggactctgaccagatttttgccatactggggggtggcgggatggaggatgggtactcaggcatgactgcgtatttattaaagtgtgtttttccacaatgtaccaaacaaggcataagcagcttctcctgctgactggccaatcactgcccatctgagagatgatttcctctggcccatatttgaatttattggagtaactcaaattgcctgaggaaaaatggaaaaattatccaccagtcgattcaaactgaatttcactctttataggaaggcagggcaaacttgtaggagtacgaaacattttcaataaatctacaaagggaagccttactacaattccaaaaatcatcatggttggaaatttgggaggagattatttgtgaacttgttacccttttggtaatggtggactaattgctgtatagttatttttgttttattattactgttacattaatttaacatgcatttatagaagaatacattcaaagcactgatgtaggagatacacggtacttggagcagtcagccaaaaatcacagatactgctttcacttaaatggaaacaattctccgataatgctttgctttttttcttatgtcactcttgtgtactatctatttttctcctctctgggaccaagtttctttttataaagcaataatatctctgttttcatttcagaacattgtgctgtctgtcagcatatgtatatcagctacaaaatatattcaactttgacttcttttgacaaaggactttaggaaaaagaggaacaaagacattatttgagaattaaattatatatttttaatatgactgtgaccttgactgataataaagatgtaataagaattgcaagctaaa

SEQ ID NO: 466225 - DNA, 727 bp, Homo sapiens
gagacagcttttaccatgagaacggctttgctccatatttgaatttattggagtaactcaaattgcctgaggaaaaatggaaaaattatccaccagtcgattcaaactgaatttcactctttataggaaggcagggcaaacttgtaggagtacgaaacattttcaataaatctacaaagggaagccttactacaattccaaaaatcatcatggttggaaatttgggaggagattatttgtgaacttgttacccttttggtaatggtggactaattgctgtatagttatttttgttttattattactgttacattaatttaacatgcatttatagaagaatacattcaaagcactgatgtaggagatacacggtacttggagcagtcagccaaaaatcacagatactgctttcacttaaatggaaacaattctccgataatgctttgctttttttcttatgtcactcttgtgtactatctatttttctcctctctgggaccaagtttctttttataaagcaataatatctctgttttcatttcagaacattgtgctgtctgtcagcatatgtatatcagctacaaaatatattcaactttgacttcttttgacaaaggactttaggaaaaagaggaacaaagacattatttgagaattaaattatatatttttaatatgactgtgaccttgactgataataaagatgtaataagaattgcaagctaaa

SEQ ID NO: 466226 - DNA, 5385 bp, Homo sapiens
tgcctgggcacccataagcttatcaagcttcttcaatgtctccacccttgagagggaggtaactgatgtggactctgtggttgggagaagctcagtgggtgaacggaggacattggcccaatctagaaggctttctgaaagagccctctccttggaggaaaatggggttggatccaacttcaaaacctccactctgagcgttagcagctttttcaagcaggaaggagatcgccttagcgatgaagacttattcaagtttttagctgactacaaaagatcatcatccttacagagacgagtcaagtcaattccaggcttgctaagactggagatttctacagctccagagatcatcaattgctgtctgactcctgaaatgctgcccgtgaaaccctttcctgaaaaccggacacgcccgcacaaagagattttggaatttccaacacgagaagtatatgtccctcacactgtgtacagaaaccttctctatgtctacccacagaggctgaactttgtaaacaaactagcatcagcccggaacattacaataaagatccagtttatgtgtggagaagatgctagcaatgcgatgccggtaaggagggaaacgaacatttgcctcaaatcagggtgggctgctcacccctgtcacttcacacaagtccgggactcatcagtgtacaaagtccgtctattccaggccaatactgctcagcatgtgcaagggcttctgtgcccaggatatcagtggggaaacagggtcatctttggaaaatccagcgggcctgaatttctgcaggaagtgtacacagctgttacataccataataagtctcctgacttttatgaagaagtgaaaattaagctccccgctaagctcacagtaaatcaccacctcctgttcaccttctaccatatcagctgtcagcagaagcaaggagcctccgtggaaactctcctgggatattcatggctgccaattctcttaaatgaacgtcttcaaactggatcctactgtctcccagttgccttggaaaaattgccacccaactactccatgcattctgctgagaaagtcccattacagaatcctcccattaagtgggctgaaggacataagggagtatttaatattgaagtgcaagctgtttcttctgtacacacccaggacaaccacctggagaagttcttcaccctctgccactccctggagagccaggtgaccttccccatccgcgtgctggatcagaaaatcagcgagatggcgctggagcatgagctgaagctcagcatcatctgcctgaactcctcccgcctggagccgctcgtgctcttcctgcacctggtgctggacaagctcttccagctgtccgtgcagcccatggtcatcgctggccagacagccaacttctcccagtttgccttcgagtccgtggtggccatcgccaacagtctgcacaacagcaaggacctgagcaaggaccagcatgggaggaactgcctgctggcttcctacgtgcactacgtcttccgcctgccagaggtgcaaagggatgtgcccaagtcaggcgctcccactgccctcctagaccctcggagctaccacacgtatggccgcacatcagctgctgctgtgagttcaaagctgctgcaggcccgggtgatgagcagcagtaacccagacctcgcggggacacactccgcagcagacgaggaagtgaagaacatcatgtcttcaaagatcgccgatcgcaactgcagccgaatgtcttactattgctctggcagtagtgatgctccaagttcacctgcagccccaaggccagccagcaaaaagcatttccatgaggagcttgcccttcagatggtggtcagcaccggaatggtgagagaaacagtcttcaagtatgcctggttcttctttgagcttctggtgaaaagcatggcccagcacgtacataacatggacaaacgggacagttttcggaggactcgtttttctgaccgtttcatggatgacataactactattgttaatgtggtcacctcggaaattgcagcccttttagtaaaaccacagaaggaaaatgaacaggcggaaaagatgaacatcagcctggctttcttcttgtatgaccttctctccctcatggatcggggctttgtgtttaacctcatcagacattattgcagccagctgtcagccaagctcagtaaccttccaacgctcatttccatgaggctagagttcctgagaatcctctgtagccatgagcattacctcaatctgaaccttttttttatgaatgctgatactgctccaacatctccttgtccttccatatcttcccagaactcaagctcctgctccagcttccaggaccagaagatcgccagcatgttcgatctgacttccgagtaccgccagcagcacttcctcaccgggctcctcttcacagaactggctgctgccctggatgccgaaggggaaggaatcagcaaagtacaaaggaaagctgtcagtgcaattcacagcctgctaagttctcacgacctggacccacgctgtgtcaaaccagaggtgaaggtcaaaatcgccgccctttacctacctttagttggcatcattttggatgctttgccacagctctgtgactttacagttgcagatactcgcagataccgcaccagtggctcggatgaagaacaagaaggagccggtgccattaaccagaatgtggctctggccatagcagggaataatttcaatttgaaaacaagtggaatagtgctgtcttccttgccctataagcagtacaacatgctgaacgcggacactactcgcaacctcatgatctgcttcctctggatcatgaaaaatgctgatcagagcctcattaggaagtggattgctgacctgccatcaacgcagctcaacaggattttagatctacttttcatctgtgtgttatgttttgagtataagggaaaacagagttctgacaaagtcagtacccaagtcctgcagaagtcaagggatgtcaaggcccggctggaagaggctttgctccgtggggaaggggccagaggggagatgatgcgccgccgggctccagggaacgaccgatttccaggcctaaatgaaaatttgagatggaagaaagagcagacacattggcggcaagctaatgagaagctagataaaacaaaggccgagttagatcaagaagccttgatcagtggcaatctggctacagaagcacatttaatcatcctggatatgcaggaaaacattatccaggcgagctcggctctggactgtaaagacagcctgctgggaggtgttctgagggtgctggtgaattctctgaactgtgatcagagtaccacctacctgactcactgctttgcaacactccgtgctctcatcgccaagtttggagacttactcttcgaagaggaggtggaacagtgtttcgacctatgtcaccaagtcctgcaccactgcagcagcagcatggatgtcacccggagccaagcctgtgccaccctttacctcctcatgaggttcagttttggagccaccagtaattttgcaagagtaaagatgcaagtaaccatgtccctggcatctttggtgggaagagcaccagactttaatgaagagcacctgagaagatccttgaggacaattttggcctattcagaagaggacacagccatgcagatgactccttttcccacccaggtggaggaacttctctgtaatctgaatagcatcttatatgacacagtgaaaatgagggaatttcaggaagatcctgagatgcttatggatctcatgtacagaattgccaagagttaccaggcatctcctgatctgcggctgacctggctccagaacatggcagagaaacacaccaagaagaagtgctacacggaggctgccatgtgcctggtgcacgccgctgcgttagtggctgagtatctgagcatgctggaggaccacagctacctgcccgtgggcagtgtcagcttccagaatatttcttccaatgtgctggaggagtctgtggtctctgaggacaccctgtcacctgacgaggatggggtgtgcgcaggccagtacttcaccgagagtggcctggtaggcctcctggagcaggccgcggagctcttcagcacgggaggcttatatgagacagttaatgaggtctacaagctggtcatccccatcctagaagcgcatcgagaattccggaagctgacactcactcacagcaagctgcagagagccttcgacagcatcgttaacaaggatcataagagaatgtttggaacctacttccgagttggtttctttggatccaaatttggggatttggatgaacaggaatttgtctacaaagagcctgcaattaccaagcttcctgagatctcacatagactagaggcattttatggtcaatgttttggtgcagaatttgtggaagtgattaaagactccactcctgtggacaaaaccaagttggatcctaacaaggcctacatacagatcacttttgtggagccctactttgatgagtatgagatgaaagacagggtcacatactttgagaagaatttcaacctccggaggttcatgtacaccaccccgttcaccctggaggggcggcctcggggagagctgcatgagcagtacagaaggaacacagtcctgaccactatgcacgccttcccctacatcaagaccaggatcagcgtcatccagaaggaggagtttgttttgacaccgattgaagttgccattgaagacatgaagaagaagaccctgcagttagcagttgccattaaccaggagccgcctgatgcaaagatgcttcagatggtgctgcaaggctctgtgggagctactgtaaatcagggaccactggaagtagcccaagtgtttttggctgaaattcctgctgatccaaaactctatcgacatcacaacaagttgaggttatgctttaaggaattcatcatgagatgtggtgaagctgtagagaaaaacaagcgtctcatcacggcagaccagagggaatatcagcaggaactcaaaaagaactataacaagctaaaagagaacctcaggccaatgatcgagcggaaaattccagaactgtacaagccaatattcagagttgagagtcaaaagagaacattgtgctgtctgtcagcatatgtatatcagctacaaaatatattcaactttgacttcttttgacaaaggactttaggaaaaagaggaacaaagacattatttgagaattaaattatatatttttaatatgactgtgaccttgactgataataaagatgtaataagaattgcaagctaaa

SEQ ID NO: 466227 - DNA, 2938 bp, Homo sapiens
tgcctgggcacccataagcttatcaagcttcttcaatgtctccacccttgagagggaggtaactgatgtggactctgtggttgggagaagctcagtgggtgaacggaggacattggcccaatctagaaggctttctgaaagagccctctccttggaggaaaatggggttggatccaacttcaaaacctccactctgagcgttagcagctttttcaagcaggaaggagatcgccttagcgatgaagacttattcaagtttttagctgactacaaaagatcatcatccttacagagacgagtcaagtcaattccaggcttgctaagactggagatttctacagctccagagatcatcaattgctgtctgactcctgaaatgctgcccgtgaaaccctttcctgaaaaccggacacgcccgcacaaagagattttggaatttccaacacgagaagtatatgtccctcacactgtgtacagaaaccttctctatgtctacccacagaggctgaactttgtaaacaaactagcatcagcccggaacattacaataaagatccagtttatgtgtggagaagatgctagcaatgcgatgccggtaaggagggaaacgaacatttgcctcaaatcagggtgggctgctcacccctgtcacttcacacaagtccgggactcatcagtgtacaaagtccgtctattccaggccaatactgctcagcatgtgcaagggcttctgtgcccaggatatcagtggggaaacagggtcatctttggaaaatccagcgggcctgaatttctgcaggaagtgtacacagctgttacataccataataagtctcctgacttttatgaagaagtgaaaattaagctccccgctaagctcacagtaaatcaccacctcctgttcaccttctaccatatcagctgtcagcagaagcaaggagcctccgtggaaactctcctgggatattcatggctgccaattctcttaaatgaacgtcttcaaactggatcctactgtctcccagttgccttggaaaaattgccacccaactactccatgcattctgctgagaaagtcccattacagaatcctcccattaagtgggctgaaggacataagggagtatttaatattgaagtgcaagctgtttcttctgtacacacccaggacaaccacctggagaagttcttcaccctctgccactccctggagagccaggtgaccttccccatccgcgtgctggatcagaaaatcagcgagatggcgctggagcatgagctgaagctcagcatcatctgcctgaactcctcccgcctggagccgctcgtgctcttcctgcacctggtgctggacaagctcttccagctgtccgtgcagcccatggtcatcgctggccagacagccaacttctcccagtttgccttcgagtccgtggtggccatcgccaacagtctgcacaacagcaaggacctgagcaaggaccagcatgggaggaactgcctgctggcttcctacgtgcactacgtcttccgcctgccagaggtgcaaagggatgtgcccaagtcaggcgctcccactgccctcctagaccctcggagctaccacacgtatggccgcacatcagctgctgctgtgagttcaaagctgctgcaggcccgggtgatgagcagcagtaacccagacctcgcggggacacactccgcagcagacgaggaagtgaagaacatcatgtcttcaaagatcgccgatcgcaactgcagccgaatgtcttactattgctctggcagtagtgatgctccaagttcacctgcagccccaaggccagccagcaaaaagcatttccatgaggagcttgcccttcagatggtggtcagcaccggaatggtgagagaaacagtcttcaagtatgcctggttcttctttgagcttctggtgaaaagcatggcccagcacgtacataacatggacaaacgggacagttttcggaggactcgtttttctgaccgtttcatggatgacataactactattgttaatgtggtcacctcggaaattgcagcccttttagtaaaaccacagaaggaaaatgaacaggcggaaaagatgaacatcagcctggctttcttcttgtatgaccttctctccctcatggatcggggctttgtgtttaacctcatcagacattattgcagccagctgtcagccaagctcagtaaccttccaacgctcatttccatgaggctagagttcctgagaatcctctgtagccatgagcattacctcaatctgaaccttttttttatgaatgctgatactgctccaacatctccttgtccttccatatcttcccaggtaataaaagaattatttaactaaaaaaaaaaaaaaaaaaaacaagacaaaaaacaaaaaaaaagaaggggggaggcgccgcagctataaaaaaagtactcccccggagagggggcgcccaaaggtattaaccgcggacaccacgaggtttcctcttggcacaacggagggcccccataaagagagaggaggcgcgacagtataattacgcgcaacaggcacctggcgacgcgagagttatacacaaaggtctgtagtagatggggggaaaacaccgcggcgaacaggccaggagggacaacccccttgggggcacaaagagaagaccccttaaaaaaacgcgaggcggggcgggcaaccacaccgtggtgggccacaaaactctcacgctcatcaagaatcattttaacagatccccatgaggggaacagattatccaactggttccgaaaagaccgtgttcaaaagcgggtgttaaaaacaaagccggcgcacaaatgatccgggccgcctgttgaaaaaatgttcgggccaccagcgggatcagcgcaattttttcgagaacacttttttcgccgcggacgg

SEQ ID NO: 466228 - DNA, 916 bp, Homo sapiens
tgcctgggcacccataagcttatcaagcttcttcaatgtctccacccttgagagggaggtaactgatgtggactctgtggttgggagaagctcagtgggtgaacggaggacattggcccaatctagaaggctttctgaaagagccctctccttggaggaaaatggggttggatccaacttcaaaacctccactctgagcgttagcagctttttcaagcaggaaggagatcgccttagcgatgaagacttattcaagtttttagctgactacaaaagatcatcatccttacagagacgagtcaagtcaattccaggcttgctaagactggagatttctacagctccagagatcatcaattgctgtctgactcctgaaatgctgcccgtgaaaccctttcctgaaaaccggacacgcccgcacaaagagattttggaatttccaacacgagaagtatatgtccctcacactgtgtacagaaaccttctctatgtctacccacagaggctgaactttgtaaacaaactagcatcagcccggaacattacaataaagatccagtttatgtgtggagaagatgctagcaatgcgatgccggtaaggagggaaacgaacatttgcctcaaatcagggtgggctgctcacccctgtcacttcacacaagtccgggactcatcagtgtacaaagtccgtctattccaggccaatactgctcagcatgtgcaagggcttctgtgcccaggatatcagtggggaaacagggtcagtcttacttgacgatctctttctcggcttattctgtagtgagcttggaacatacagatcattttagaggattaaaaaaagtcataaagtctttccatactgccgcacctccgttctggcccgcacatccgtactgcccggtaccgagctcga

SEQ ID NO: 466229 - DNA, 513 bp, Homo sapiens
gacctaggaatactatttatttgcctccatggcctttgaacttgcacatccaacgtaacggctcctgtgtgttcttgattgttccaattatcatttttcctctcgaatacctgagagcattcattattttgcaagagatttgagaatccctgtgccctaacttttctttccttgatgtgggatgttcttctgtgactaggtaagtttatctcaatgtgtccccaaataatttctcagaatgttaaattcataaaagctaccatgaaaggataaataaatgaaaggagttctgaggtcaaaacatttggggaaagaagagtctttctccttctgaggcattctcagtgcacagtaacctgtttatctcgctttgccttgctctttcccaagcacatttttgctcaacgccccctaccttccccatacacttgttaacactttgcagagcactagggctctgtgggacaggctgggaaatgcaggttgacatgccactgttaatacctagaaaat

SEQ ID NO: 466230 - DNA, 299 bp, Homo sapiens
acgtcttccgcctgccagaggtgcaaagggatgtgcccaagtcaggtagagttgccctgagtgtgggactctggtgggcggggcaacaccacctccaccccactgcagtgtaatccaaaataaaacatcctatgctgggtgcaggggctcacatctgcaaccccagcactctaggaggctgagatggcaggatcgcttggagcagtggctcacatctgcaaccccagcactctaggaggctgagatggcaggatcgcttggagcagtggctcacatctgcaaccccagcactctaggag

SEQ ID NO: 466231 - DNA, 504 bp, Homo sapiens
ttctgaccgtttcatggatgacataactactattgttaatgtggtcacctcggaaattgcagcccttttagtaaaaccacagaaggtaactgtattttactctttattttctaaattgtttacctggaacatatattactttcataatcagagaaaaataagcatcattttaaaacaataattaaaatataactgtaatgacagttaaacgcagtatgttatactggactggaccctgatgtggggctggaaaattgttataaacaaattacacacatgaggccaggggttcgagacctgcctggccaacatggtgacatggtgagaccctgtctctactaaaaatataaaaattagctgagcatggttgtgcatatctgtaatcccagcaactgggaggcagaagcaagagaactgcttgaacctgggagacagaggttgcagtgagccgagatggtgccacagcactccagcctgggtgacagagtgagactctgtctcaaa

SEQ ID NO: 466232 - DNA, 511 bp, Homo sapiens
cgtttgcagaatagctcatcttctccctccgtgccttttcccccttaggcctacatacagatcacttttgtggagccctactttgatgagtatgagatgaaagacagggtcacatactttgagaagaatttcaacctccggaggttcatgtacaccaccccgttcaccctggaggggcggcctcggggagagctgcatgagcagtacagaaggaacacagtcctgaccactatgcacgccttcccctacatcaagaccaggatcagcgtcatccagaaggaggaggtaatgcacccaagggattggccaccactggatgagtgggctgggtggcctcccaggaggacccacaaacctctttcacagtggattggactgaaaacaaggagggatgcacttgaaatatgattatatggttgtcctttcactctcatagtgccagaaaatcccatttaggcagctacatattttatagcactattgtatattaaatatttaatattttaaagtt

SEQ ID NO: 466233 - DNA, 687 bp, Homo sapiens
tgcctgggcacccataagcttatcaagcttcttcaatgtctccacccttgagagggaggtaactgatgtggactctgtggttgggagaagctcagtgggtgaacggaggacattggcccaatctagaaggctttctgaaagagccctctccttggaggaaaatggggttggatccaacttcaaaacctccactctgagcgttagcagctttttcaagcaggaaggagatcgccttagcgatgaagacttattcaagtttttagctgactacaaaagatcatcatccttacagagacgagtcaagtcaattccaggcttgctaagactggagatttctacagctccagagatcatcaattgctgtctgactcctgaaatgctgcccgtgaaaccctttcctgaaaaccggacacgcccgcacaaagagattttggaatttccaacacgagaagtatatgtccctcacactgtgtacagaaaccttctctatgtctacccacagaggctgaactttgtaaacaaactagcatcagcccggaacattacaataaagatccagtttatgtgtggagaagatgctagcaatgcgatgccggtcatctttggaaaatccagcgggcctgaatttctgcaggaagtgtacacagctgttacataccataataagtaagtctatttcagcattct

SEQ ID NO: 466234 - DNA, 638 bp, Homo sapiens
aaactgttggttcttcttacctaggcattttatggtcaatgttttggtgcagaatttgtggaagtgattaaagactccactcctgtggacaaaaccaagttggatcctaacaaggcctacatacagatcacttttgtggagccctactttgatgagtatgagatgaaagacagggtcacatactttgagaagaatttcaacctccggaggttcatgtacaccaccccgttcaccctggaggggcggcctcggggagagctgcatgagcagtacagaaggaacacagtcctgaccactatgcacgccttcccctacatcaagaccaggatcagcgtcatccagaaggaggagtttgttttgacaccgattgaagttgccattgaagacatgaagaagaagaccctgcagttagcagttgccattaaccaggatgcttcttgacgtcaagaagccaacttagaaagaagggtctcacgtggctggcctggctcctccgtagacccctgttcttttcaacctctgcccacccgtgcatgtcatcacaaacatttgctcttaagttacaagagaccacatccacccgaggattagggttcacgtagcagctgctaaccctagcaccagcccttgtgggactc

SEQ ID NO: 466235 - DNA, 6939 bp, Homo sapiens
tgcctgggcacccataagcttatcaagcttcttcaatgtctccacccttgagagggaggtaactgatgtggactctgtggttgggagaagctcagtgggtgaacggaggacattggcccaatctagaaggctttctgaaagagccctctccttggaggaaaatggggttggatccaacttcaaaacctccactctgagcgttagcagctttttcaagcaggaaggagatcgccttagcgatgaagacttattcaagtttttagctgactacaaaagatcatcatccttacagagacgagtcaagtcaattccaggcttgctaagactggagatttctacagctccagagatcatcaattgctgtctgactcctgaaatgctgcccgtgaaaccctttcctgaaaaccggacacgcccgcacaaagagattttggaatttccaacacgagaagtatatgtccctcacactgtgtacaggtaagaaacacaggctcgggctgggcgtggtggcttacaccataatcccataactttgggaggccgaggcaggaggattgcttgagctcaggagtttgagaccagccttggcaacatggcaaaaccgtgtctctacaacatatacaaaatttagctgggcatggtggtgcatgcttgtaatcccagcaacttggcaggctgaggcaggagaatcgcttgaacccaggaggcagaggttgcagtgagccaagattgcactactgcactccagcctgggagacagaaccagactctgtctcaaaaaaaaaagaaaaaaagaaaagcaggttcttggaaaaccgttgagctcacattctgagttttatttgaataacgttttctcatccttcaacctgtcttcctacttcctaagtttcagggaaatgaaatgtgatatttatgtaacctggggagaaaccctaagctgtacatatgaaggaatggattcatttctcctcttgcacagcaccccagcaccttgtacaccctattcctccctaactcccaaccgcacactcacctcccaagcatctgcagatctacatacatattatcaaatgtacagagtactgagtgaaatggtcactgtagctatggaaagaaaccttctctatgtctacccacagaggctgaactttgtaaacaaactagcatcagcccggaacattacaataaagatccagtttatgtgtggagaagatgctagcaatgcgatgccggtaaggagggaaacgaacatttgcctcaaatcagggtgggctgctcacccctgtcacttcacacaagtccgggactcatcagtgtacaaagtccgtctattccaggccaatactgctcagcatgtgcaagggcttctgtgcccaggatatcagtggggaaacagggtcatctttggaaaatccagcgggcctgaatttctgcaggaagtgtacacagctgttacataccataataagtctcctgacttttatgaagaagtgaaaattaagctccccgctaagctcacagtaaatcaccacctcctgttcaccttctaccatatcagctgtcagcagaagcaaggagcctccgtggaaactctcctgggatattcatggctgccaattctcttaaatgaacgtcttcaaactggatcctactgtctcccagttgccttggaaaaattgccacccaactactccatgcattctgctgagaaagtcccattacagaatcctcccattaagtgggctgaaggacataagggagtatttaatattgaagtgcaagctgtttcttctgtacacacccaggacaaccacctggagaagttcttcaccctctgccactccctggagagccaggtgaccttccccatccgcgtgctggatcagaaaatcagcgagatggcgctggagcatgagctgaagctcagcatcatctgcctgaactcctcccgcctggagccgctcgtgctcttcctgcacctggtgctggacaagctcttccagctgtccgtgcagcccatggtcatcgctggccagacagccaacttctcccagtttgccttcgagtccgtggtggccatcgccaacagtctgcacaacagcaaggacctgagcaaggaccagcatgggaggaactgcctgctggcttcctacgtgcactacgtcttccgcctgccagaggtgcaaagggatgtgcccaagtcaggcgctcccactgccctcctagaccctcggagctaccacacgtatggccgcacatcagctgctgctgtgagttcaaagctgctgcaggcccgggtgatgagcagcagtaacccagacctcgcggggacacactccgcagcagacgaggaagtgaagaacatcatgtcttcaaagatcgccgatcgcaactgcagccgaatgtcttactattgctctggcagtagtgatgctccaagttcacctgcagccccaaggccagccagcaaaaagcatttccatgaggagcttgcccttcagatggtggtcagcaccggaatggtgagagaaacagtcttcaagtatgcctggttcttctttgagcttctggtgaaaagcatggcccagcacgtacataacatggacaaacgggacagttttcggaggactcgtttttctgaccgtttcatggatgacataactactattgttaatgtggtcacctcggaaattgcagcccttttagtaaaaccacagaaggaaaatgaacaggcggaaaagatgaacatcagcctggctttcttcttgtatgaccttctctccctcatggatcggggctttgtgtttaacctcatcagacattattgcagccagctgtcagccaagctcagtaaccttccaacgctcatttccatgaggctagagttcctgagaatcctctgtagccatgagcattacctcaatctgaaccttttttttatgaatgctgatactgctccaacatctccttgtccttccatatcttcccagaactcaagctcctgctccagcttccaggaccagaagatcgccagcatgttcgatctgacttccgagtaccgccagcagcacttcctcaccgggctcctcttcacagaactggctgctgccctggatgccgaaggggaaggaatcagcaaagtacaaaggaaagctgtcagtgcaattcacagcctgctaagttctcacgacctggacccacgctgtgtcaaaccagaggtgaaggtcaaaatcgccgccctttacctacctttagttggcatcattttggatgctttgccacagctctgtgactttacagttgcagatactcgcagataccgcaccagtggctcggatgaagaacaagaaggagccggtgccattaaccagaatgtggctctggccatagcagggaataatttcaatttgaaaacaagtggaatagtgctgtcttccttgccctataagcagtacaacatgctgaacgcggacactactcgcaacctcatgatctgcttcctctggatcatgaaaaatgctgatcagagcctcattaggaagtggattgctgacctgccatcaacgcagctcaacaggattttagatctacttttcatctgtgtgttatgttttgagtataagggaaaacagagttctgacaaagtcagtacccaagtcctgcagaagtcaagggatgtcaaggcccggctggaagaggctttgctccgtggggaaggggccagaggggagatgatgcgccgccgggctccagggaacgaccgatttccaggcctaaatgaaaatttgagatggaagaaagagcagacacattggcggcaagctaatgagaagctagataaaacaaaggccgagttagatcaagaagccttgatcagtggcaatctggctacagaagcacatttaatcatcctggatatgcaggaaaacattatccaggcgagctcggctctggactgtaaagacagcctgctgggaggtgttctgagggtgctggtgaattctctgaactgtgatcagagtaccacctacctgactcactgctttgcaacactccgtgctctcatcgccaagtttggagacttactcttcgaagaggaggtggaacagtgtttcgacctatgtcaccaagtcctgcaccactgcagcagcagcatggatgtcacccggagccaagcctgtgccaccctttacctcctcatgaggttcagttttggagccaccagtaattttgcaagagtaaagatgcaagtaaccatgtccctggcatctttggtgggaagagcaccagactttaatgaagagcacctgagaagatccttgaggacaattttggcctattcagaagaggacacagccatgcagatgactccttttcccacccaggtggaggaacttctctgtaatctgaatagcatcttatatgacacagtgaaaatgagggaatttcaggaagatcctgagatgcttatggatctcatgtacagaattgccaagagttaccaggcatctcctgatctgcggctgacctggctccagaacatggcagagaaacacaccaagaagaagtgctacacggaggctgccatgtgcctggtgcacgccgctgcgttagtggctgagtatctgagcatgctggaggaccacagctacctgcccgtgggcagtgtcagcttccagaatatttcttccaatgtgctggaggagtctgtggtctctgaggacaccctgtcacctgacgaggatggggtgtgcgcaggccagtacttcaccgagagtggcctggtaggcctcctggagcaggccgcggagctcttcagcacgggaggcttatatgagacagttaatgaggtctacaagctggtcatccccatcctagaagcgcatcgagaattccggaagctgacactcactcacagcaagctgcagagagccttcgacagcatcgttaacaaggatcataagagaatgtttggaacctacttccgagttggtttctttggatccaaatttggggatttggatgaacaggaatttgtctacaaagagcctgcaattaccaagcttcctgagatctcacatagactagaggcattttatggtcaatgttttggtgcagaatttgtggaagtgattaaagactccactcctgtggacaaaaccaagttggatcctaacaaggcctacatacagatcacttttgtggagccctactttgatgagtatgagatgaaagacagggtcacatactttgagaagaatttcaacctccggaggttcatgtacaccaccccgttcaccctggaggggcggcctcggggagagctgcatgagcagtacagaaggaacacagtcctgaccactatgcacgccttcccctacatcaagaccaggatcagcgtcatccagaaggaggagtttgttttgacaccgattgaagttgccattgaagacatgaagaagaagaccctgcagttagcagttgccattaaccaggagccgcctgatgcaaagatgcttcagatggtgctgcaaggctctgtgggagctactgtaaatcagggaccactggaagtagcccaagtgtttttggctgaaattcctgctgatccaaaactctatcgacatcacaacaagttgaggttatgctttaaggaattcatcatgagatgtggtgaagctgtagagaaaaacaagcgtctcatcacggcagaccagagggaatatcagcaggaactcaaaaagaactataacaagctaaaagagaacctcaggccaatgatcgagcggaaaattccagaactgtacaagccaatattcagagttgagagtcaaaagagggactccttccacagatctagtttcaggaaatgtgaaacccagttgtcacagggcagctaagaaaagccatcttcattcgtggagactgtggccctgcaaccctggagaaggacttgctggtacttaaaaaatgggacatttgccacccaggactgactgtacactccctgatcagccagcactctggaagctttgggatcccaggaaccatggaattattcccaaatggactctgaccagatttttgccatactggggggtggcgggatggaggatgggtactcaggcatgactgcgtatttattaaagtgtgtttttccacaatgtaccaaacaaggcataagcagcttctcctgctgactggccaatcactgcccatctgagagatgatttcctctggcccatatttgaatttattggagtaactcaaattgcctgaggaaaaatggaaaaattatccaccagtcgattcaaactgaatttcactctttataggaaggcagggcaaacttgtaggagtacgaaacattttcaataaatctacaaagggaagccttactacaattccaaaaatcatcatggttggaaatttgggaggagattatttgtgaacttgttacccttttggtaatggtggactaattgctgtatagttatttttgttttattattactgttacattaatttaacatgcatttatagaagaatacattcaaagcactgatgtaggagatacacggtacttggagcagtcagccaaaaatcacagatactgctttcacttaaatggaaacaattctccgataatgctttgctttttttcttatgtcactcttgtgtactatctatttttctcctctctgggaccaagtttctttttataaagcaataatatctctgttttcatttcagaacattgtgctgtctgtcagcatatgtatatcagctacaaaatatattcaactttgacttcttttgacaaaggactttaggaaaaagaggaacaaagacattatttgagaattaaattatatatttttaatatgactgtgaccttgactgataataaagatgtaataagaattgcaagctaaa

SEQ ID NO: 466236 - DNA, 4878 bp, Homo sapiens
tcaggttgcgaccacgcgtcgaacgaaacagtctgcacaacagcaaggacctgagcaaggaccagcatgggaggaactgcctgctggcttcctacgtgcactacgtcttccgcctgccagaggtgcaaagggatgtgcccaagtcaggcgctcccactgccctcctagaccctcggagctaccacacgtatggccgcacatcagctgctgctgtgagttcaaagctgctgcaggcccgggtgatgagcagcagtaacccagacctcgcggggacacactccgcagcagacgaggaagtgaagaacatcatgtcttcaaagatcgccgatcgcaactgcagccgaatgtcttactattgctctggcagtagtgatgctccaagttcacctgcagccccaaggccagccagcaaaaagcatttccatgaggagcttgcccttcagatggtggtcagcaccggaatggtgagagaaacagtcttcaagtatgcctggttcttctttgagcttctggtgaaaagcatggcccagcacgtacataacatggacaaacgggacagttttcggaggactcgtttttctgaccgtttcatggatgacataactactattgttaatgtggtcacctcggaaattgcagcccttttagtaaaaccacagaaggaaaatgaacaggcggaaaagatgaacatcagcctggctttcttcttgtatgaccttctctccctcatggatcggggctttgtgtttaacctcatcagacattattgcagccagctgtcagccaagctcagtaaccttccaacgctcatttccatgaggctagagttcctgagaatcctctgtagccatgagcattacctcaatctgaaccttttttttatgaatgctgatactgctccaacatctccttgtccttccatatcttcccagaactcaagctcctgctccagcttccaggaccagaagatcgccagcatgttcgatctgacttccgagtaccgccagcagcacttcctcaccgggctcctcttcacagaactggctgctgccctggatgccgaaggggaaggaatcagcaaagtacaaaggaaagctgtcagtgcaattcacagcctgctaagttctcacgacctggacccacgctgtgtcaaaccagaggtgaaggtcaaaatcgccgccctttacctacctttagttggcatcattttggatgctttgccacagctctgtgactttacagttgcagatactcgcagataccgcaccagtggctcggatgaagaacaagaaggagccggtgccattaaccagaatgtggctctggccatagcagggaataatttcaatttgaaaacaagtggaatagtgctgtcttccttgccctataagcagtacaacatgctgaacgcggacactactcgcaacctcatgatctgcttcctctggatcatgaaaaatgctgatcagagcctcattaggaagtggattgctgacctgccatcaacgcagctcaacaggattttagatctacttttcatctgtgtgttatgttttgagtataagggaaaacagagttctgacaaagtcagtacccaagtcctgcagaagtcaagggatgtcaaggcccggctggaagaggctttgctccgtggggaaggggccagaggggagatgatgcgccgccgggctccagggaacgaccgatttccaggcctaaatgaaaatttgagatggaagaaagagcagacacattggcggcaagctaatgagaagctagataaaacaaaggccgagttagatcaagaagccttgatcagtggcaatctggctacagaagcacatttaatcatcctggatatgcaggaaaacattatccaggcgagctcggctctggactgtaaagacagcctgctgggaggtgttctgagggtgctggtgaattctctgaactgtgatcagagtaccacctacctgactcactgctttgcaacactccgtgctctcatcgccaagtttggagacttactcttcgaagaggaggtggaacagtgtttcgacctatgtcaccaagtcctgcaccactgcagcagcagcatggatgtcacccggagccaagcctgtgccaccctttacctcctcatgaggttcagttttggagccaccagtaattttgcaagagtaaagatgcaagtaaccatgtccctggcatctttggtgggaagagcaccagactttaatgaagagcacctgagaagatccttgaggacaattttggcctattcagaagaggacacagccatgcagatgactccttttcccacccaggtggaggaacttctctgtaatctgaatagcatcttatatgacacagtgaaaatgagggaatttcaggaagatcctgagatgcttatggatctcatgtacagaattgccaagagttaccaggcatctcctgatctgcggctgacctggctccagaacatggcagagaaacacaccaagaagaagtgctacacggaggctgccatgtgcctggtgcacgccgctgcgttagtggctgagtatctgagcatgctggaggaccacagctacctgcccgtgggcagtgtcagcttccagaatatttcttccaatgtgctggaggagtctgtggtctctgaggacaccctgtcacctgacgaggatggggtgtgcgcaggccagtacttcaccgagagtggcctggtaggcctcctggagcaggccgcggagctcttcagcacgggaggcttatatgagacagttaatgaggtctacaagctggtcatccccatcctagaagcgcatcgagaattccggaagctgacactcactcacagcaagctgcagagagccttcgacagcatcgttaacaaggatcataagagaatgtttggaacctacttccgagttggtttctttggatccaaatttggggatttggatgaacaggaatttgtctacaaagagcctgcaattaccaagcttcctgagatctcacatagactagaggcattttatggtcaatgttttggtgcagaatttgtggaagtgattaaagactccactcctgtggacaaaaccaagttggatcctaacaaggcctacatacagatcacttttgtggagccctactttgatgagtatgagatgaaagacagggtcacatactttgagaagaatttcaacctccggaggttcatgtacaccaccccgttcaccctggaggggcggcctcggggagagctgcatgagcagtacagaaggaacacagtcctgaccactatgcacgccttcccctacatcaagaccaggatcagcgtcatccagaaggaggagtttgttttgacaccgattgaagttgccattgaagacatgaagaagaagaccctgcagttagcagttgccattaaccaggagccgcctgatgcaaagatgcttcagatggtgctgcaaggctctgtgggagctactgtaaatcagggaccactggaagtagcccaagtgtttttggctgaaattcctgctgatccaaaactctatcgacatcacaacaagttgaggttatgctttaaggaattcatcatgagatgtggtgaagctgtagagaaaaacaagcgtctcatcacggcagaccagagggaatatcagcaggaactcaaaaagaactataacaagctaaaagagaacctcaggccaatgatcgagcggaaaattccagaactgtacaagccaatattcagagttgagagtcaaaagagggactccttccacagatctagtttcaggaaatgtgaaacccagttgtcacagggcagctaagaaaagccatcttcattcgtggagactgtggccctgcaaccctggagaaggacttgctggtacttaaaaaatgggacatttgccacccaggactgactgtacactccctgatcagccagcactctggaagctttgggatcccaggaaccatggaattattcccaaatggactctgaccagatttttgccatactggggggtggcgggatggaggatgggtactcaggcatgactgcgtatttattaaagtgtgtttttccacaatgtaccaaacaaggcataagcagcttctcctgctgactggccaatcactgcccatctgagagatgatttcctctggcccatatttgaatttattggagtaactcaaattgcctgaggaaaaatggaaaaattatccaccagtcgattcaaactgaatttcactctttataggaaggcagggcaaacttgtaggagtacgaaacattttcaataaatctacaaagggaagccttactacaattccaaaaatcatcatggttggaaatttgggaggagattatttgtgaacttgttacccttttggtaatggtggactaattgctgtatagttatttttgttttattattactgttacattaatttaacatgcatttatagaagaatacattcaaagcactgatgtaggagatacacggtacttggagcagtcagccaaaaatcacagatactgctttcacttaaatggaaacaattctccgataatgctttgctttttttcttatgtcactcttgtgtactatctatttttctcctctctgggaccaagtttctttttataaagcaataatatctctgttttcatttcagaacattgtgctgtctgtcagcatatgtatatcagctacaaaatatattcaactttgacttcttttgacaaaggactttaggaaaaagaggaacaaagacattatttgagaattaaattatatatttttaatatgactgtgaccttgactgataataaagatgtaataagaattgcaagctaaa

SEQ ID NO: 466237 - DNA, 6284 bp, Homo sapiens
tgcctgggcacccataagcttatcaagcttcttcaatgtctccacccttgagagggaggtaactgatgtggactctgtggttgggagaagctcagtgggtgaacggaggacattggcccaatctagaaggctttctgaaagagccctctccttggaggaaaatggggttggatccaacttcaaaacctccactctgagcgttagcagctttttcaagcaggaaggagatcgccttagcgatgaagacttattcaagtttttagctgactacaaaagatcatcatccttacagagacgagtcaagtcaattccaggcttgctaagactggagatttctacagctccagagatcatcaattgctgtctgactcctgaaatgctgcccgtgaaaccctttcctgaaaaccggacacgcccgcacaaagagattttggaatttccaacacgagaagtatatgtccctcacactgtgtacagaaaccttctctatgtctacccacagaggctgaactttgtaaacaaactagcatcagcccggaacattacaataaagatccagtttatgtgtggagaagatgctagcaatgcgatgccggtaaggagggaaacgaacatttgcctcaaatcagggtgggctgctcacccctgtcacttcacacaagtccgggactcatcagtgtacaaagtccgtctattccaggccaatactgctcagcatgtgcaagggcttctgtgcccaggatatcagtggggaaacagggtcatctttggaaaatccagcgggcctgaatttctgcaggaagtgtacacagctgttacataccataataagtctcctgacttttatgaagaagtgaaaattaagctccccgctaagctcacagtaaatcaccacctcctgttcaccttctaccatatcagctgtcagcagaagcaaggagcctccgtggaaactctcctgggatattcatggctgccaattctcttaaatgaacgtcttcaaactggatcctactgtctcccagttgccttggaaaaattgccacccaactactccatgcattctgctgagaaagtcccattacagaatcctcccattaagtgggctgaaggacataagggagtatttaatattgaagtgcaagctgtttcttctgtacacacccaggacaaccacctggagaagttcttcaccctctgccactccctggagagccaggtgaccttccccatccgcgtgctggatcagaaaatcagcgagatggcgctggagcatgagctgaagctcagcatcatctgcctgaactcctcccgcctggagccgctcgtgctcttcctgcacctggtgctggacaagctcttccagctgtccgtgcagcccatggtcatcgctggccagacagccaacttctcccagtttgccttcgagtccgtggtggccatcgccaacagtctgcacaacagcaaggacctgagcaaggaccagcatgggaggaactgcctgctggcttcctacgtgcactacgtcttccgcctgccagaggtgcaaagggatgtgcccaagtcaggcgctcccactgccctcctagaccctcggagctaccacacgtatggccgcacatcagctgctgctgtgagttcaaagctgctgcaggcccgggtgatgagcagcagtaacccagacctcgcggggacacactccgcagcagacgaggaagtgaagaacatcatgtcttcaaagatcgccgatcgcaactgcagccgaatgtcttactattgctctggcagtagtgatgctccaagttcacctgcagccccaaggccagccagcaaaaagcatttccatgaggagcttgcccttcagatggtggtcagcaccggaatggtgagagaaacagtcttcaagtatgcctggttcttctttgagcttctggtgaaaagcatggcccagcacgtacataacatggacaaacgggacagttttcggaggactcgtttttctgaccgtttcatggatgacataactactattgttaatgtggtcacctcggaaattgcagcccttttagtaaaaccacagaaggaaaatgaacaggcggaaaagatgaacatcagcctggctttcttcttgtatgaccttctctccctcatggatcggggctttgtgtttaacctcatcagacattattgcagccagctgtcagccaagctcagtaaccttccaacgctcatttccatgaggctagagttcctgagaatcctctgtagccatgagcattacctcaatctgaaccttttttttatgaatgctgatactgctccaacatctccttgtccttccatatcttcccagaactcaagctcctgctccagcttccaggaccagaagatcgccagcatgttcgatctgacttccgagtaccgccagcagcacttcctcaccgggctcctcttcacagaactggctgctgccctggatgccgaaggggaaggaatcagcaaagtacaaaggaaagctgtcagtgcaattcacagcctgctaagttctcacgacctggacccacgctgtgtcaaaccagaggtgaaggtcaaaatcgccgccctttacctacctttagttggcatcattttggatgctttgccacagctctgtgactttacagttgcagatactcgcagataccgcaccagtggctcggatgaagaacaagaaggagccggtgccattaaccagaatgtggctctggccatagcagggaataatttcaatttgaaaacaagtggaatagtgctgtcttccttgccctataagcagtacaacatgctgaacgcggacactactcgcaacctcatgatctgcttcctctggatcatgaaaaatgctgatcagagcctcattaggaagtggattgctgacctgccatcaacgcagctcaacaggattttagatctacttttcatctgtgtgttatgttttgagtataagggaaaacagagttctgacaaagtcagtacccaagtcctgcagaagtcaagggatgtcaaggcccggctggaagaggctttgctccgtggggaaggggccagaggggagatgatgcgccgccgggctccagggaacgaccgatttccaggcctaaatgaaaatttgagatggaagaaagagcagacacattggcggcaagctaatgagaagctagataaaacaaaggccgagttagatcaagaagccttgatcagtggcaatctggctacagaagcacatttaatcatcctggatatgcaggaaaacattatccaggcgagctcggctctggactgtaaagacagcctgctgggaggtgttctgagggtgctggtgaattctctgaactgtgatcagagtaccacctacctgactcactgctttgcaacactccgtgctctcatcgccaagtttggagacttactcttcgaagaggaggtggaacagtgtttcgacctatgtcaccaagtcctgcaccactgcagcagcagcatggatgtcacccggagccaagcctgtgccaccctttacctcctcatgaggttcagttttggagccaccagtaattttgcaagagtaaagatgcaagtaaccatgtccctggcatctttggtgggaagagcaccagactttaatgaagagcacctgagaagatccttgaggacaattttggcctattcagaagaggacacagccatgcagatgactccttttcccacccaggtggaggaacttctctgtaatctgaatagcatcttatatgacacagtgaaaatgagggaatttcaggaagatcctgagatgcttatggatctcatgtacagaattgccaagagttaccaggcatctcctgatctgcggctgacctggctccagaacatggcagagaaacacaccaagaagaagtgctacacggaggctgccatgtgcctggtgcacgccgctgcgttagtggctgagtatctgagcatgctggaggaccacagctacctgcccgtgggcagtgtcagcttccagaatatttcttccaatgtgctggaggagtctgtggtctctgaggacaccctgtcacctgacgaggatggggtgtgcgcaggccagtacttcaccgagagtggcctggtaggcctcctggagcaggccgcggagctcttcagcacgggaggcttatatgagacagttaatgaggtctacaagctggtcatccccatcctagaagcgcatcgagaattccggaagctgacactcactcacagcaagctgcagagagccttcgacagcatcgttaacaaggatcataagagaatgtttggaacctacttccgagttggtttctttggatccaaatttggggatttggatgaacaggaatttgtctacaaagagcctgcaattaccaagcttcctgagatctcacatagactagaggcattttatggtcaatgttttggtgcagaatttgtggaagtgattaaagactccactcctgtggacaaaaccaagttggatcctaacaaggcctacatacagatcacttttgtggagccctactttgatgagtatgagatgaaagacagggtcacatactttgagaagaatttcaacctccggaggttcatgtacaccaccccgttcaccctggaggggcggcctcggggagagctgcatgagcagtacagaaggaacacagtcctgaccactatgcacgccttcccctacatcaagaccaggatcagcgtcatccagaaggaggagtttgttttgacaccgattgaagttgccattgaagacatgaagaagaagaccctgcagttagcagttgccattaaccaggagccgcctgatgcaaagatgcttcagatggtgctgcaaggctctgtgggagctactgtaaatcagggaccactggaagtagcccaagtgtttttggctgaaattcctgctgatccaaaactctatcgacatcacaacaagttgaggttatgctttaaggaattcatcatgagatgtggtgaagctgtagagaaaaacaagcgtctcatcacggcagaccagagggaatatcagcaggaactcaaaaagaactataacaagctaaaagagaacctcaggccaatgatcgagcggaaaattccagaactgtacaagccaatattcagagttgagagtcaaaagagggactccttccacagatctagtttcaggaaatgtgaaacccagttgtcacagggcagctaagaaaagccatcttcattcgtggagactgtggccctgcaaccctggagaaggacttgctggtacttaaaaaatgggacatttgccacccaggactgactgtacactccctgatcagccagcactctggaagctttgggatcccaggaaccatggaattattcccaaatggactctgaccagatttttgccatactggggggtggcgggatggaggatgggtactcaggcatgactgcgtatttattaaagtgtgtttttccacaatgtaccaaacaaggcataagcagcttctcctgctgactggccaatcactgcccatctgagagatgatttcctctggcccatatttgaatttattggagtaactcaaattgcctgaggaaaaatggaaaaattatccaccagtcgattcaaactgaatttcactctttataggaaggcagggcaaacttgtaggagtacgaaacattttcaataaatctacaaagggaagccttactacaattccaaaaatcatcatggttggaaatttgggaggagattatttgtgaacttgttacccttttggtaatggtggactaattgctgtatagttatttttgttttattattactgttacattaatttaacatgcatttatagaagaatacattcaaagcactgatgtaggagatacacggtacttggagcagtcagccaaaaatcacagatactgctttcacttaaatggaaacaattctccgataatgctttgctttttttcttatgtcactcttgtgtactatctatttttctcctctctgggaccaagtttctttttataaagcaataatatctctgttttcatttcagaacattgtgctgtctgtcagcatatgtatatcagctacaaaatatattcaactttgacttcttttgacaaaggactttaggaaaaagaggaacaaagttgaatatattttgtagctgatatacatatgctggtcgagcggccgcgaatttagtagtagtagcggccgc

SEQ ID NO: 466238 - DNA, 1012 bp, Homo sapiens
tgcctgggcacccataagcttatcaagcttcttcaatgtctccacccttgagagggaggtaactgatgtggactctgtggttgggagaagctcagtgggtgaacggaggacattggcccaatctagaaggctttctgaaagagccctctccttggaggaaaatggggttggatccaacttcaaaacctccactctgagcgttagcagctttttcaagcaggaaggagatcgccttagcgatgaagacttattcaagtttttagctgactacaaaagatcatcatccttacagagacgagtcaagtcaattccaggcttgctaagactggagatttctacagctccagagatcatcaattgctgtctgactcctgaaatgctgcccgtgaaaccctttcctgaaaaccggacacgcccgcacaaagagattttggaatttccaacacgagaagtatatgtccctcacactgtgtacagaaaccttctctatgtctacccacagaggctgaactttgtaaacaaactagcatcagcccggaacattacaataaagatccagtttatgtgtggagaagatgctagcaatgcgatgccggtaaggagggaaacgaacatttgcctcaaatcagggtgggctgctcacccctgtcacttcacacaagtccgggactcatcagtgtacaaagtccgtctattccaggccaatactgctcagcatgtgcaagggcttctgtgcccaggatatcagtggggaaacagggtcagtcttacttgacgatctctttctcggcttattctgtagtgagcttggaacatacagatcattttagaggattaaaaaaagtcataaagtctttccatactgcccataggaccaccccactctaaaggcatacaaagtaaagagatggctcaacacgtgcgccatgtttgctgagtgtcttccatgcacaaactgtacacactgtgttatacacacacagtgttacacacttactcaagcctcggacca

SEQ ID NO: 466239 - DNA, 873 bp, Homo sapiens
tgagataaattcatctttattctatgtatttaaaccaaatccatctcctgctgaaagaactggctacaatttaccttcatcagaggtgtcctgttttcaccatcaaggacgtcaacctggcggcgcccccatccaaggcctggggggcctgcccgggaagaagatcaagacctcggggcccaggacagccgccccgctgcccgccactcctccacctgctcccctcgtccccaggacccccagcccccactctgaaggggcgatcctcccacagccgcctcctcctcctgcagccccggctcaggcacggtctggtacctcttcttcgcatctcttatgttcaggtccattgtcgtcttcttcatcatcctctccagcttccaggcttggccacgggaggcagctttgtggatcttcctgagatccccatggtgaatcacctctgatcctcaattttatatactacacctggtggtggctcagtgttcacttccgaaaaatgaaaaattgcccatttttgtgaaaaagttctactgatatgtgaaggctgagttctattggaaccaccaagtcatgacaccagaagggaaaagaagtagttcatcatgaggtggaaatatctctctctgtggtccaagctggagtgcagtggcgggatctcggctcacttcaacctctacctcccgagttcaagcaaatctcctgcctcagcctcatgagtagctgggattacaggcatccaccaccagagacggctaattttttctttgtatacttttatttaattcggcttaggttacttgtttattagtagtagttttgcatctatgggattgttgtataaaataaatggtttaaatatgtagaatactt

SEQ ID NO: 466240 - DNA, 832 bp, Homo sapiens
tgagataaattcatctttattctatgtatttaaaccaaatccatctcctgctgaaagaactggctacaatttaccttcatcagaggtgtcctgttttcaccatcaaggacgtcaacctggcggcgcccccatccaaggcctggggggcctgcccgggaagaagatcaagacctcggggcccaggacagccgccccgctgcccgccactcctccacctgctcccctcgtccccaggacccccagcccccactctgaaggggcgatcctcccacagccgcctcctcctcctgcagccccggctcaggcacggtctggtacctcttcttcgcatctcttatgttcaggtccattgtcgtcttcttcatcatcctctccagcttccaggcttggccacgggaggcagctttgtggatcttcctgagatccccatggtgaatcacctctgatcctcaattttatatactacacctggtggtggctcagtgttcacttccgaaaaatgaaaaattgcccatttttgtgaaaaagttctactgatatgtgaagtctctctctgtggtccaagctggagtgcagtggcgggatctcggctcacttcaacctctacctcccgagttcaagcaaatctcctgcctcagcctcatgagtagctgggattacaggcatccaccaccagagacggctaattttttctttgtatacttttatttaattcggcttaggttacttgtttattagtagtagttttgcatctatgggattgttgtataaaataaatggcgatgcggccaggtttctttcctccctctccccttgacgacgctattaagag

SEQ ID NO: 466241 - DNA, 267 bp, Homo sapiens
gtggtggctcagtgttcacttccgaaaaatgaaaaattgcccatttttgtgaaaaagttctactgatatgtgaaggtaccacattattcattgaattctcttcctgagtgaatgacatagaaccccgacagataaattaatatgttaaaattaaaagattatctaataaacaacttttccgttttaataaaattgtattttgatatatttgaaagatttttattgtagtgaaaaatatatataaaataaaaaataatgatgttggat

SEQ ID NO: 466242 - DNA, 1192 bp, Homo sapiens
  misc_feature (6)..(6): n is a, c, g, or t
  misc_feature (1183)..(1184): n is a, c, g, or t
  misc_feature (1186)..(1188): n is a, c, g, or t
  misc_feature (1190)..(1190): n is a, c, g, or t
  misc_feature (1192)..(1192): n is a, c, g, or t
agcggntgtaacaatttacgcgccgtgtaactgtgaatctttcaaagcctcagttttatgaccctgtggagccagtggactttgaaggacttctgatgacacacctgaacagcctggatgtgcagcttgcccaggagctcggggacttcactgatgacgacttggacgtggtgttcacgacaaaggaatgtaggactttgcagccctctttgccggaggaaggggttgaactggaccctcatgtcagggactgtgttcagacctacatccgtgagtggctaatcgtgaaccggaaaaaccaaggaagtccagaaatctgtggctttaaaaagactggatctcgaaaagattttcacaagacgcttccgaaacagacgtttgagtcggaaaccttggagtgcagtgaacccgctgctcaggcaggcccccgccacttaaacgtgctgtgcgacgtgtctgggaaaggccccgtcactgcctgtgactttgacctccgcagcctgcagcctgacaagcggctagaaaacctcctgcagcaagtgagtgccgaggactttgagaagcagaacgaggaggcccggaggaccaataggcaggccgagctctttgccctttacccatcagtggacgaggaggatgctgtggaaatacgtccagtaccagaatgtcccaaggaacacctgggcaacagaatattggtcaagttgctgaccttgaagttcgagattgaaattgagcccctgtttgccagcattgccctctacgatgttaaaaaaaggaaaaagatctcagaaaattttcactgtgacctgaactctgaccagttcaaaggatttctgcgagctcacacgccttcagtggccgcatcaagtcaggcgagatctgcagtcttctcagtcacctacccgtcctcagacatctacctggtagtcaaggctatactctttgctgttgtaagaaaaccagatcctttctctgtacaccaaaatgactggttagaaattaacaaacatcagattgaaaaagtcctgcagcagggagagattggagactgtgcagagccctacacggttatcaaagaaagtgatggtggaaagcaaggtctgactgcataacttgattggggcaaggccaccccctgttgtcttcattctgaggctctgactcagctggttgggaggtnngnnnanan

SEQ ID NO: 466243 - DNA, 1106 bp, Homo sapiens
  misc_feature (6)..(6): n is a, c, g, or t
  misc_feature (1097)..(1098): n is a, c, g, or t
  misc_feature (1100)..(1102): n is a, c, g, or t
  misc_feature (1104)..(1104): n is a, c, g, or t
  misc_feature (1106)..(1106): n is a, c, g, or t
agcggntgtaacaatttacgcgccgtgtaactgtgaatctttcaaagcctcagttttatgaccctgtggagccagtggactttgaaggacttctgatgacacacctgaacagcctggatgtgcagcttgcccaggagctcggggacttcactgatgacgacttggacgtggtgttcacgacaaaggaatgtaggactttgcagccctctttgccggaggaaggggttgaactggaccctcatgtcagggactgtgttcagacctacatccgtgagtggctaatcgtgaaccggaaaaaccaaggaagtccagaaatctgtggctttaaaaagactggatctcgaaaagattttcacaagacgcttccgaaacagacgtttgagtcggaaaccttggagtgcagtgaacccgctgctcaggcaggcccccgccacttaaacgtgctgtgcgacgtgtctgggaaaggccccgtcactgcctgtgactttgacctccgcagcctgcagcctgacaagcggctagaaaacctcctgcagcaagtgagtgccgaggactttgagaagcagaacgaggaggcccggaggaccaataggcaggccgagctctttgccctttacccatcagtggacgaggttcgagattgaaattgagcccctgtttgccagcattgccctctacgatgttaaaaaaaggaaaaagatctcagaaaattttcactgtgacctgaactctgaccagttcaaaggatttctgcgagctcacacgccttcagtggccgcatcaagtcaggcgagatctgcagtcttctcagtcacctacccgtcctcagacatctacctggtagtcaaggctatactctttgctgttgtaagaaaaccagatcctttctctgtacaccaaaatgactggttagaaattaacaaacatcagattgaaaaagtcctgcagcagggagagattggagactgtgcagagccctacacggttatcaaagaaagtgatggtggaaagcaaggtctgactgcataacttgattggggcaaggccaccccctgttgtcttcattctgaggctctgactcagctggttgggaggtnngnnnanan

SEQ ID NO: 466244 - DNA, 810 bp, Homo sapiens
  misc_feature (6)..(6): n is a, c, g, or t
agcggntgtaacaatttacgcgccgtgtaactgtgaatctttcaaagcctcagttttatgaccctgtggagccagtggactttgaaggacttctgatgacacacctgaacagcctggatgtgcagcttgcccaggagctcggggacttcactgatgacgacttggacgtggtgttcacgacaaaggaatgtaggactttgcagccctctttgccggaggaaggggttgaactggaccctcatgtcagggactgtgttcagacctacatccgtgagtggctaatcgtgaaccggaaaaaccaaggaagtccagaaatctgtggctttaaaaagactggatctcgaaaagattttcacaagacgcttccgaaacagacgtttgagtcggaaaccttggagtgcagtgaacccgctgctcaggcaggcccccgccacttaaacgtgctgtgcgacgtgtctgggaaaggccccgtcactgcctgtgactttgacctccgcagcctgcagcctgacaagcggctagaaaacctcctgcagcaagtgagtgccgaggactttgagaagcagaacgaggaggcccggaggaccaataggcaggccgagctctttgccctttacccatcagtggacgagttctgtgatggagatgccaacatgtaatagagggacccaaagtggatgccagaagagagagaacaattaaaggatgcagagaatatgtccagtgagacgtttgcttgtcagtgtctccctggtggtattagaggggagaatgttccatctgaacagattaaaataatgaaacgtaaaa

SEQ ID NO: 466245 - DNA, 1390 bp, Homo sapiens
  misc_feature (1381)..(1382): n is a, c, g, or t
  misc_feature (1384)..(1386): n is a, c, g, or t
  misc_feature (1388)..(1388): n is a, c, g, or t
  misc_feature (1390)..(1390): n is a, c, g, or t
tttcttttcatggaaagataatggaacatgtcgattggatcatccgtgaaggcctctatctagaaaggagacacttgggcagaattctgaatgaacttgacggacatctgaaggaaaaatattccagtcagaaggaacactgcagtccagtggaaatttcttccagaccagcaccagtcgccccagtgacatttagaaatcactgccctggattgtttcagccaccgaaacactcggtgttcactcctcagttttatgaccctgtggagccagtggactttgaaggacttctgatgacacacctgaacagcctggatgtgcagcttgcccaggagctcggggacttcactgatgacgacttggacgtggtgttcacgacaaaggaatgtaggactttgcagccctctttgccggaggaaggggttgaactggaccctcatgtcagggactgtgttcagacctacatccgtgagtggctaatcgtgaaccggaaaaaccaaggaagtccagaaatctgtggctttaaaaagactggatctcgaaaagattttcacaagacgcttccgaaacagacgtttgagtcggaaaccttggagtgcagtgaacccgctgctcaggcaggcccccgccacttaaacgtgctgtgcgacgtgtctgggaaaggccccgtcactgcctgtgactttgacctccgcagcctgcagcctgacaagcggctagaaaacctcctgcagcaagtgagtgccgaggactttgagaagcagaacgaggaggcccggaggaccaataggcaggccgagctctttgccctttacccatcagtggacgaggaggatgctgtggaaatacgtccagtaccagaatgtcccaaggaacacctgggcaacagaatattggtcaagttgctgaccttgaagttcgagattgaaattgagcccctgtttgccagcattgccctctacgatgttaaaaaaaggaaaaagatctcagaaaattttcactgtgacctgaactctgaccagttcaaaggatttctgcgagctcacacgccttcagtggccgcatcaagtcaggcgagatctgcagtcttctcagtcacctacccgtcctcagacatctacctggtagtcaaggctatactctttgctgttgtaagaaaaccagatcctttctctgtacaccaaaatgactggttagaaattaacaaacatcagattgaaaaagtcctgcagcagggagagattggagactgtgcagagccctacacggttatcaaagaaagtgatggtggaaagcaaggtctgactgcataacttgattggggcaaggccaccccctgttgtcttcattctgaggctctgactcagctggttgggaggtnngnnnanan

SEQ ID NO: 466246 - DNA, 1152 bp, Homo sapiens
  misc_feature (6)..(6): n is a, c, g, or t
  misc_feature (1143)..(1144): n is a, c, g, or t
  misc_feature (1146)..(1148): n is a, c, g, or t
  misc_feature (1150)..(1150): n is a, c, g, or t
  misc_feature (1152)..(1152): n is a, c, g, or t
agcggntgtaacaatttacgcgccgtgtaactgtgaatctttcaaagcctcagttttatgaccctgtggagccagtggactttgaaggacttctgatgacacacctgaacagcctggatgtgcagcttgcccaggagctcggggacttcactgatgacgacttggacgtggtgttcacgacaaaggaatgtaggactttgcagccctctttgccggaggaaggggttgaactggaccctcatgtcagggactgtgttcagacctacatccgtgagtggctaatcgtgaaccggaaaaaccaaggaagtccagaaatctgtggctttaaaaagactggatctcgaaaagattttcacaagacgcttccgaaacagacgtttgagtcggaaaccttggagtgcagtgaacccgctgctcaggcaggcccccgccacttaaacgtgctgtgcgacgtgtctgggaaaggccccgtcactgcctgtgactttgacctccgcagcctgcagcctgacaagcggctagaaaacctcctgcagcaagtgagtgccgaggactttgagaagcagaacgaggaggcccggaggaccaataggaggatgctgtggaaatacgtccagtaccagaatgtcccaaggaacacctgggcaacagaatattggtcaagttgctgaccttgaagttcgagattgaaattgagcccctgtttgccagcattgccctctacgatgttaaaaaaaggaaaaagatctcagaaaattttcactgtgacctgaactctgaccagttcaaaggatttctgcgagctcacacgccttcagtggccgcatcaagtcaggcgagatctgcagtcttctcagtcacctacccgtcctcagacatctacctggtagtcaaggctatactctttgctgttgtaagaaaaccagatcctttctctgtacaccaaaatgactggttagaaattaacaaacatcagattgaaaaagtcctgcagcagggagagattggagactgtgcagagccctacacggttatcaaagaaagtgatggtggaaagcaaggtctgactgcataacttgattggggcaaggccaccccctgttgtcttcattctgaggctctgactcagctggttgggaggtnngnnnanan

SEQ ID NO: 466247 - DNA, 1181 bp, Homo sapiens
gtgtcttgcttttggtgcttagggactctcacagccagattggtagcaagggatactgaccaatgatctacttatcaaacaactctccatttcactggacgctttgcgccataaaactttcctttcaacttacagtcaacaacatccttctcatacttctccttcagctttgccgccttagtgacatggtttttgtcccccccgccatcaacgaaagccctaagctgaagagtaggtacattatcactagcaagttatgtgaccttgagcaagtcacttctacaatatcgggttcgatttcctcatttcaaacagaaggagctggcatctgggagatgacagttcctgtagctgctcttcagggctccagtgcaggttctgccaataaacagtgtatctgcaagattaagagagtgagagtagagaggattatggcttctggcagcggaaggcaggtgagcagacttcagcaggctttggaaagaaggtttcagccacatgttccgggtgtcttcctgcaaggtgttcacctcagtgctgcagggagctgagtttgttggtagttcctacacagcttgattttcttaacactaacagcagtcttctgcccttccaacagtttgtttgtttgtttgtttgtttgtttgtttgttttatataaaatgctgggattacaagtgtgagccactgtgcctaatctataaattgctttctgatataagctactttctttttaaaagtgtttttagaaaaaataaaaagcatgtaagaacacagctttaagaccattttaaaagagaatttaatccaatggttgtgagctgaagttggtaaagcccacataatgctgggtcatgcacataccgagatactcaacaaggctttgatgaataggtgaatcaatgaatgaatgaaatgcctgaggccatcctgattccctcaatgaactgaagcagggtgacaagggtgtgggcagagtggggggtcagaagtgtgaggggagggggggatgtggatgagccactcaggagaagtctgtctgatgaataggtttctaaatctgttgctaagaaagcagcagcagacatctgacttttgtggggctgctccctagaacaaactattaattattaggtgctcattgtacatgcttttttactcctttattttccttttttttt

SEQ ID NO: 466248 - DNA, 990 bp, Homo sapiens
ggaactgcaggggctggcagggaggtctgagttacgcggatgggccacgctccgaccgcacccccgagtccgcctgtccgtgtgtctgtgccgcccgcaggacgtgcttccggcgctgctcgcaggactgcggcacgggcggcccctctacgctgcagtaccggctgctgccgctgcccctgggcgtgcgcgcccaccacgacgtggcccgcctcaccgccttctccgaggtcggcgtccccgccaaccgcaccgagctcagcatgctggagcccgacccccgcagccccttcgcgctgcgtccgctgcgcgcgggccttggcgcggtctacacccgtcgcgcgctcacccgcgccggcctctaccggctcaccgtgcgtgctgcggcaccgcgccaccaaagcgtcttcgtcttgctcatcgccgtgtccccctacccctactaaacgggagagggcattggcggccgccctggcgtgacccccgaggaaggggtcgaggagaagcttggtccacgccacctgctgtggcaagcggagcgtcatcgtctcccgccccgtgcgtcagcgagaccttgggtcaacacgaccctgcgcacagccttgacccccgacagcgaggacctgacctcacagagggaggcgtccagggcggcccttgggtggccagtcccgcaggcagggcccggggaagcccggatcagacctccaggtctgatccgcccctcagtgggagcgggacagggacacagggcacctggacgcgcgggagagggggcagaccccgcgttaggggtggcagcagctgtcgcccggccacacctggtggtgtcattctgaaccctgttgcaatataaagggatttttttttaaccaacttggtttctttgtctaattattttgctttgccgctcccagtctcacgcaggccttccatgtttgtgaaactactacttgttaagtctttgtccagtgtcttacagacttgagg

SEQ ID NO: 466249 - DNA, 2903 bp, Homo sapiens
tgctccggtgttccaggtggagccccaggacatgacagtgagatctggggatgacgtggccctgcggtgccaggccactggagagcccacacccaccattgaatggctacaggcgggtcaacccttgcgggccagccggcggctccggaccctgcccgatgggagcctgtggctggagaacgtggagactggggatgcaggcacctacgactgcgtcgctcacaacctcctgggctctgccacagcccgggcgttcctggtctgtgccagccacgccatcgtgggctcccggcatttcagagacccacaggtcttctgtgagtttgtggtcccgcctcctcattttacaggggagccccaggggagctggggcagcatgactggggtgataaatggccggaaatttggcgtggccacactcaacaccagcgtgatgcaggaggcacactccggggtcagcagcatccacagcagcatccgccatgtcccagcaaacgtggggcctctgatgcgggtgctcgtggtcaccatcgcccccatctactgggccctggccagagagagtggggaagccctgaatggccactctctgactgggggcaggttccggcaggagtcacacgtggagtttgctacaggggagctgctcacgatgacccaggtggcccggggtctggatcccgatggcctcctgctcctcgacgtggtggtcaatggcgttgtccccgagagcctggctgacgcagatcttcaagtgcaggactttgaggagcactacgtgcaaacagggcctggccagctgttcgtgggctccacacagcgcttcttccagggcggcctcccctcgttcctacgctgcaaccacagcatccagtacaacgcggcccggggcccccagccccagctggtgcagcacctgcgggcctcagctatcagctcggcctttgatccagaggccgaggccctgcgcttccagctcgctacagccctgcaggcggaggagaacgaggtcggctgccccgagggctttgagctggactcccagggagcgttttgtgtggacagggacgagtgctcaggaggccctagcccctgctcccatgcctgccttaatgcacccggccgcttctcctgcacctgccccactggcttcgccctggcctgggatgacaggaactgcagagatgtggacgagtgtgcgtgggatgctcacctctgccgagagggacagcgctgtgtgaacctgctcgggtcctaccgctgcctccccgactgtgggcctggcttccgggtggctgatggggccggctgtgaagatgtggacgaatgcctggaggggttggacgactgtcactacaaccagctctgcgagaacaccccaggcggtcaccgctgcagctgccccaggggttaccggatgcagggccccagcctgccctgcctagatgtcaatgagtgcctgcagctgcccaaggcctgcgcctaccagtgccacaacctccagggcagctaccgctgcctgtgccccccaggccagaccctccttcgcgacggcaaggcctgcacctcactggagcggaatggacaaaatgtgaccaccgtcagccaccgaggccctctattgccctggctgcggccctgggcctcgatccccggtacctcctaccacgcctgggtctctctccgtccgggtcccatggccctgagcagtgtgggccgggcctggtgccctcctggtttcatcaggcagaacggagtctgcacagaccttgacgagtgccgcgtgaggaacctgtgtcagcacgcctgccgcaacactgagggcagctaccagtgcctgtgccccgccggctaccgtctgctccccagcgggaagaactgccaggacatcaacgagtgcgaggaggagagcatcgagtgtggacccggccagatgtgcttcaacacccgtggcagctaccagtgtgtggacacaccctgtcctgccacctaccggcagggccccagccctgggacgtgcttccggcgctgctcgcaggactgcggcacgggcggcccctctacgctgcagtaccggctgctgccgctgcccctgggcgtgcgcgcccaccacgacgtggcccgcctcaccgccttctccgaggtcggcgtccccgccaaccgcaccgagctcagcatgctggagcccgacccccgcagccccttcgcgctgcgtccgctgcgcgcgggccttggcgcggtctacacccgtcgcgcgctcacccgcgccggcctctaccggctcaccgtgcgtgctgcggcaccgcgccaccaaagcgtcttcgtcttgctcatcgccgtgtccccctacccctactaaacgggagagggcattggcggccgccctggcgtgacccccgaggaaggggtcgaggagaagcttggtccacgccacctgctgtggcaagcggagcgtcatcgtctcccgccccgtgcgtcagcgagaccttgggtcaacacgaccctgcgcacagccttgacccccgacagcgaggacctgacctcacagagggaggcgtccagggcggcccttgggtggccagtcccgcaggcagggcccggggaagcccggatcagacctccaggtctgatccgcccctcagtgggagcgggacagggacacagggcacctggacgcgcgggagagggggcagaccccgcgttaggggtggcagcagctgtcgcccggccacacctggtggtgtcattctgaaccctgttgcaatataaagggatttttttttaaccaacttggtttctttgtctaattattttgctttgccgctcccagtctcacgcaggccttccatgtttgtgaaactactacttgttaagtctttgtccagtgtcttacagacttgagg

SEQ ID NO: 466250 - DNA, 1033 bp, Homo sapiens
gcaggtgtcatgaagatattatcctttaataggagctctggggacagggtggaatgtgcaacccaaaagcctgactttagccccttctctgtgaagagctatcttttttcatacatgccaggcccccagagaaggcgtgacacagagcccagtgtgagcgtcataatttttcacgagaacaggtcatcaggacacatggtggtagctggcttctgcaggcaaggggctgctgccacagcgaggaggggaatggagctggaccctgggccacgccgcacttcccatgacaccaccccacacctgggcagcagggtggaaagactgctgcagggcatctacaccctgccagagcccgcagcctcttacggaaaggggtctccagtcacctctcatgaggagacgcgtcccactgcctcattgaggtggcctcagggtgaagaatcaggacccacctggtgcaacgaataaacccagactctcagcatcgcgaggagaaaaagtcttgcaacaccgtggcgaccaagtaactctgtgcacatactaagctgacggcgatgctgctgtgtgaggatgccctttgagaatccctgctacaaagcccctgccagtggagtggcattgctgtgtggtggccttgcactgcggattgcccaccggagggatgctgtgtgagcactggctgtgtcaccctgccactgtgtctctgcttccctggaaacatgcgtttctccactttcaggcagaagcaccaactgctcctgtgaattaatatgctcatttaatgctcattacatttaaattttgtcattgaaagggctcattttcccatactggaccgtggccctctccctgctcacttctttagaataaagaagagcatgaggctggtgaaggggactgatgcattattgcactggctctgtctgtggtgacaggctcacaaaaatactgtcaccatggtatttctcagcatttgctacataggaggtttttcatacttcaggaaacatatttaccattttaaaaccaaaga

SEQ ID NO: 466251 - DNA, 364 bp, Homo sapiens
gacctctcctcgtctgtgcacagactggtggccgactctggagcccaggctgttgcttcctggtctggtgatgaatcctccatagtctggaaaggggtctccagtcacctctcatgaggagacgcgtcccactgcctcattgaggtggcctcagggtgaagaatcaggacccacctggtgcaacgaataaacccagactctcagcatcgcgaggagaaaaagtcttgcaacaccgtggcgaccaagtaactctgtgcacatactaaggtctcaaaacacaggcacggcccctggagttcccagtacatcaacatcagcctggggatcatgtcctcatcaaaagctggaaagaggagaaactcga

SEQ ID NO: 466252 - DNA, 310 bp, Homo sapiens
  misc_feature (35)..(35): n is a, c, g, or t
gtccggaacctttatggacccatcgctcttcaatncgtctgcgcttattttgaatcatttggcacttattccaccaagctgccctttgacttatccatctatttcccatatgtgctgaaaatatatctcatgatgctctttataggtatgtattttacctacagtcatctatactcagaaagaagagacatcctcggaatctttcccattaaaaaaaagaagatgtgaagtacagcattccagtgtgacacgagaaaagacaggctgtggattcagtgcagtaaataaaacacaggaagtattctggtgg

SEQ ID NO: 466253 - DNA, 1382 bp, Homo sapiens
cgcgctggaagccctggcggcggcggccatggggcccttggcgctgcccgcctggctgcagcccaggtataggaagaatgcgtatcttttcatctattacttaatccagttctgtggccactcttggatatttacaaatatgacagtcagattcttttcatttggaaaaggtaaaactccgaaacagtttttttatttttaacttttaatccttgttttcacctcatcctgcttatattaaatttctacacacctcaaccttctagatacagattcaatggttgacactttttatgctattggacttgtgatgcgactttgccaatccgtatctctcctggaactgctgcacatatatgttggcattgagtcaaaccatcttctcccaaggtttttgcaggagattttcccctctgtcctcttcaattaagggatgacctgacatcatggatagcttacaactctggaaaccaggagacttcggatatatatatgtttccagctcacagaaagaataatcatcctttttgtggtgatcaccagtcaagaggaagtccaagagaaatatgtggtgtgtgttttattcgtcttttggaatctattggatatggttaggtaagaaggcaaaataatctcttaaaacaaggctaaattgctttctgcagtgaaaccagtactagcagtaaccagaggttacttggtacgagagaggaaaacataaccccttttcaaattatttatcttgatatggaaatgtatttttagtgttctccataatgggcatatcaaagataatgaaaacctaccgtggtattacaagagtaaatcagcacattcaggtttctgcagaaggcttggcctaaaaccaacttggaataaccctcagctgtttcctaacaaaggcattcctcacaattgctttagtacggttgctttaataagcaaagcaggtcttttattgtatcaccagaatttacagttagtttctgtgcattcaagaatcttttaaatatagggcctctcaggaagaaaatgcactctcacattcatttacaattccagtgggttcaaatgactaacttaagtccttttagtgctaattctaaaactttgcagtgagatgtgcctagtcttacctctacaagtggtggtgtcaaacagtcccctttgctcagtgagtgcttacgcctcactctggggaggtgtcctaactgctaggtcagctttcctaaataagaaccgtccctcctacttgagagatctggatttgaataggtaacaaaagagccctagtttgtttttcagccaagggtatgtaaattttttcattatattgtcaataacttaactgaattaaaatatgtttaaataataaaaaaaaa

SEQ ID NO: 466254 - DNA, 1280 bp, Homo sapiens
cgcgctggaagccctggcggcggcggccatggggcccttggcgctgcccgcctggctgcagcccaggtataggaagaatgcgtatcttttcatctattacttaatccagttctgtggccactcttggatatttacaaatatgacagtcagattcttttcatttggaaaaggtaaaactccgaaacagtttttttatttttaacttttaatccttgttttcacctcatcctgcttatattaaatttctacacacctcaaccttctagatacagattcaatggttgacactttttatgctattggacttgtgatgcgactttgccaatccgtatctctcctggaactgctgcacatatatgttggcattgagtcaaaccatcttctcccaaggtttttgcagctcacagaaagaataatcatcctttttgtggtgatcaccagtcaagaggaagtccaagagaaatatgtggtgtgtgttttattcgtcttttggaatctattggatatggttaggtaagaaggcaaaataatctcttaaaacaaggctaaattgctttctgcagtgaaaccagtactagcagtaaccagaggttacttggtacgagagaggaaaacataaccccttttcaaattatttatcttgatatggaaatgtatttttagtgttctccataatgggcatatcaaagataatgaaaacctaccgtggtattacaagagtaaatcagcacattcaggtttctgcagaaggcttggcctaaaaccaacttggaataaccctcagctgtttcctaacaaaggcattcctcacaattgctttagtacggttgctttaataagcaaagcaggtcttttattgtatcaccagaatttacagttagtttctgtgcattcaagaatcttttaaatatagggcctctcaggaagaaaatgcactctcacattcatttacaattccagtgggttcaaatgactaacttaagtccttttagtgctaattctaaaactttgcagtgagatgtgcctagtcttacctctacaagtggtggtgtcaaacagtcccctttgctcagtgagtgcttacgcctcactctggggaggtgtcctaactgctaggtcagctttcctaaataagaaccgtccctcctacttgagagatctggatttgaataggtaacaaaagagccctagtttgtttttcagccaagggtatgtaaattttttcattatattgtcaataacttaactgaattaaaatatgtttaaataataaaaaaaaa

SEQ ID NO: 466255 - DNA, 816 bp, Homo sapiens
cgcgctggaagccctggcggcggcggccatggggcccttggcgctgcccgcctggctgcagcccaggtataggaagaatgcgtatcttttcatctattacttaatccagttctgtggccactcttggatatttacaaatatgacagtcagattcttttcatttggaaaaggatacagattcaatggttgacactttttatgctattggacttgtgatgcgactttgccaatccgtatctctcctggaactgctgcacatatatgttggcattgagtcaaaccatcttctcccaaggtttttgcagctcacagaaagaataatcatcctttttgtggtgatcaccagtcaagaggaagtccaagagaaatatgtggtgtgtgttttattcgtcttttggaatctattggatatggttaggtacacttatagcatgttatcagtcataggaatatcctatgctgtcttgacatggctcagtcaaacactatggatgccaatttatcctttgtgtgttcttgctgaagcatttgccatctatcaatcgctgccttattttgaatcatttggcacttattccaccaagctgccctttgacttatccatctatttcccatatgtgctgaaaatatatctcatgatgctctttataggtatgtattttacctacagtcatctatactcagaaagaagagacatcctcggaatctttcccattaaaaaaaagaagatgtgaagtacagcattccagtgtgacacgagaaaagacaggctgtggattcagtgcagtaaataaaacacaggaagtattctggtgg

SEQ ID NO: 466256 - DNA, 1238 bp, Homo sapiens
aggcatacgttaccacatccggcttttttttttttttttttgctagcgatgtgcaggtatgatatcctttcatgatgctgggccgcggcatcaggccgcagctcccagtcggccgcatgatcaggaaggaatttttcacatgtacaatgaaaaaggaagtgaataatctccatttgacttcaaagtgctgcataaatttgggttataatccagttttttcttcctatatctgcatttttaacccacgggatacagattcaatggttgacactttttatgctattggacttgtgatgcgactttgccaatccgtatctctcctggaactgctgcacatatatgttggcattgagtcaaaccatcttctcccaaggtttttgcagatattagcagaaaatgatgtttatgagcttctcatctcctttcagctcactcagtgtatccttactggcatatttcccttgatgcaaagaggcaaagttgaagagggaagcagctctgcacagtagacaaaatactggacaaaaagcaacggcatctgaggccttcacttcattaactcactgtatgaaaccatctagttgcaggaaaataagctcagggctcccactgattctgcattatgcatttgccatctatcaatcgctgccttattttgaatcatttggcacttattccaccaagctgccctttgacttatccatctatttcccatatgtgctgaaaatatatctcatgatgctctttataggtatgtattttacctacagtcatctatactcagaaagaagagacatcctcggaatctttcccattaaaaaaaagaagatgtgaagtacagcattccagtgtgacacgagaaaagacaggctgtggattcagtgcagtaaataaaacacaggaagtattctggtggaaaaataccttgtatttgataaaaatccattacatgaaataactgcacatacccccaaaactctagacataacaggctatgtttttcacacattgtatttttaagacatatatattctccataccctgcttcaccaaaattcctgcttcatttggattttatacaagttatacttacattgtatgaagtctgattattttcctgtaagtttaatgagaaataggagattagctgcaatagattcaattaaattaagaaaccaaacttgataacctaaattacatgtattctttttcacttccaagttcccaaatagatctgt

SEQ ID NO: 466257 - DNA, 1138 bp, Homo sapiens
cgcgctggaagccctggcggcggcggccatggggcccttggcgctgcccgcctggctgcagcccaggtataggaagaatgcgtatcttttcatctattacttaatccagttctgtggccactcttggatatttacaaatatgacagtcagattcttttcatttggaaaaggatacagattcaatggttgacactttttatgctattggacttgtgatgcgactttgccaatccgtatctctcctggaactgctgcacatatatgttggcattgagtcaaaccatcttctcccaaggtttttgcagctcacagaaagaataatcatcctttttgtggtgatcaccagtcaagaggaagtccaagagaaatatgtggtgtgtgttttattcgtcttttggaatctattggatatggttaggtacacttatagcatgttatcagtcataggaatatcctatgctgtcttgacatggctcagtcaaacactatggatgccaatttatcctttgtgtgttcttgctgaagcatttgccatctatcaatcgctgccttattttgaatcatttggcacttattccaccaagctgccctttgacttatccatctatttcccatatgtgctgaaaatatatctcatgatgctctttataggtatgtattttacctacagtcatctatactcagaaagaagagacatcctcggaatctttcccattaaaaaaaagaagatgtgaagtacagcattccagtgtgacacgagaaaagacaggctgtggattcagtgcagtaaataaaacacaggaagtattctggtggaaaaataccttgtatttgataaaaatccattacatgaaataactgcacatacccccaaaactctagacataacaggctatgtttttcacacattgtatttttaagacatatatattctccataccctgcttcaccaaaattcctgcttcatttggattttatacaagttatacttacattgtatgaagtctgattattttcctgtaagtttaatgagaaataggagattagctgcaatagattcaattaaattaagaaaccaaacttgataacctaaattacatgtattctttttcacttccaagttcccaaatagatctgt

SEQ ID NO: 466258 - DNA, 1098 bp, Homo sapiens
gtgagctgagattgcaccactgcaccccagcctgggcgacagaacgagactgtctcaaaaaacaaaactaaaaatttagaccccttctgtcttatttgctttaaaaccctcagggaaaagaaaaggtatttttttaaatgctattcaaaaaaggaaactatcaggctacaatcatgaagattataaggggtcagaaatataagtaaataaaaaggaaagaaaaggaaatggctgattgctttgatcacacagggtgagaatttcttgccacttagtgaaatttccctcattgtttaaatgggtttgcaccacagttcaaagctaactactgtgaaagcaactcagtgtaaattcaaaaggacccttttttctctctctctttttttttttttttaaacagattgcttctgacaagcctgcccgctgcgtggcttttccagctacactgactagcattgtgttcacctggagagaggagattctaaaccatccactccctgctgatccttagtttctggctggtgacacaccagaaggataggatggctccaatctccctgatgaaggggtaatcacctgactttctcttggaaacagaggcactggttcaggtccacaacattgaacttggagagcaataacctctgtgtgcacagtcactgctggctgaatcaaaaggcaggcattagggataaacactgtcttttaagaataggagtgaatgtctatacatttctgacaaacgcagttttatttaaacaaaaaaaaaagtggagactgggaagaccagagagggaggggcaaatgaaggggcaaaggaaagaagcccagtttctggaattattcaactaagtatgcttttaaaagctaacaaccacaaaaccctaagccaaaccctgtttactggccccttgctagccttgtgtgtttgcactcttgctccataacggcttgtaaataccaccatgtaaaaccttgaaggcaaacagaagacaagaagggacaagctgcatgtgctaggggtgaatgaagtatgtgtcaaggtatttggatggagatgtgcccagaatcttcctagtcaagcttaataaactttgg

SEQ ID NO: 466259 - DNA, 1432 bp, Homo sapiens
ccaggtgatcaaagttgacatcatgtatctgcatggggaagagcagagcatcacttttgcactgtcctgccaagaaggcatggcctggaccctgcctgaaacacattctacagaatgtcaggcctctctttttaaaaccatcatggccatgaaaaaaaggaaggaaataaaagcaaaagcagacaaacaccccccaacttttaaagcatattatggccaggttaaaatatctccatctcacaacatgagggcaaagaaacaaaataactgtgattttcagcgagcaggaagccaggtctcaggcaaacttccctcagcattaaagggactccacacattagcaggcaaagagcccaggagctgttgcagagaatttatttatacccatttggaatttcctgacgaactaacagcctgctggccacggggtttaattccaggactcttggcgtcataaaggtttgtatggtgaaattccaattccacaacctctgatccagttgggagggaaatcagggatcaggcaaatctggccataaacaagagatggagtctggctatgttccccacaccggtcttgaactcctggcctcaagcaatcctccctcctcggccttccaaagtgttgggattacacgtctgcgccaccccatctggcctaaaatgttttgaattaatgaaaacagtactgtaccaatcaagagaagtaggatggaggatctggtgaaaaagagattgcttctgacaagcctgcccgctgcgtggcttttccagctacactgactagcattgtgttcacctggagagaggagattctaaaccatccactccctgctgatccttagtttctggctggtgacacaccagaaggataggatggctccaatctccctgatgaaggggtaatcacctgactttctcttggaaacagaggcactggttcaggtccacaacattgaacttggagagcaataacctctgtgtgcacagtcactgctggctgaatcaaaaggcaggcattagggataaacactgtcttttaagaataggagtgaatgtctatacatttctgacaaacgcagttttatttaaacaaaaaaaaaagtggagactgggaagaccagagagggaggggcaaatgaaggggcaaaggaaagaagcccagtttctggaattattcaactaagtatgcttttaaaagctaacaaccacaaaaccctaagccaaaccctgtttactggccccttgctagccttgtgtgtttgcactcttgctccataacggcttgtaaataccaccatgtaaaaccttgaaggcaaacagaagacaagaagggacaagctgcatgtgctaggggtgaatgaagtatgtgtcaaggtatttggatggagatgtgcccagaatcttcctagtcaagcttaataaactttgg

SEQ ID NO: 466260 - DNA, 1339 bp, Homo sapiens
tgcacgcgcgatgggcgcacacactcgcatccctacacgtgcacacacccgcgctccaattaccgcgctagcgcgcaaaagagccgcaacttccgagtgggactcggcatgcgggggcagtgcccggtacttcaccatcagtcaccttcgcgtccgcctcctcccctgctggttgcacctccagccgcagagatttccggctggggcaccagaactgtccaggccgaaagagctgctcctccgtcacaaagcgcagttgcacactgtactgcaggcgcgcggggacccgggccggagccgggccctagcagtgcctcccccgcgctgctctgggcaccgagaaactgctggggcaagggggagggatttggaagcgcgcaccaccttccccagctcccgttgcaagttcagtcttcgacctccgagacgcccggtgacttctgctggcacctgctgccctcggcatcacctccctcatccccctggagggcacgctggaaagctgcaactccccaccctccgcacaggagcgccccgtagacgcgcagatgggcccagccacccagcggggcggcagccctgagcacacaagtttggagagcgcgcgaggcacctgaaagtggttggggtttggaagcaaaagggtgacacctgctgttcgctgggaccgctctgcgggtgtgggcgtcggtttggaaacgtcctttgcctgagctctgcttgaacctgggtgccagagactacctgggacagctctactgacatcatcagcacgtgattctagcctcattaactctaacttgggaaaagtgcttctggaggaaagggaagagattctaaggctgtgtgccccattcttattactctatctcagtgggtctcaatcccggctacacattggaatcacttggaaagctttaaaaataaaaccaaacctgtgcttgggctccaccataggtgttcaccacagctgtcagtataaatcaatgcatcttggttccattcttcatcatttgctggtagctaaattatggtaaattcagctaaggacattttaaaatcctgtttaatttgtccacatgctaaatatcccagcacacaagagaaaaagcagcatgtacttggataagacaaacctagggcttccttcgagttaaggaacagtcttggaagtcttgttatagttaatggttttttgagtggatgagcaaatgaatgaatatacaaatggttatgcacacaattaagcaaactacttgatcacattcctccttttggttttgcttcctctacctgtcagttgtcctgaacacctgcggaggtattttgtgcaggatgg

SEQ ID NO: 466261 - DNA, 1792 bp, Homo sapiens
gtgcccacggcagaccttactaatcaatcgttcgtctagcaaacagcttcattgttcaattttgatttcaactgctgctgactggccttcgctaatccttgcgaatgacctggagccattggtatggcttctcgaaggagcaaatcgattctcattttcaaaggcacaaatgcctagctttccttctgctccgcttgtggaccagagccattcaacccagcagaaggctggtgccgcctcgcaaggaggaacggccaatgcctcatctccagatttgtgcaatgctccccattctaacaggaccagctccttcgccaaccgggataaagcctcccgctcgcccggctcccagggctgctggcggctcgccgtgggcttagctaaccactccggggtggtcaaccctggcctggattctcgacaagcaccctgtggctgtcctaggcatgggtcctgctttatcctgaacccactgcagagcctttggctgctcctgcaaatccaaacaggacctgccctgcccaccctctacctggccgccgcatcccctcacaaagttgagctctcttggaccccagggccagcagccacgctacccccctttgccctggaatcccaacccatccttcgagaccccctgtgggccgccaccttgatacgttccccacggaggccgatcgccagagagcattaaaagcccaccgggaagagtgtgccgtgcgccaggggaccctgcggatgggcaactacacccacccctagcccctccctcccctgccacaagaagccatcttgacatagtggaaaattcccagaaggactccctatcttgccccaaccctgacattcccccatttttatgcaggttctgcttcaaggagctcagattcaagtcttaggctaattgtttttgggcaggctcaccctgcctcttctcaagccctcacctgccaagacaagcccaaattacaagacaattttttagactccaggctaagggtcgattccatggctctgcccattaagtgttaagaacgacctgtgtatttgctgcagaaagcatgacagtgacgtgctttgaaagccctcattttctattccaaacatgagttttaattgctctttttgggatgcctgatgtctcatcacggcagtattatctctctgggacctctgacagcaggaagagccaatggttcattactcgagcctgcccccgcctcctcagtgctggggccccgtcaatcaagcaggccaagttggactcctcccccaggactgactttggaaggtcaacccactctggaaaaagccttccaggccagcgggtagactgctgaacacaggctgctgagcttctcagccgaattcctggacacttcctcactcggtctttccgtgtgttctttggattctctctgaaaattttatgctgatctattttaaattaaaaatgctatttgtcatcctccttttgtgtctccatttgaaaaccagtgagcaaatcagccttagagacatcaaatgagggtgctgccacatagagacctctcaagatgccctggaagcatcactctgggtgctctctggagtcctccgggtgctcccagcccaggccggaagcagtgctcactggagagaccctcagctccttgtcctacagtgccacctgctggcgagtctgagtcagaggcggcggagattcccggcccttccctctctcctggcgtccttcccccaccaagcctggttcttcccgcctcattgattatctgtgactgcacaaagcccc

SEQ ID NO: 466262 - DNA, 2801 bp, Homo sapiens
gtgaccaaggtgtagactaagaagtggagtcatgcttcacacggccatatcatgctggcagccattcctgggtctggctgtggtgttaatcttcatgggatccaccattggctgccccgctcgctgtgagtgctctgcccagaacaaatctgttagctgtcacagaaggcgattgatcgccatcccagagggcattcccatcgaaaccaaaatcttggacctcagtaaaaacaggctaaaaagcgtcaaccctgaagaattcatatcatatcctctgctggaagagatagacttgagtgacaacatcattgccaatgtggaaccaggagcattcaacaatctctttaacctgcgttccctccgcctaaaaggcaatcgtctaaagctggtccctttgggagtattcacggggctgtccaatctcactaagcttgacattagtgagaataagattgtcattttactagactacatgttccaagatctacataacctgaagtctctagaagtgggggacaatgatttggtttatatatcacacagggcattcagtgggcttcttagcttggagcagctcaccctggagaaatgcaacttaacagcagtaccaacagaagccctctcccacctccgcagcctcatcagcctgcatctgaagcatctcaatatcaacaatatgcctgtgtatgcctttaaaagattgttccacctgaaacacctagagattgactattggcctttactggatatgatgcctgccaatagcctctacggtctcaacctcacatccctttcagtcaccaacaccaatctgtctactgtacccttccttgcctttaaacacctggtatacctgactcaccttaacctctcctacaatcccatcagcactattgaagcaggcatgttctctgacctgatccgccttcaggagcttcatatagtgggggcccagcttcgcaccattgagcctcactccttccaagggctccgcttcctacgcgtgctcaatgtgtctcagaacctgctggaaactttggaagagaatgtcttctcctcccctagggctctggaggtcttgagcattaacaacaaccctctggcctgtgactgccgccttctctggatcttgcagcgacagcccaccctgcagtttggtggccagcaacctatgtgtgctggcccagacaccatccgtgagaggtctttcaaggatttccatagcactgccctttctttttactttacctgcaaaaaacccaaaatccgtgaaaagaagttgcagcatctgctagtagatgaagggcagacagtccagctagaatgcagtgcagatggagacccgcagcctgtgatttcctgggtgacaccccgaaggcgtttcatcaccaccaagtccaatggaagagccaccgtgttgggtgatggcaccttggaaatccgctttgcccaggatcaagacagcgggatgtatgtttgcatcgctagcaatgctgctgggaatgataccttcacagcctccttaactgtgaaaggattcgcttcagatcgttttctttatgcgaacaggacccctatgtacatgaccgactccaatgacaccatttccaatggcaccaatgccaatactttttccctggaccttaaaacaatactggtgtctacagctatgggctgcttcacattcctgggagtggttttattttgttttccttctccctttttgtgtggagccgagggaaagggcaagcacaaaaacagcattgaccttgagtatgtgccccagaaaaaacaatggtgctgttgtggaaggggaggtagctggacccaggaggttcaacatgaaaatgatttgaaggcccacccctcacattactgtctctttgtcaatgtgggtaatcagtaagacagtatggcacagtaaattactagattaagaggcagccatgtgcagctgcccctgtatcaaaagcagggtctatggaagcaggaggacttccaatggagactctccatcgaaaggcaggcaggcaggcatgtgtcagagcccttcacacagtgggatactaagtgtttgcgttgcaaatattggcgttctggggatctcagtaatgaacctgaatatttggctcacactcacggacaattattcagcattttctaccactgcaaaaaacaaaagaaaaaataaaaaagaacaacctacagtgtaggatttacatattaaaaagacacatttgtctaaaacatactctacagaaaaatttgtatctatgattatcatttgttaaagccttgcatcataccatattgttggttcagtaccacaaagagatcaatatattcttttcttccttttttgaaacatatatgctgtacatgttttaaagcaatatgaatgagaggttgtgcttttagttactcaccactatagatccaagtgtgatttcaccttccgttacctacagatgaccctgagactagatccctggagttatgggcggagatattttgagagatgtgtttgtctgatgtaggatgccaagaaacaggacccaaggcaaaactgctcaactctgttaacttctgttactataaataaaggcatgtgcctagttttgatacagaatggaatattttttatacttgtaataatatcacactggaccagtttactgtaaacaaagcccttggtttctccagaaggtggtacaccactagatgtacctgtaaaatgcaagtcatgagcatactgcccttgctagatggctgttaatgtttttgtgttgtttgatacagtc

SEQ ID NO: 466263 - DNA, 759 bp, Homo sapiens
cgattgaagctccgcaccgggtcgggtcgggctcccgaacccggagagtccgcagttttgcccattgcggcggcagcgacagctgggatcacccccagacacgagacacctaaggccaggctcatggaaccaacatgcggaaaacgcacagaggcgcatgcttggtgctatttatattctgggtcctgactgagtgtggcagcacaaatcatccatcctgtgctgtaaaccaattccaagttctggaatcctcgggagattttgcctcaactttcctgggaaattggattggaagaactacccttatgttcattggaaataaggtgaagacaaaggtttggcaagatgctgattcagagtgcagcaacactcaggctttcaggccctgccccattccacaagttgtaggcctgcagggctgcgttcagtgggacactggaatgacattaacaggactgatctgggaagttaatcatggcaaggaaggtgccaggcctgaatgcctggaggaagttactccagagggtatcaacttcctgggacttcctggtggaatatactccagtggccagataatgctttcaggcagagaaattcaggaagccactggcttgtccacgcaagcagagaaagcaggtgtcagatgcacgcagacattgaagtttgaagtattccgaacagagatcaaacactgacttcatgtatggcaacaggcacttaaaaaaaaaaaaaaagcacttctgcatatatgatcatctc

SEQ ID NO: 466264 - DNA, 853 bp, Homo sapiens
cagttatcacacagtgcaaatgatggaagatggaagtacacgaagcctaagagatttttttactgtaagtttctcatggaacagcccctggtcatgtcttctggtcacttccattccaggacaggtatccacctctcttccagctttccgattcacccccgttcttgtcccccaaacactgacaatccccatcagccaatcctgcactgtggcccagatggggcaatacgtttcactgggcccattacatttctctcttgctaatgtaccagttctagttcactttattttccagacagcagttcagaagaaagaatggctttggcagctgtatgagcaaagggctttcaggaaggaagaacaaatgcagggagacaagatgaagaaaccaaggcacagactcatgtccaggaccctaaaaccagtgcatggtggagccagcattcaaacccagcacacgggacgccagagtccatgctcctaaccactacattgtgatgccttgaaactcatggcagagaagagtttgagagaaaggtttcagaaagacaaaagtagaaatcctgaaagactctgagcataaagttaatgctgcagcaatagatttagaaaaatgatgcatgatgatctaagtggaaggtgtgacatacccccaaagaaatgctgaattccccaggtagggtggggatccaaacaaagggagacttgtgcctcatttccttagtggaaccgaaggagcaacaagcctccccttgctctctctctatacctccaccagtcacaggcagagaaagtaaaggtggggcctgctgagcacgtcagagcagaatgggcatggcatagctccgtcaag

SEQ ID NO: 466265 - DNA, 1981 bp, Homo sapiens
gggtgaagcggccaggtgaggagatgggatttcaccatgttgcccaggctgatctcgaactcctgagctcaagcaatctacccgcctttgcctcctgaagtgctgagattacaggtgtgagtcaccgcggccagcctgtctctacaatttaaaaaatctcgccatggccaaacagctgcaggcccgaaggctagacgggatcgactacaacccctgggtggagtttgtgaaactggccagtgagcatgacgtcgtgaacttgggccagggcttcccggatttcccaccaccagactttgccgtggaagcctttcagcacgctgtcagtggagacttcatgcttaaccagtacaccaagacatttggttacccaccactgacgaagatcctggcaagtttctttggggagctgctgggtcaggagatagacccgctcaggaatgtgctggtgactgttggtggctatggggccctgttcacagccttccaggccctggtggacgaaggagacgaggtcatcatcatcgaacccttttttgactgctacgagcccatgacaatgatggcagggggtcgtcctgtgtttgtgtccctgaagccgggtcccatccagaatggagaactgggttccagcagcaactggcagctggaccccatggagctggccggcaaattcacatcacgcaccaaagccctggtcctcaacacccccaacaaccccctgggcaaggtgttctccagggaagagctggagctggtggccagcctttgccagcagcatgacgtggtgtgtatcactgatgaagtctaccagtggatggtctacgacgggcaccagcacatcagcattgccagcctccctggcatgtgggaacggaccctgaccatcggcagcgccggcaagaccttcagcgccactggctggaaggtgggctgggtcctgggtccagatcacatcatgaagcacctgcggaccgtgcaccagaactccgtcttccactgccccacgcagagccaggctgcagtagccgagagctttgaacgggagcagctgctcttccgccaacccagcagctactttgtgcagttcccgcaggccatgcagcgctgccgtgaccacatgatacgtagcctacagtcagtgggcctgaagcccatcatccctcagggcagctacttcctcatcacagacatctcagacttcaagaggaagatgcctgacttgcctggagctgtggatgagccctatgacagacgcttcgtcaagtggatgatcaagaacaagggcttggtggccatccctgtctccatcttctatagtgtgccacatcagaagcactttgaccactatatccgcttctgttttgtgaaggatgaagccacgctccaggccatggacgagaagctgcggaagtggaaggtggaactctagccctgaagtcacgccttggccctgacatccccacatgcccgcagagatcctctttgagtgtctgtctttgtccaggtttcagacatttctaggttggggaagatgctattgggaaacctcttctccgtgacacagaatgttctgggtgggagccgcccttcttcatcttagagaaccaagtgcctcctgtctgaaaggaggaggactgaatgttgatcgtgcaagccctacctgcgaggcactcagacgcacatcatcttacacaaccctctgagactgagacctgagttatctccagttcacaagagaggaaagcactctggaggtgaggtgaagtggtgtgcccaggccttctagctggccccgattgagtctcactggatagcaatagtagctcctgaatttctttggaaggtggtgttaggggcctggtcttgaagttgcatttgcatagcaagcgcatgggtttggctcatatcatatgtttaactgggggagctgataggaatatatcatataataaaatacatatttggtgtttgcccctgg

SEQ ID NO: 466266 - DNA, 1153 bp, Homo sapiens
ctagtgctcattcttttggctgcatatttaattcacgagtgggtgatcacgtagagatgaatggaacgactgagaggaagcgtctcccttggttattttctgttgccgcaggacctgattcagtgcttggtgaggatgaagcaagaaggcaccatctgtgaaccagaaaataggccctttccaggcactgaatctgacttgatcttagactccccagacacccagtttacgggattttgctatagcagcccaaatggactaagacagggggacaatctgctcacatctcactgggttgcaggtggggatggtgtcgtgtccaggaaagggaaagaccgagttcctgacagcctcctcatgaaggtgctgagccagcgcctggaccagcaggactgcatccagaaaggctgggtgctacacggcgtcccgcgggacctcgaccaggcacacctgctgaaccgcctgggctacaatcccaacagcaccttagctttcagttaaacatttttatgattaactcagaaagtaatcttagccgtaaaccttcaagttcagatacaggctaagaaagagagaaatattctaaaatgaatccacctagcaccaggatgactatcaggactgtaattctggttcggttgtgatgccaattataaaacactctagctgtggtgttgctgtttttgacaccaggaggaaatcttgacagaattatagcctagaaatcaatctgggaatacgatacagaaatctataattcagatatgaaaatctacaaaggctctttttttaaggaaggttcaatgaaattagattaaaataaatttacatatatatcaattttattattaaaatatattcacactagtaaatagagttatcggggaagggtaagctactcagtgtattggacacaaaaatagacctctttggcttatcagaaaacaaagctattgtctccttgtcaaatataaatctcttcttagagctaataaatgggtagtgttcaaatgcaatgttttgtctgactcctacctcataaacccatggcacataatactaaattatattccactgagcagtatcaatctcttgattccaacatcatacagtaagggaaacaaaccaagtaattgatctgtcgaaaagaagg

SEQ ID NO: 466267 - DNA, 1853 bp, Homo sapiens
tctgagactttacttgggaaaggaggaacaaaagtgggtgaggatgaaggtggagctgcttgccactgagaggacagaacctgagaaacaaggtgtgatgaaaaagaagcaactttattcaagtgctactacttgggaaatggcaaggctcatgcttctgaaagacaatttcatatttggagctgatggggctgtcactaccccttctaggtctagagctttgtattgcagcaccaaggtagcttggtctggcacagtgtttggcaataggtccttgtatggtgctgccaaggcatcttgggccaagcggttggtgcagacattgaaaggcttactggggcaatgctttgcaccgagtccaagtcctcctgacccaccaaccataacaaatagaaacagagtgataacaaccaaggcagaccaaaagagcaaacagagagtccacgtgatagagtcaggatttccgggtgcactttggttgacttacaaagttcttgaagcccatcaccttcccatatgttgctttccttacaccaacaaagcattgcagacacctgatgccatgggagaggtgggggaaacaaatgggaaaatctccaaggcaaaagcatcctcagcagctgctgtgagtcccctggagttcccagctgtgggtttatatatcttactacaatgctgatttctaataccgtgtcataaaggggaaggagggcttccttagcttcttcttgactttaatggcaatgcctgtgaaatcttaaaggactacacactatactgaaaatgcctagtggaaaaaagacgccatgactaactgattaagaatccacagcagagacacttttcaaaagaagacatacaagtggccaagaaataaatgaaaagatgttcaacatcactaatcatcagagaaatgcaaatcaaggccacaatgtgaaaccatcttatagcagtcagaatggttattattagaaagtcaaaaaaacagatgctggcaaggatgtggagaaaagggagggttaatacacgattggtggtaatgtaaattagttctgacactatgcagagcagttttgattcctcaaaaaacaaaaatggatctaccattcaacccagtaatcccattcctgggtatataacaaaaagaaaataaattgttctaccaaaaaaagacacatgcactcgtatggtcattgtagcactattcacaatagcaaagacatagaatcaacgcaggtgcccatcaaaagtgggttagataaagaaaatgcagtacatatacatcataggatactatgcagtcatgaaaaaaaatgaaatcatgtcttttgcagcaacatggatggaggccattatcgtaagttaattaatgcaggaagagaaaaccaaataccacatgttcacacttacaagtgagagctaaacatcgggtactcatggatgtaaagatggcaacaatagacatgggggactatcagagaaggagggatggagtggagcaagggctgaagaacgaagtattggatattcctcactacatgcgtgatgaaatcattcctattccaaatctcagcattaggaaatacacccatgtaagaaacctacacatgaaatcccaaagtctaccccttgaatctgaaataagaataaagagtaaaaaaaaaaaaattaacagcaccatagtaccttgtacatgtgaatctacttccctttccatcttttacttacaacaatcctttgatataaatttccttgtgtattcaactccattttctatagttgatgaaatttctcacagattatggcaataaatgcctggcctcgttggcctcagcggtggagctctgcggccg

SEQ ID NO: 466268 - DNA, 1192 bp, Homo sapiens
aattcggcacgagggaaggtcgtgtttgcgtcccattctgccatgattgtaagtttcccgagacctccccagccattcagaactgcctgtgaaatcttaaaggactacacactatactgaaaatgcctagtggaaaaaagacgccatgactaactgattaagaatccacagcagagacacttttcaaaagaagacatacaagtggccaagaaataaatgaaaagatgttcaacatcactaatcatcagagaaatgcaaatcaaggccacaatgtgaaaccatcttatagcagtcagaatggttattattagaaagtcaaaaaaacagatgctggcaaggatgtggagaaaagggagggttaatacacgattggtggtaatgtaaattagttctgacactatgcagagcagttttgattcctcaaaaaacaaaaatggatctaccattcaacccagtaatcccattcctgggtatataacaaaaagaaaataaattgttctaccaaaaaaagacacatgcactcgtatggtcattgtagcactattcacaatagcaaagacatagaatcaacgcaggtgcccatcaaaagtgggttagataaagaaaatgcagtacatatacatcataggatactatgcagtcatgaaaaaaaatgaaatcatgtcttttgcagcaacatggatggaggccattatcgtaagttaattaatgcaggaagagaaaaccaaataccacatgttcacacttacaagtgagagctaaacatcgggtactcatggatgtaaagatggcaacaatagacatgggggactatcagagaaggagggatggagtggagcaagggctgaagaacgaagtattggatattcctcactacatgcgtgatgaaatcattcctattccaaatctcagcattaggaaatacacccatgtaagaaacctacacatgaaatcccaaagtctaccccttgaatctgaaataagaataaagagtaaaaaaaaaaaaattaacagcaccatagtaccttgtacatgtgaatctacttccctttccatcttttacttacaacaatcctttgatataaatttccttgtgtattcaactccattttctatagttgatgaaatttctcacagattatggcaataaatgcctggcctcgttggcctcagcggtggagctctgcggccg

SEQ ID NO: 466269 - DNA, 1164 bp, Homo sapiens
tctgagactttacttgggaaaggaggaacaaaagtgggtgaggatgaaggtggagctgcttgccactgagaggacagaacctgagaaacaaggtgtgatgaaaaagaagcaactttattcaagtgctactacttgggaaatggcaaggctcatgcttctgaaagacaatttcatatttggagctgatggggctgtcactaccccttctaggtctagagctttgtattgcagcaccaaggtagcttggtctggcacagtgtttggcaataggtccttgtatggtgctgccaaggcatcttgggccaagcggttggtgcagacattgaaaggcttactggggcaatgctttgcaccgagtccaagtcctcctgacccaccaaccataacaaatagaaacagagtgataacaaccaaggcagaccaaaagagcaaacagagagtccacgtgatagagtcaggatttccgggtgcactttggttgacttacaaagttcttgaagcccatcaccttcccatatgttgctttccttacaccaacaaagcattgcagacacctgatgccatgggagaggtgggggaaacaaatgggaaaatctccaaggcaaaagcatcctcagcagctgctgtgagtcccctggagttcccagctgtgggtttatatatcttactacaatgctgatttctaataccgtgtcataaaggggaaggagggcttccttagcttcttcttgactttaatggcaatgcctgtgaaatcttaaaggactacacactatactgaaaatgcctagtggaaaaaagacgccatgactaactgattaagaatccacagcagagacacttttcaaaagaagacatacaagtggccaagaaataaatgaaaagatgttcaacatcactaatcatcagagaaatgcaaatcaaggccacaatgtgaaaccatcttatagcagtcagaatggttattattagaaagtcaaaaaaacagatgctggcaaggatgtggagaaaagggagggttaatacacgattggtggtaatgtaaattagttctgacactatgcagagcagttttgattcctcaaaaaacaaaaatggatctaccattcaacccagtaatcccattcctgggtatataacaaaaagaaaataaattgttctacc

SEQ ID NO: 466270 - DNA, 347 bp, Homo sapiens
ctgaaagaagggtgaggttttgggggctctgatgtgcaagtgttgccacctttaaatggccccttactctcataatcagtgctgagtagtggcaagggggagaaaatggaaaagttggcatgggagagaaggcagatccagaagataggatacagctcagccctgagaatgtggcctgattttctcttctgttattacaactgctcttctgcttgagtttcttctacaccttcaagatggctgaagaacaagacgctttctctccatgtctatgctgtttcactatgctgcaaatattcccagccttttccccttgatgcccaaaataaattcctcaaataccctga

SEQ ID NO: 466271 - DNA, 762 bp, Homo sapiens
caaagaccagcggggcctgcgtgaaagatgctaaagacgaattacctcctctccctcaaagattccctaaaagcagaatcgagtcaattctcattcattcttttagggctcctgcatgcgaactccctgcagcctgcaatgctttctgggttttcatttctgtttccattttcaccttttccctcattgtcttgctgccagtctctaacaccactcctgacctcttccttccttctaacctgctgtgggatcagaagtgaggtaacaaagcttgctataattctaatttatcaacagaataaacagacccccgtcaatactggaaatgctctcccctttgcaaaatacgaaatgtcttttctaaatacacgcatgccttttagtgcctatgtaatccttatccatttcatactgtctgtgaactttggtgaatcatcagtctctctcttctgcagtgttgccacctttaaatggccccttactctcataatcagtgctgagtagtggcaagggggagaaaatggaaaagttggcatgggagagaaggcagatccagaagataggatacagctcagccctgagaatgtggcctgattttctcttctgttattacaactgctcttctgcttgagtttcttctacaccttcaagatggctgaagaacaagacgctttctctccatgtctatgctgtttcactatgctgcaaatattcccagccttttccccttgatgcccaaaataaattcctcaaataccctga

SEQ ID NO: 466272 - DNA, 3571 bp, Homo sapiens
tccgcgcagcccagccggcaccccgaagctcctccttcaccgggaacccaagcagaagaccgatcaaggaggtcctgacgacaggactcctatgggtccgaccctgggtctcccgcaggcccctctggtagtcctcttcccacccaccgcctggggctgcaccgcagccgccgccgcaagctccagcaccgccaccccagtccccgcagccgcggcgtcgccgccattttttaaagggtccgcagcctgactgccgagtaagggggggtggggcgggtgagtcggcctcgccagcgctcatgcgcgaggcccgagccgccgcttcggtcacagtgaccgccaccgttgccaagggatgggtccctgagacttggcgaagtgggagccctgtgtgatcgtgcgtcagagtcggggctgagaccagccccggccagggcagttaccgggacggtctccggaggccgggattcgcggagggtccaccagcaggaagaaaccccaggaggaagaaacctcagacagatcgccggggaggcagcgcgggatcccagcctcaggcgtgcgcggacggtgtgcggagtctagctttgtaccaggctgcagtgcagtagtgccatctcagctcactgcaacctctgcctcccgggttcaagagattgtcctgcctcagcctcccgagtagctgggattacaggcacatgccaccacacccagctaatgtttgtatttttagtagacacagggtttcatcatgttgcccaggatggtctcaatttcctgacctcgtgatccgcacatctcggcctcccaaaatgctgggattacaggcatgagccaccagaaccggacatgctttccttaaaagctaaatattttaggcttgtgtgccattaggctctgttacaactacttaattctgcttttgtaattctatagcacccattgataatacataaacaaatgagcatgaatgtatctcagcaagcagagcataaaagttcagaaaatttgcagcctgacaatgtgatagaagagaaaaacccattttctgaggagaaatttaagctggctgcagaaatttgcataagtaacaaggaactgaatgtcaatccccaagacaatggtgaaaatgtctcctggcatgttagaagtcttcacagcagcccttcccatcacagtctcagaggcctagaggaaaatggttttgctgggcccaggggtggaagccccaagccttggcagcttccatgtggtgttgagcctgtggatgcacagaaatcaagaattgaggtttgggaacatctgcttagatttcagaagatatatggaaacacctggatgcccatgcaaaagtttgctgcagggatggggccctcattgacaacctctgctagggcagtgaggaagggaaatgttgggtgggagcccccacacagagtccctactggggcaccgcctggtggacctgtgggaagagggccaccatcctccagacctcagaatgttagatccaccaacaacaccatgtgcctgggaaagccacagacactcaacaccagcccacaaaagcagccagaaggcaggctatatcccgcaaagccacaggggcagagctgcccaataccatgggaacccacctcttgcatctgcatgatcaggatgtgagacatggagtcaaaggagatcattttggagctttaagatttggctgcccctctggatttcagatttgcatggggtcaagaaatgaaaagcataaaaattgaaaagtgaaaagaaaaaatatttttattcacagaacttatgtccagctatgcatcaccccttcgctgatgagccttaagaaaatccaaatttataaattgctgggtccatctctctttccatccggaaaagtcagagcaactggtcttgctggttttaagtgttgcctgtgtttctggcattggtcacaaagcctactgcctgctaatcggcaagtggacctgtttctctaacaatggcccgaaacttcacaacatcaaaggagaaatcattgccagcaaaagcatttccgggtagtaggaaagaatacaagtgaataacattagtccagaagttttaataatattctttgctggttgaaattcatgtttaatatgatgtaaattacttgataagcaaattaagaactatgctactacagactccaaataagacgcaagaaaaatgaggggaaatacattaaaggaagatcttaaaaaacagctgcacagaagataaattatttttccaggagttttaaacatagttgcttttgtttgtttgctttgctgttttttcttaataattgttttaggctatccactatataaagatctttaaaaaggaaaacctgtaataaatgtgaagctagtgcctttctatttgcaagatgcacagaaatgcctgagaccaattgaaaattgcctgtgaacaaatacgcttccagatttttagcttgctcttttctaaacatgaaaattctcagaagcatcatgttttgtcactttaatccccattacttgttcttaattataaaattaaacatatttagtccttatccagaagcttcacatgatgtttgtcttcttgtcagtagggggaaatatctagaagataaatgactagattaagtggtaagcataggtttactttttaaagaagctgtcaatctattttacaaactggttgtcaatcaaaagtatattaaagtttcagttcctccattttcttgcctatacctgcttttatatattctttatgaaagtaatttattagtgtgttggggctccttatgaccacccttaggctcaaagattaactataatgattcacaggtcttagaaaacatgttacattcatagttacagtttactacaatgaaaagatacagattaaaatcaacaaagaaaaaaatcccatggggagaaatgtagaagatatcaggtacaagctttcaggtgtcctctcccagtggaatcccacaagaacacatgtaattctcccagcaacaatatttgacagcatattgaagtgttgtcaatcagagaagctcatttaagttttggtctccagggcttttactgggcatcagtcatgtaaggtggtgcctatatgagtgatttcagctactcagactacagcatctgtcagatcaaatatagccattgactctaaattatattgttaggataagcttaactgttcaaatgagcacagcatggtccaaggcctcagacgctgaaaaccacttgtgcactgtactctaaagccaaagatgtatagaaacactgtcatcaggcagaatatattaagggcccacagattatcttccaaaagccagccaagtgccagttctaaagacaaacattagtcctgatgagataaacctttcttggccaataagatatatgctattcaaatgttttctcagttcatagctttttaaaaaattatttttaaatgcccttttccattcctattaagcatagtattgaaagttctagccaaggcaatcaggcaagagaaagcaataaagggtattcaaacc

SEQ ID NO: 466273 - DNA, 2344 bp, Homo sapiens
tccgcgcagcccagccggcaccccgaagctcctccttcaccgggaacccaagcagaagaccgatcaaggaggtcctgacgacaggactcctatgggtccgaccctgggtctcccgcaggcccctctggtagtcctcttcccacccaccgcctggggctgcaccgcagccgccgccgcaagctccagcaccgccaccccagtccccgcagccgcggcgtcgccgccattttttaaagggtccgcagcctgactgccgagtaagggggggtggggcgggtgagtcggcctcgccagcgctcatgcgcgaggcccgagccgccgcttcggtcacagtgaccgccaccgttgccaagggatgggtccctgagacttggcgaagtgggagccctgtgtgatcgtgcgtcagagtcggggctgagaccagccccggccagggcagttaccgggacggtctccggaggccgggattcgcggagggtccaccagcaggaagaaaccccaggaggaagaaacctcagacagatcgccggggaggcagcgcgggatcccagcctcaggcgtgcgcggacggtgtgcgggtccagctatgcatcaccccttcgctgatgagccttaagaaaatccaaatttataaattgctgggtccatctctctttccatccggaaaagtcagagcaactggtcttgctggttttaagtgttgcctgtgtttctggcattggtcacaaagcctactgcctgctaatcggcaagtggacctgtttctctaacaatggcccgaaacttcacaacatcaaaggagaaatcattgccagcaaaagcatttccgggtagtaggaaagaatacaagtgaataacattagtccagaagttttaataatattctttgctggttgaaattcatgtttaatatgatgtaaattacttgataagcaaattaagaactatgctactacagactccaaataagacgcaagaaaaatgaggggaaatacattaaaggaagatcttaaaaaacagctgcacagaagataaattatttttccaggagttttaaacatagttgcttttgtttgtttgctttgctgttttttcttaataattgttttaggctatccactatataaagatctttaaaaaggaaaacctgtaataaatgtgaagctagtgcctttctatttgcaagatgcacagaaatgcctgagaccaattgaaaattgcctgtgaacaaatacgcttccagatttttagcttgctcttttctaaacatgaaaattctcagaagcatcatgttttgtcactttaatccccattacttgttcttaattataaaattaaacatatttagtccttatccagaagcttcacatgatgtttgtcttcttgtcagtagggggaaatatctagaagataaatgactagattaagtggtaagcataggtttactttttaaagaagctgtcaatctattttacaaactggttgtcaatcaaaagtatattaaagtttcagttcctccattttcttgcctatacctgcttttatatattctttatgaaagtaatttattagtgtgttggggctccttatgaccacccttaggctcaaagattaactataatgattcacaggtcttagaaaacatgttacattcatagttacagtttactacaatgaaaagatacagattaaaatcaacaaagaaaaaaatcccatggggagaaatgtagaagatatcaggtacaagctttcaggtgtcctctcccagtggaatcccacaagaacacatgtaattctcccagcaacaatatttgacagcatattgaagtgttgtcaatcagagaagctcatttaagttttggtctccagggcttttactgggcatcagtcatgtaaggtggtgcctatatgagtgatttcagctactcagactacagcatctgtcagatcaaatatagccattgactctaaattatattgttaggataagcttaactgttcaaatgagcacagcatggtccaaggcctcagacgctgaaaaccacttgtgcactgtactctaaagccaaagatgtatagaaacactgtcatcaggcagaatatattaagggcccacagattatcttccaaaagccagccaagtgccagttctaaagacaaacattagtcctgatgagataaacctttcttggccaataagatatatgctattcaaatgttttctcagttcatagctttttaaaaaattatttttaaatgcccttttccattcctattaagcatagtattgaaagttctagccaaggcaatcaggcaagagaaagcaataaagggtattcaaacc

SEQ ID NO: 466274 - DNA, 2360 bp, Homo sapiens
gtgtttagtagaaagacaatccttttttcttccagtcaattttttctttgatctacagaacttgcttcttttctctgaagttttcacaatacagcatgatagaaggagcacagagtgccagaggcagggaattcctatgcttcactagtgactcataagaaaacttaatagaaggtctctactgcctgctggccctgcagtacctgattgatgtggtcccaaactaaagtaggctaaccttcattgaaccaagcacttcagagccatgggaagaagtatgggggaaggagtccttgtactctggcaatgaggaaaacaaacattaacagtgcaagacacagtgagagtcacagatccatggatggacgatccttttgaggacaatagagggggaatttggataagtttcctgagtgagaaaccttccagatggcaatctgaaagttagctgttccttctcaaaacacagagctttctcaagagaaagataacaccctctttcatcagagcgagcgagccttctacaacaagatgtcgcagactgggtgacttaaaccagggatcctcaaaccctggcaatggatcggtacgggagcacaaaccctattgctaactgtacttgcaagggatctagactgcattttccttatgagaatctaatgcctgatgatctgaggtggaatagtcgcatccaaaaaccgtcctccacagtcccctccatgaaaaaaattgtcttccgcaaagctggtccctggtgccaaaaaagttggggaccgttggcttggacaacagaaattggttactcacagatttggaaactgggaagtccaagatcaagatggtgtgtgcggagttggttccttcaaatgtttgtggcctcgctgacttcaggagtgaagctgcatacccttgcagtgagtgttacacagctcttaaaggtggcccatccagagttgctcattcctcttgctgggttcgtggtctcgctgacttcaggagtgaagctgcagaccttcacagtgagtgttacagctcttaaaggtggcacgtctggagttgtttgttcctccgtgtgggttcgtggtctttctggcttcaagagtgcagctgcagaccttcatggatggcaagttcccccaggccctttggcatgtccagagatgctgtctgggagcaaagacttagagccaaaagccttagcagtttacctgatgtattctactgcagctaagctggcacccacaccacaatacaaagtccttcctactcttctctctcctctccacaggcagagaggcctccccctgtggccaccaccaccactggtccatggtggtgactggtttttgccaggccaccatgatgttcgcttaaagcccaagggctcttctgtcagcttgtggtcaatgctgcaaggcctggaactcacctgtaagggtagtgggatcccttctggcccagcggctgtgcctagaaccttagacatgaccttgagcccaaacaagataatgtgtgagaatagagcccacttaaaaagggccgcaactgagaagcactatgccctcactgaaagatgcaagtccggcttaaatatgcctggaaacctcaacattgaaaagtaacgcaagttaattcttggttggcagtaccttgagggcatctggaagaaacaaatgaaaattatctttacagagcccaccctaagtttagacctttcttggttcccacagataaatttacaccatggatgaactttcaatacgccaaaataaacaagcaaacaaacacagctctgtttttttgtcagctgatgctaataatgttttattaaagctctaaaggaaatgatttcttccaacataatattctgtgtactgcaggtcttttcttttgcattttgagtcactgaaagctaagctatgctttcagatggcctgcaaactgaagctagacaacttaaacttcagaagaaaataacagcaacttatttacatacctagaactataaataatgtatcattctttctatatctagtgagaaatgacaatgggtcttttcattctgtgcatttgtctgtctatgaacactagatcaggatctctcagagcctatattatttactgcttatagacgcatgtctgcaagctctttaaaactgtaaagcccctcttagctctagggccatattaaaagagactatgaagtaaatttagctcaggtagggcaataggggaagggagcagggcatagttttcctacttcttccctacactattggttgtctttaatccactaaagctcttcactgtgaagcacaagtttaaaaaaatgtaagaaaattacatattgcagttggcta

SEQ ID NO: 466275 - DNA, 2617 bp, Homo sapiens
ccagcctagatgaccgagcaatatcctctctcaaaacaagatgagctgtaccatagatttctggagtgtggatcgaagattttcataccagcagtagggtctcaaccttgtttttcttatctcttggcaagaaagcaaagctggccattggggtataataaaccttgtgtacacagctgcaggagggaacagggaggtggctgtgcttggaggccgggtgttttgccgacgataatggggcatctctggcaccatgttgctggtcggaacagttttggagttggattttgtcctgcagtgatgtctttgaagaggaaagcacttttgaatatttgcattgctttgaagccagtgccatggagatattgtgacttattgccagtcagaggcaaagctgagtgtgccctacgtcttccctgggagaagagtcctcgggggctttcctgtgggagaaaggaaggatctattcctgcccacacttctttctctccagatagagaaatagctcacatttttggtgcctactctgtactgggcactgtactgtgagttttcatgtgtgacctcacagcagtaaattctgtaatgcaaggcaatcttgtgtccttatttctgtttctgggcacactgtaaaacatctgtattttaatagtatctgtcaggaaattctattttggcaaccaagtacgggctaatctaaagtagcccatacttgagtgctatgttgataaggctctaatgcatagttagccccttgactgtcaggcttggaaaaaagacaggaagtattccttgtctttggaaatgagcctactctggctttgggaaggaaagagtacaaatggttctcaccagatagggttgcagcagctctcccagcattttgggaacaaatcaggtcattatctcaacaatgtcaaaattgtgttcccagatcggttgttgtttgaaacatttggggctgatgcggaggaggagaattaattagcagctccctctgttggtgttctttttcagccttctcacattgcagcacgagagtcccttagacatgctggctgctcatttgataatctgtgttttgctcagtacaaaaggttgctggctaagttttgtgagcccctctaacgtcaggctggcagtatcttgggttcaattaacaagaaagtctacagtaacattttgtcaatggggaaggacttgaattcacagaactgtctcggaaagccctggtcctcgcagtccgcctgagagagtagagaagaccccctcccagaaccttcctgtaaggtctccccgctgacttcctgtagtggatgtgactgtgtgccaggtgcctgccgaagacccctgtcactgactgtgccctttgggaaagagtcaacaatggcctcctcctatggctgacttcgttcatgttcaggctctccagcttgctagtgagaattgccaaggattggttcatggcaggatagaactaaactgatagatgaaagctccacagtgcttcaagacggggtcccgttcatgttaagcagttttccttccttcaaaataaaaaactagcagtccttagggaggacagttttttccttccttttcctattctggctccaacagctgtctcaacacagcccgagatggggagcagcctggcttccaccggcaatagctgtattgtgggagtgtgaaagagaagccaccttttcctccctctgcccaagccacctggcccctttgtcctttctcctcctcgtcctctgaggtatgagtggctgtgactgtatgacataggaactatgaagcggggtgaggggacggtttggtgcgtaaatcctcacgcaggtggcggttattgtctgtgtggaggaaataagcccggttcttcctgggactgctttcatttccctctagcttccagagggtaaaatgaaccttaatggaggttggggggtggcacgcacaaagtcctgggttgagggggcagtggtcagaaagttccctagggtaatatacaaaggagaattaacactggggacactgaggtgggttttggtcctttccacataactgacacctttcaaagcaaggacttgctttctcgtgaggaatgtcagcagtcgcaacaccactgggttggatgcaggataattattcagaatcacgagttacctgtttgcaagcaatcacattgcaggtgggataaataagcagacagtctgtggtaggttcccccaccccaaccgcctcccctccccccagggatactgtaattttaagtattgttttggatattggtaattctaaagctccaatcttaactgggttttatgaaagccgttatagggtgtttattaccaaaaaaacctccttcttatttaataatacagtgcctagccactcctttttccctgcatccgtacatgaagcctgattgcagatctcgaacagtatatttctttgagctaaacagcaagaacagataaggtatcttatcaaaacccaccgccaggtggcgtggctcacacctataatcccagcaatttgggaagctgaggtgggaggattggttgaggtcaggagtttgaggccgcaatgagttatcgcgccactgcac

SEQ ID NO: 466276 - DNA, 960 bp, Homo sapiens
cccaagtggatgctactgccattaaggggcatttccttcaactcccacgtggaaaagggggcaaagtggaccctagtccactgtcactcacacacatgtacagatcccagggtccacacagatacagatcccaggcctccaccatgtccatctacgaagggctgtggcaagccatatacacaaagatgcctgtttcctgtcttctcggttaaaaacaaaaacaaaacaccggaaaaagccaagctgccatgggttgcagagtgccagcccttaagtagtgttgttcatgggggactggcagattattgcaaaaagggcacggggcagaaggactatgttgtgagcctgcgaaagaagtttgtgtggggactgtgggcagtgaacgcgttgggaacaatatggaaaactgggagctgccttggaatctacagggccgggtaagagaatgtccgaaagaaaaatgagcaggtgcgggatgtgcgcagagtcagagaagagtccagggcgcccggagtggctccaggaacgacggaaacccctcaaggcttttgggggcggctgaagaaaagaagaatggtattcacgcagttcccattttacagatgaaaacaagaggactttttctgtgaagtcaagaaagtggttacaatggtactttcagcctgtccgaattatgtattgcccctcccctttttattaataacattgaagtgtgatgggaaaaccactgaagccgtcagttgaaacctgctgggactttttagccattctcttcaacataaagaatgggtgtttttggagggggtgagaggaatggggaaatgttgtcaaagagtacagtgttttagttgagacaggaagaatatattttgttgagatctacagcacagcatggtgactgtagttaacaatgaagtattgtgtatttcaaaattgctaagacaataaatttcaaatgtt

SEQ ID NO: 466277 - DNA, 1173 bp, Homo sapiens
ggccaccaggccaggaggctgcagcaccagggaatctgtgctcacgtcttccaggacagtgcttcttctagaagctgacatggagctgaccacagctcttggaggcatggcctgaggcttagaaaatagacagagatcatctgagatttcagcagtggggccacgtggcagcgcccgaaggcctggagcaggagcgacccagggactcagagcagcatcttcttaggagacggaaggagagccgccggaggagcacggggcacctgcgatcgcgaagagcctcctgttctggatgggagcgaaggctccgagaggacctaaggttgctcagtgggccatggaaacggcagtgattggggtggtggtggtgctgttcgtggtgactgtggccatcacctgcgtcctctgctgcttcagctgtgactcaagggcccaggatcctcaggggggtcctggccgcagcttcacggtggccacgtttcgccaggaagcttctctcttcacggggcctgttcgccatgcccagccagtgccaagtgcccaggacttctggaccttcatgtgacgcccgagtccccaggatttgctccccagcccataaaagagacaaacactggcagagagatggtcccaggagagcagccgggaggaggcactggagttcagggctccagtcccagctctgctcatctggctcctatgacgagggttgtatccagtgtgtggacgtcccctctcctcaggctggaaaccctctgagccagagcctcatttttgcctcttttatatcttctgtttcccaggttgttttctttcatctcctcctttgtgttcacccatttgaaatcatctccattcaggagaaaacaagatggaacccagtgactggccaccatggacacatgcaagggagaaggagaagtccccagtaggaaaaggaatgtgtacaatgaaatgtaatgatgtataatacattggctgtttttgaattccaaccatggatttcccagctactggcagtgaaactgatcttttctgtgacacgcctgtccccctttgtcttctgccatgagtggaaacttcctgaggcctcaccagaagctgagcagatgctggtaccaaacttgtacagcctgtagaaccacaaggcaaataaatctctttttgaaaata

SEQ ID NO: 466278 - DNA, 442 bp, Homo sapiens
cctgcattgatatgatcttgtgatttattattattattattattttttgagacagagcaagactccgtctcagacaaacagacaaacaaacaaaaaaagtgttgtcttccaactcgccttgtttgttatggtctgaatgttaatgttcccccaaattcatgtgttgaaatcttaactcccaaggtgatggtataagaattgtggtctttgggaggtttaggaggattaggtcatgagagcagagccctcacgattgagattagtgcccttatgaaagagcctgagagagaccccttgccccttctgctatgtgagaacacagcaagaagcgccctctatgaggaacaggccctcaccagacactgatgctgctggagttttgatcttggacttcccagcctccaaaactgtgagaaataaacttctgttgtttgtaagtcac

SEQ ID NO: 466279 - DNA, 6561 bp, Homo sapiens
gagtccggcgggcggctcctcggggttgggcgaccgagcggggccggccgggcggggggcgggcccgtgaaggcggcgcagcgcggcgcgggaggcgtgctgggcgcggggctgcggtgcccagaggctgcggcattaggggctcggcgcccccgaccttccgcgtcccggggtggcggcggcggcggcggcggcggcgcgggcggcatatgatgctgagctggctgctccagaatgaaccacagctctgagaaggggaagtagaaacagctggcgccctgccatggcctgtgaaccacaggtggacccgggggccactggcccattgcccccctcctcccctggctggagtgccctgcctggagggagccctcctggctgggggcaaggagcctcctccctctggccttaattctgcctcctgggggcttcccagtcaaatccagtccttctctcaagaggatttgaggatggccaccgtgtccctccttgttgcgaggaggttctcatggccagaggtgtgatgccgccaggcttcgggctcaccccacgagcctggtatggttatcactcagccagatgaagcttctggtctgcttccagagctccacaatggccaggtcctcactgttctccggattgacaatacctgtgcacccatctccttcgacctgggagccgcagaagagcaactgcaaacttggggcatccaggtcccggctgaccagtacaggagcttggctgagagtgccctcttggagccccaagtgagaagatatatcatctacaactcgaggcctatgcggctggcctttgctgtggttttctatgtggtggtgtgggccaatatctactctaccagtcagatgtttgccttggggaaccactgggctggcatgctgctcgtgaccctggccgcggtgagcctgaccttgactcttgtgctggtctttgaaagacaccagaagaaggccaacaccaacacggacctgaggctggcagctgccaatggagccctcctgagacaccgggtgctgctgggggtgacagacacagtggaaggatgccagagtgtgattcagctttggtttgtctacttcgacctggagaactgtgtgcagtttttgtctgatcatgttcaagaaatgaagactagccaagagtccttgctgagaagcagattgagccagttgtgtgttgtcatggagactggggtgagccctgcaacagcggaggggcctgagaacttggaggatgctcctctcctgcccggcaattcttgtcctaacgagaggccactcatgcagactgagcttcatcagcttgttcctgaggctgagccggaggaaatggcccgccagctgctggcagtgtttggcggctactacatccggcttctagtgacctcccagctccctcaggcaatggggacacgacacacgaactctccgagaattccatgcccctgccagctcatagaagcctacatcctaggcacagggtgctgcccgttcctggcgaggtgacctagggatgaaggtactcatcttccttcaagactgagcagtcaggaaggcttcaggagcccaagatggccaatggggagccccaggtgaggagagaagcatctgggggcactccaaaaggggcctgtgatgtcagccactggggtgttgtgctcacttcagggcccagcacaaaaatccttgtttgacatctcatgctgaccccctggcctttgcagaagctgatggttacagagctagtcccaccaaagctactctctctgctgcttagaactgtggacacgtatggaaagactggacccccattgctttcattgttcagagaacccaggagacatgaagatgaccagactgggcaaattatgtgtccaaaacttggcctcagatgatgtttccatctccaaccccttcatgccagatggggaaactgaggctcagagaggatactgctctatgtggcattgccttgaacccctaaaattatcagacttcctttttccaatataaagaaaaaaagtaagttttcagaattctctcaatttttaagtttttctcccccatattttgtgaaaagcagtggtatgtgtacgtgttgtctaccagtacacaggctgcagaagacagagacagaagaaagagatcaagggcagataactgttgataggaatatttgagaaagattgatcctgtttgacttgaggacttattttgttcacaggcatgcacgcttgtggttgtggttttatattacagatgtagaacaatggttatgtttcccgacatgaacattgtcctggaatgaagtgtgatcagccacttgtggaattctttgaagagctcagaggcttccaagtgatctgctcctgaacaagtttgaagacctattgtttcatagacccaagaccaaacgcatctaaaggatccccagcccccaagacctagcctttgtctgcgattttggcttcatctcccacaaaacccctttatgagttcacgctctttcctggactgacatacctattcctttccatttgttggactcctattcatgcttcaaagtccagctttcttaagcccttctttaggaagccttcccacacagccaaccctgctgctctctgcctcctttaaattcttgatacagctgctgcttgttctgatgttttatggtattgattctgttttcctgtgtatatgccagtttttctagctagactgtaaactccttaaggacagagactacaccttgtactttttgtgcatgacctggacctgctaaggaaaaaaaaatcttgtggattgattgctttgccatccccacagcagcttttgcaaattgctttccaaactcacttgaatgatgacattgctgtggacctgggttctggacctgatctgccacttcaagctgtgtaatttttggcaagttgctttctttgcctggtcctcagtttgcccatcaatataatgggtggattggatgatttttttttttttaattgagatggagtcttgcactgtcacccaggctggagtgcagtggcgcgatcttggctcactgcaacccccgccacctaggttcaagtgattctcatgcctcagcctcccaagtagctgggactacaggtgtgcaccactactcctggatatttttttgtgtttttagtagagatggggtttcgccatgttggccaagctggtcttgaactcctgacctcaggtgatccacccgcctcgggctcccaaagtgctgggattacagacgtgaggcaccacaaccagcctggatgattcttaagggcccttctaggaccaaagttctgggaatttctagcttattctgccccctcatagcccttggcctatctatctttatccacatgcagaaacatctggcaaccccacatggctgagatgacctggtcctaggacacccttggacagaagactggcctacctagcagacctggatttttcttcctgatctgctgcttccaagttgtgtgaccttggctaagtcacttaacctttctgattgtcatttcgctttttaataaagtgggtctggtgaacaagaaatgtaataaacacgtggcttgccattcaagagatgagtctgaccattcactttctgtgtgccagagaagagagatcatgggtatagaccagcccctggaaaggctgctttggtcaaggctgagagcagctttgctcaaggaaattattcacgaaggtgaccactgtctttctgacctggcacagaggaaatgttggctgtgaatgtgaccaatagaaagaagcccgtatttctcagtcagtcctagaaccccggtaagtaattaacagagaataaaaatgtgtttgttaaatgacaaagcagcagtttttcaattgtaaggtctgcttgagagcctttgatgtgtgtttcttttcctgacttttcctttctttagaatttttgatggtctcacctggtgggtggggctttcagggtatgcccacaatgtacatttctcggcatctgtgcctcagtttcctcatttataaaatccctatgatctctgtctcacctactttacagggttgctgtgaagatcgcatactacacacaggaatgctcatcagtttttaaattttatttaatttttatttatttttttttaaatgtaattttttcagagagataaggtcttgctatgttacccagcctagtcttgaactcctggcctcaagtgatcctcctgccttggcctcccatgctgctgggattacaggtgtgaactaccatgcccagccagctcctaagtcttaaggctctgtgttagtgatagatgtggccatggtgtaggcagtgcaatgtcttcgagtgagagtgaaggtggtaactcattgcatggattctagagttctgtttattctaatccaagttcttccacttaaaaacaatgttcttcctctcattgagtctcattcctcatctataggatgggaataagagcatgtacctggcaggttgttgtaaggattaaatggtgtaaaaaaatgtcaagtgcttgcaactttgaataccaaacttgagtgaaagctcaataaattgttacttaaaaaattttttgtctcgcatattgtagatacctgatgtatatttttgttgatctagcaggtcattaaccgttaaggttattcagtctgcctcagacctcagctatttcagtgccatggggtatatttatgtcaataaagattttagtcaaatctctggaattcagcatccagagataatatagcaaggagataaagagcaagctggtgactttgggccagatactcactcttactgtactttctgtacctaatttcctcatgtattaaggggggagtgtgataataagggggattaacgggagtgattgatgtgaagcacaaagcctggtccacagtaagggctcagtcagtgggggcgtttcttctgcagctgctggctgctgttggctcctagtttatgttatcctatgttatcttatagttgagtgtttttacacttaggtctgtgattcattttgagttagtttttctgaaggttgtaaggtctccatctggattaattttttgcatattgttccagcaccatctgttgaaaagactctctttgctccattgtattgcctttgctttttttttttttttttcaaggatcagttgactatacttatgtgggtctatttctgggctctctatttgttccattgatctatgtgtctgttctttcccaataacacactgtcttgattactgtagctttatagtaagtcttgaaattgggtagtgtgagtcctccaacttagttcttctctcccaatgttgatttggctattgtgtgtcttatgcctttccatgtaaactttagaatcagtttgtcaatatccacaaactaactcactgtttattttgattgggattgcatcaaatccatagatcaagttgcaagaactgacattttcacaatattgatttctatccacaaacatagaatctgtcttcatttatttagttgttctttgatttcttttatcagttttgtaggggtttttcccttttcctacagtttttttttttttggtaatttttcttatagatcttgtacatattttgttagatttataagatttatacctaaatatcttatttttgggggtgctaataaaaatagtattgtgtatttagtttcaaatttcatttgttcattgctagttatgggaaagtgattgaattttatctactcacattgtatcctgcaaccttgctataatctcttattagttttaggagtttctttgttgattcttttgttgatgagataatcatctcacctgtaaacaaagacagttttatttcttccttcctcatctgtatatctgtatactttttatttccttttcttgtcctatttcattggcttggacttccagtatgatgttgaagagtagtggtaagagggaacattcttgccttgtttatgattgtagtgggagtttctagtgtctcactattttttgtttgtttgtttgagacagagtcttgctctgttgcccaggtggaggttgcagccagccaagatcatgccactgccctccaggctgggtgacagagcaagactccgtctcagacaaacagacaaacaaacaaaaaaagtgttgtcttccaactcgccttgtttgttatggtctgaatgttaatgttcccccaaattcatgtgttgaaatcttaactcccaaggtgatggtataagaattgtggtctttgggaggtttaggaggattaggtcatgagagcagagccctcacgattgagattagtgcccttatgaaagagcctgagagagaccccttgccccttctgctatgtgagaacacagcaagaagcgccctctatgaggaacaggccctcaccagacactgatgctgctggagttttgatcttggacttcccagcctccaaaactgtgagaaataaacttctgttgtttgtaagtcac

SEQ ID NO: 466280 - DNA, 1242 bp, Homo sapiens
ggaagtccgcgtgctttgataccctcagggggcacttacaggctaggtggacacagggctaggggtaagaatgcagcagtgaacatggttcctgcactcatgaagcaaatgtatccactgtggtacaaaagagactgtaaaaaacaaacccaaatggacaacagcagggttaaacattgcagaagaggtgccaccttggatagtgttatttgatggaggccaggatgatgcatctgtcttctctctgaagtgccttacaaaacattacgagcgagtaggtcatcaaaacaaaacacaaagcatgagttgcaaagggaaacatttagcttgcaattcttattacatctttattatcagtcaaggtcacagtcatattaaaaatatataatttaattctcaaataatgtctttgttctgcagctccccaagtgcagcagagcatgccccaaggtgctaggccccatgcgctgctctttatcccacaggaagaggcctcctctgccctgttcttacctcttttgactctcaactctgaatattggcttgtacagttctggaattttccgctcgatcattggcctgaggactggctggatgagtactggctgcagcaaatcaggctgccaggattctttatggctgtttctgcttccactacagctgagtcagaaaggtcgctgccccgtggtggcactagacgcagtggacctggcaagcaaatgtttccgctattagctctcagcaacagagactcatttatggtcaccttggaaatctgggcttatcgatctacagcccaacagagtggaggagaaaatacacagcacaaacaacgtgaaaaaatagttactctattcattaaaagctgtaacttccagattggacttgagaagcaattaagcaacagaggaacctcatctactatctgtattcaggcatgctcatgagaacacgctgctccagctggacttagaggaacccggtgcatcacaggcattcctgacagagtctcgtggtcctgctggtccactcagtggtactcagtcctcctcattctcggggataggttccaagacccccaggggatgcctgaaactgcggatggtaccgaaccctacatatattatgtttttttcctatacatacatacctatgataaagcttaatttacaaattagatagagtaagagattaacaacaattacagcaatatactgaaataaaagttatgtgaatgtggtc

SEQ ID NO: 466281 - DNA, 915 bp, Homo sapiens
ctaggttactttcttttgtaatcacaaaatgcattaggtatggatcagcatttcagcagagttctcttacatgctatatatgagccaaaataaagaaaatgtcccagatgaaaataaacttttctggaaaagatggtgacttaaagtcatattcagtagaacctgtgtacatattattattttccatacttcaaattgattgaccagtttatggagttgatagagtgctagatttaataggctttgttgacagacacttaggaaaagaataccaggcctgattgttcttcaaagaatcaagtaggaagcacaccataggttggtgagcctgacttcagggtgaggcagattctcacaacactttaataagacatgaggtcagaagaaaactggggaaagtctagtttgtcttgaggattcctcaaacatcaagttgagcctgaaatatgttgatgcaatgatcagatagcatttgagaaacccagaaactgtgggcgttttaaaaaataaaacacaaagaactggatacctaaaagctgatcaacaaatgaagtgaaaaaatagaagagataaacttaagaagaaaaaagagtatatagatgacaataaattatgaactaagaggagaatattagctggcaaataaagaattctatctagaaggttactgctgcttttttagctttgaagagtttattataattggtagaactaatataatttattataattggtagaaagtaatgtgttctttgcttagcattgccaaaaaatccataaacacaattggttctcttccctgccttaaaaacttatttatgtatatatatttatgtatatttatagtaatgtgtatgtgtatatatgtgaatatatgtgtgtatatatatgaatagagtaaatatatttgagttc

SEQ ID NO: 466282 - DNA, 548 bp, Homo sapiens
tcttacagggccagcaacataggtaattttatggtgcaattcagctaccagaccattttcatgagcttgtttgctggagtgggtatcattaagatgatttctaaataagggcacaatgtgagaggaagtgtgttgggatgtggtttgttatctggggcaaaaggtgggtggtgagagttcatttgctgatgtaaggaagtgcagagttttttaatagctgcctttgttttgctcacctccgactcacctcctatattctcttgctggaatgtagctataaaaattgattttttttctttttcttttttttttttttttttagcccaaaatttcaattgctgcaaccttgacaattcagcttcttaggggcttcctcgtgtccccagaagattctcttcaaattggccccaggtcaagggagcttcctcaccatcacggggggcagggggcatcccttttccagtttgcaattgctttttttccaaccagctattgcttggaccaccagaccgacctttggcttcccgaggggtcccgagctcgaatcc

SEQ ID NO: 466283 - DNA, 5836 bp, Homo sapiens
agcgataaaaccaaggtcctgaattccctggatgctctctgctgagggttgatgagtgtcaccagacttcgacctggagcggaaacagctcacttgaattctccgcagaatggaaatagtcgtcacccatctggctatgttccagggaaggttgtcccattgcgtccccctcctcctccaaagagtcaagcttcagccaaatttacctccatcagacgagaagaccgggcaaccttcgcattctcacctgaagaacagcaagcccagagagaaagtcaaaagcaaaagagacacaaaaatactttcatttgttttgctattactagtttctcattttttattgcacttgcaatcattttaggaatatcctcaaaatatgctccagatgaaaattgcccagatcaaaatcctcgtctcaggaattgggatccaggacaagattctgcaaagcaagttgttatcaaggagggagatatgctccgtctgacctcagacgccaccgtgcattctatagtcattcaggatggaggactgcttgtatttggggacaataaagatggatccagaaatattactttgaggactcattacatcctgatccaggatggtggggcgcttcatattggagcagaaaaatgccgctataaatccaaagcgacaattaccttgtatggcaagtcagatgaaggtgaaagtatgccaacatttggcaaaaagtttattggtgtggaagctggcgggacactggagttacatggggcacggaaggcatcgtggacgttgttggcaaggaccctgaattcctcaggcttgccctttgggtcctatacctttgaaaaggacttttcccggggcctcaatgtgagggtcattgaccaagacacggccaaaattttggaaagtgagagatttgatacccatgaataccgcaatgagagcaggcggcttcaggagtttctgagattccaggatccaggtcggattgttgccatagctgtcggggattcagccgctaaaagtctcttacaaggaaccatccagatgatccaggaacggttgggaagtgaactgatccaaggactgggctacaggcaagcttgggctttagttggtgtcattgatggtggaagcacttcttgcaatgaatccgtgagaaactatgaaaatcatagcagtggcgggaaggctcttgcccaaagagaattttatactgtggatggccagaagttctctgtgacagcttatagtgaatggattgaaggcgtttctctttcaggattccgggtagaggttgtagatggagtgaagctaaatttgctagatgatgttagtagttggaaacctggagaccagattgtggtcgcaagcacagactattccatgtaccaagcagaggagttcactcttcttccctgttctgaatgcagccattttcaggtcaaagtcaaagaaacccctcagttcctgcacatgggtgagatcatagacggtgtagacatgagagctgaggttggaattcttacccggaatattgtgatccaaggagaagtggaggactcatgctacgcagaaaatcagtgccaattttttgattatgatacctttgggggacacattatgataatgaaaaattttacttcagtccatctttcttatgtggaattgaaacacatgggtcagcagcagatggggcgataccctgttcattttcacctgtgtggtgacgtggattataaaggaggatacagacatgcaacatttgtggacggcctgtctattcatcacagcttctcaaggtgcatcactgtgcatgggacaaatggcttgctaataaaagacaccattgggtttgacacactaggtcattgtttctttttggaagatggtattgaacagaggaatactttgttccacaatctgggactcctcaccaagccgggtactctcctgcccaccgataggaacaactccatgtgtaccaccatgcgagataaagtgtttggaaattacattcctgtgcctgctactgactgtatggctgtttcaactttctggattgctcatcccaacaataatctgattaataatgcagctgcaggctcacaggatgctggaatatggtatttattccacaaggaaccaactggggaatccagtggattgcagctcttggcaaaaccagaactcactccattgggtatattttataacaacagggtccattcaaattttaaggctggcttatttattgacaaaggtgtcaaaacaaccaactctagtgctgctgacccaagggaatacctctgtttggacaatagtgcaagatttcgacctcatcaggatgcaaaccccgaaaaaccacgtgttgctgctctaattgacaggctcattgcttttaaaaataatgataatggagcttgggtcagaggaggagatattatcgttcaaaattcagcatttgcagataatggaataggactgacctttgccagtgatggaagcttcccaagtgatgaaggttccagccaagaggtatctgaatctctctttgttggggagagcaggaattacggctttcagggtggtcagaacaagtatgtaggcactggaggaatagaccagaagcctcgaacattacccaggaacaggacgttcccaattagaggctttcagatttatgatgggcccattcatctcacaaggagcactttcaaaaaatatgtgccaactccagataggtacagcagtgcaattggcttcctcatgaagaattcctggcagataacccccaggaataatatctccctcgtgaagtttggtccacatgtctctctgaatgtcttttttggaaagcctggtccctggtttgaagattgtgagatggatggtgataagaactccatattccatgacattgatggctctgtgacaggatacaaggatgcttatgtgggaagaatggacaactacctgatccgccatccaagctgtgtaaatgtgtctaagtggaatgcagtgatctgcagtgggacctatgcacaggtctatgtacagacatggagcactcagaatctttctatgaccattacacgagatgagtatccgtccaaccctatggtgctccgaggtattaatcagaaggctgcctttccacagtaccagcctgtcgtcatgctggagaagggttataccatccactggaatgggccggcaccacggactacatttctatacctcgtcaacttcaacaagaatgactggattcgagttggcctttgctatccatcaaacacaagttttcaagttacctttggctatttgcagcggcagaatggctcattatccaaaatcgaagaatatgagcctgtgcattcactggaagaactgcaaagaaagcaatccgagaggaaattctattttgactccagcacggggttactgtttttgtatctcaaagccaaaagccacaggcatggccacagttactgttcatctcagggatgtgaaagagtcaagatccaagcagccacagactcaaaggacatcagtaactgcatggccaaagcatacccacagtactacagaaagccgtcagtggtcaagcggatgccggccatgctcactggactctgtcaaggctgtggcactcggcaggtggtgtttactagtgatcctcataaaagttacctccctgtgcaattccagtcacctgataaagcagaaacccagcgtggagacccgtctgttatttctgtcaatggcactgactttaccttccgaagtgcaggcgtcctcctccttgttgtggatccgtgcagcgttccattccgcttgacggaaaaaacggtttttcctcttgctgatgtcagtcgcattgaagagtatttaaaaacaggcatccctccaaggtccattgttctgttgagcacaagaggagaaataaagcagttaaacatttcacacttactagtacctctgggattagccaaaccagctcatctttatgacaaagggagtaccatatttttgggattcagtggaaactttaaaccatcatggactaagctatttaccagtcctgctggacagggccttggggtgcttgaacaattcatacctttgcagctggacgaatatggttgtcccagagccaccactgtccgcagaagagacctggaactgctaaagcaagcttcaaaagcacattagagactaactgtaacttaagtgctgggggaaaaaaaatgtgaactaacttatttaatttatggcattttaaaatgacactgttaacccaacggaaccattttccagtttgatacagaatggggagaaaagaaagcgtttgaaattattgcttggataccagcttcatgcaccttctagttgtacaaaatgttaaagacgttgtttgtatttgtaaggctggtgtattcagagagcagatctcttattcctcactttccacccccgtattttgtaatgaccatgagcaatgtttttactttttgtataatggggtggggtggagtgggggcttctgagagtcagcctgaggtctttagaggaccagctattgtagcaccttggatacttgaagtttaatgctcagttgggtcgggtggcagttgacttggtggctggcatgttcagcagtgcctggggccctgtttctgggcagcctttgaggattttctatgatattgaatgacagttttaagtggcaactcaggcccagctcatgcccttttttgcctggacatgtgctatttttattcacttatatatcaattacttgtaagggttaaactttcaaacaggaagtatattgggacaaaagggctcttggggattagatatccctttaatctgtgaccattgggcaaaaaattttcctgcagcaaaagtctgaggctgttgggaccatttttgcagctttaatccttagcctcttttgactgtatatttgtgtttaaaatgcagagctcaactgaatatttccttttttgttttgttttgttttgttttaagaagtaggttgttttcctgaaccgtaaacttgtatcattttaacttgcacaaaggaagtctgttcttggtattgctcttgcacttgggttttttgttattgttttgtgtggattttttaaagcttttctgttcaccctcctgccaggaaaatcccagaaagcttaatgataccccaaaatgattacacccagggaggaaaaaaaggagcgctttctagggtcagaatcgtggagagaatactcagaaatgaacctctttaaagccttgcaggaatgagtcactcttacttaatgaaatgttaaagccaattaaaaagcatgctgtgatgcccagcttccctttccacagggtgcatgcgtctcctgctggtgaatcacatgcggcaagaggcaactggctccacagcctgggatgctgccgtaccaagaggaaagaagcagcaaaatgcctttacgttgttctaaacccccgacgcataaagtgtagaggagggatggccaagggtgggtggtagaaagtgtgttcaggctgacactggcaatgagtacagataatttcactttcctcttccaggggcaaaggctgatggcctctacctttgtatccaggagaaactgcagagcagccctgtgactttacaaaatatgctacctcaaagtgctaccgataaacctttctaattgtaagtgcccttactaagggcacatgtcttaatcaaagttagttttttgttttctggtttgtttttttttttttgtatattgatgaatgagatcttacctattaaatatattattggattatg

SEQ ID NO: 466284 - DNA, 2933 bp, Homo sapiens
ggctgctgctcacttagtctggcacagatcacagaatctcccttttcaaagttgagacacttgactttgtgctgaaaatgtctttttagctgtttaaattttcattctcttccctttacttcttgattattttttcaaggtctatgtacagacatggagcactcagaatctttctatgaccattacacgagatgagtatccgtccaaccctatggtgctccgaggtattaatcagaaggctgcctttccacagtaccagcctgtcgtcatgctggagaagggttataccatccactggaatgggccggcaccacggactacatttctatacctcgtcaacttcaacaagaatgactggattcgagttggcctttgctatccatcaaacacaagttttcaagttacctttggctatttgcagcggcagaatggctcattatccaaaatcgaagaatatgagcctgtgcattcactggaagaactgcaaagaaagcaatccgagaggaaattctattttgactccagcacggggttactgtttttgtatctcaaagccaaaagccacaggcatggccacagttactgttcatctcagggatgtgaaagagtcaagatccaagcagccacagactcaaaggacatcagtaactgcatggccaaagcatacccacagtactacagaaagccgtcagtggtcaagcggatgccggccatgctcactggactctgtcaaggctgtggcactcggcaggtggtgtttactagtgatcctcataaaagttacctccctgtgcaattccagtcacctgataaagcagaaacccagcgtggagacccgtctgttatttctgtcaatggcactgactttaccttccgaagtgcaggcgtcctcctccttgttgtggatccgtgcagcgttccattccgcttgacggaaaaaacggtttttcctcttgctgatgtcagtcgcattgaagagtatttaaaaacaggcatccctccaaggtccattgttctgttgagcacaagaggagaaataaagcagttaaacatttcacacttactagtacctctgggattagccaaaccagctcatctttatgacaaagggagtaccatatttttgggattcagtggaaactttaaaccatcatggactaagctatttaccagtcctgctggacagggccttggggtgcttgaacaattcatacctttgcagctggacgaatatggttgtcccagagccaccactgtccgcagaagagacctggaactgctaaagcaagcttcaaaagcacattagagactaactgtaacttaagtgctgggggaaaaaaaatgtgaactaacttatttaatttatggcattttaaaatgacactgttaacccaacggaaccattttccagtttgatacagaatggggagaaaagaaagcgtttgaaattattgcttggataccagcttcatgcaccttctagttgtacaaaatgttaaagacgttgtttgtatttgtaaggctggtgtattcagagagcagatctcttattcctcactttccacccccgtattttgtaatgaccatgagcaatgtttttactttttgtataatggggtggggtggagtgggggcttctgagagtcagcctgaggtctttagaggaccagctattgtagcaccttggatacttgaagtttaatgctcagttgggtcgggtggcagttgacttggtggctggcatgttcagcagtgcctggggccctgtttctgggcagcctttgaggattttctatgatattgaatgacagttttaagtggcaactcaggcccagctcatgcccttttttgcctggacatgtgctatttttattcacttatatatcaattacttgtaagggttaaactttcaaacaggaagtatattgggacaaaagggctcttggggattagatatccctttaatctgtgaccattgggcaaaaaattttcctgcagcaaaagtctgaggctgttgggaccatttttgcagctttaatccttagcctcttttgactgtatatttgtgtttaaaatgcagagctcaactgaatatttccttttttgttttgttttgttttgttttaagaagtaggttgttttcctgaaccgtaaacttgtatcattttaacttgcacaaaggaagtctgttcttggtattgctcttgcacttgggttttttgttattgttttgtgtggattttttaaagcttttctgttcaccctcctgccaggaaaatcccagaaagcttaatgataccccaaaatgattacacccagggaggaaaaaaaggagcgctttctagggtcagaatcgtggagagaatactcagaaatgaacctctttaaagccttgcaggaatgagtcactcttacttaatgaaatgttaaagccaattaaaaagcatgctgtgatgcccagcttccctttccacagggtgcatgcgtctcctgctggtgaatcacatgcggcaagaggcaactggctccacagcctgggatgctgccgtaccaagaggaaagaagcagcaaaatgcctttacgttgttctaaacccccgacgcataaagtgtagaggagggatggccaagggtgggtggtagaaagtgtgttcaggctgacactggcaatgagtacagataatttcactttcctcttccaggggcaaaggctgatggcctctacctttgtatccaggagaaactgcagagcagccctgtgactttacaaaatatgctacctcaaagtgctaccgataaacctttctaattgtaagtgcccttactaagggcacatgtcttaatcaaagttagttttttgttttctggtttgtttttttttttttgtatattgatgaatgagatcttacctattaaatatattattggattatg

SEQ ID NO: 466285 - DNA, 3382 bp, Homo sapiens
  misc_feature (36)..(36): n is a, c, g, or t
  misc_feature (93)..(93): n is a, c, g, or t
aatgccactctttattgggggctgaacaccctcaanttaagaaaaccacccgcttttgggttttgtttaaataaaagcagctgacgccgaatnccgggatatgcgaccacgctcggatacgtttcaggtggtcagaacaagtatgtaggcactggaggaatagaccagaagcctcgaacattacccaggaacaggacgttcccaattagaggctttcagatttatgatgggcccattcatctcacaaggagcactttcaaaaaatatgtgccaactccagataggtacagcagtgcaattggcttcctcatgaagaattcctggcagataacccccaggaataatatctccctcgtgaagtttggtccacatgtctctctgaatgtcttttttggaaagcctggtccctggtttgaagattgtgagatggatggtgataagaactccatattccatgacattgatggctctgtgacaggatacaaggatgcttatgtgggaagaatggacaactacctgatccgccatccaagctgtgtaaatgtgtctaagtggaatgcagtgatctgcagtgggacctatgcacaggtctatgtacagacatggagcactcagaatctttctatgaccattacacgagatgagtatccgtccaaccctatggtgctccgaggtattaatcagaaggctgcctttccacagtaccagcctgtcgtcatgctggagaagggttataccatccactggaatgggccggcaccacggactacatttctatacctcgtcaacttcaacaagaatgactggattcgagttggcctttgctatccatcaaacacaagttttcaagttacctttggctatttgcagcggcagaatggctcattatccaaaatcgaagaatatgagcctgtgcattcactggaagaactgcaaagaaagcaatccgagaggaaattctattttgactccagcacggggttactgtttttgtatctcaaagccaaaagccacaggcatggccacagttactgttcatctcagggatgtgaaagagtcaagatccaagcagccacagactcaaaggacatcagtaactgcatggccaaagcatacccacagtactacagaaagccgtcagtggtcaagcggatgccggccatgctcactggactctgtcaaggctgtggcactcggcaggtggtgtttactagtgatcctcataaaagttacctccctgtgcaattccagtcacctgataaagcagaaacccagcgtggagacccgtctgttatttctgtcaatggcactgactttaccttccgaagtgcaggcgtcctcctccttgttgtggatccgtgcagcgttccattccgcttgacggaaaaaacggtttttcctcttgctgatgtcagtcgcattgaagagtatttaaaaacaggcatccctccaaggtccattgttctgttgagcacaagaggagaaataaagcagttaaacatttcacacttactagtacctctgggattagccaaaccagctcatctttatgacaaagggagtaccatatttttgggattcagtggaaactttaaaccatcatggactaagctatttaccagtcctgctggacagggccttggggtgcttgaacaattcatacctttgcagctggacgaatatggttgtcccagagccaccactgtccgcagaagagacctggaactgctaaagcaagcttcaaaagcacattagagactaactgtaacttaagtgctgggggaaaaaaaatgtgaactaacttatttaatttatggcattttaaaatgacactgttaacccaacggaaccattttccagtttgatacagaatggggagaaaagaaagcgtttgaaattattgcttggataccagcttcatgcaccttctagttgtacaaaatgttaaagacgttgtttgtatttgtaaggctggtgtattcagagagcagatctcttattcctcactttccacccccgtattttgtaatgaccatgagcaatgtttttactttttgtataatggggtggggtggagtgggggcttctgagagtcagcctgaggtctttagaggaccagctattgtagcaccttggatacttgaagtttaatgctcagttgggtcgggtggcagttgacttggtggctggcatgttcagcagtgcctggggccctgtttctgggcagcctttgaggattttctatgatattgaatgacagttttaagtggcaactcaggcccagctcatgcccttttttgcctggacatgtgctatttttattcacttatatatcaattacttgtaagggttaaactttcaaacaggaagtatattgggacaaaagggctcttggggattagatatccctttaatctgtgaccattgggcaaaaaattttcctgcagcaaaagtctgaggctgttgggaccatttttgcagctttaatccttagcctcttttgactgtatatttgtgtttaaaatgcagagctcaactgaatatttccttttttgttttgttttgttttgttttaagaagtaggttgttttcctgaaccgtaaacttgtatcattttaacttgcacaaaggaagtctgttcttggtattgctcttgcacttgggttttttgttattgttttgtgtggattttttaaagcttttctgttcaccctcctgccaggaaaatcccagaaagcttaatgataccccaaaatgattacacccagggaggaaaaaaaggagcgctttctagggtcagaatcgtggagagaatactcagaaatgaacctctttaaagccttgcaggaatgagtcactcttacttaatgaaatgttaaagccaattaaaaagcatgctgtgatgcccagcttccctttccacagggtgcatgcgtctcctgctggtgaatcacatgcggcaagaggcaactggctccacagcctgggatgctgccgtaccaagaggaaagaagcagcaaaatgcctttacgttgttctaaacccccgacgcataaagtgtagaggagggatggccaagggtgggtggtagaaagtgtgttcaggctgacactggcaatgagtacagataatttcactttcctcttccaggggcaaaggctgatggcctctacctttgtatccaggagaaactgcagagcagccctgtgactttacaaaatatgctacctcaaagtgctaccgataaacctttctaattgtaagtgcccttactaagggcacatgtcttaatcaaagttagttttttgttttctggtttgtttttttttttttgtatattgatgaatgagatcttacctattaaatatattattggattatg

SEQ ID NO: 466286 - DNA, 1527 bp, Homo sapiens
ttttttttttccaataatatatttaataggtaagatctcattcatcaatatacaaaaaaaaaaaaacaaaccagaaaacaaaaaactaactttgattaagacatgtgcccttagtaagggcacttacaattagaaaggtttatcggtagcactttgaggtagcatattttgtaatgaccatgagcaatgtttttactttttgtataatggggtggggtggagtgggggcttctgagagtcagcctgaggtctttagaggaccagctattgtagcaccttggatacttgaagtttaatgctcagttgggtcgggtggcagttgacttggtggctggcatgttcagcagtgcctggggccctgtttctgggcagcctttgaggattttctatgatattgaatgacagttttaagtggcaactcaggcccagctcatgcccttttttgcctggacatgtgctatttttattcacttatatatcaattacttgtaagggttaaactttcaaacaggaagtatattgggacaaaagggctcttggggattagatatccctttaatctgtgaccattgggcaaaaaattttcctgcagcaaaagtctgaggctgttgggaccatttttgcagctttaatccttagcctcttttgactgtatatttgtgtttaaaatgcagagctcaactgaatatttccttttttgttttgttttgttttgttttaagaagtaggttgttttcctgaaccgtaaacttgtatcattttaacttgcacaaaggaagtctgttcttggtattgctcttgcacttgggttttttgttattgttttgtgtggattttttaaagcttttctgttcaccctcctgccaggaaaatcccagaaagcttaatgataccccaaaatgattacacccagggaggaaaaaaaggagcgctttctagggtcagaatcgtggagagaatactcagaaatgaacctctttaaagccttgcaggaatgagtcactcttacttaatgaaatgttaaagccaattaaaaagcatgctgtgatgcccagcttccctttccacagggtgcatgcgtctcctgctggtgaatcacatgcggcaagaggcaactggctccacagcctgggatgctgccgtaccaagaggaaagaagcagcaaaatgcctttacgttgttctaaacccccgacgcataaagtgtagaggagggatggccaagggtgggtggtagaaagtgtgttcaggctgacactggcaatgagtacagataatttcactttcctcttccaggggcaaaggctgatggcctctacctttgtatccaggagaaactgcagagcagccctgtgactttacaaaatatgctacctcaaagtgctaccgataaacctttctaattgtaagtgcccttactaagggcacatgtcttaatcaaagttagttttttgttttctggtttgtttttttttttttgtatattgatgaatgagatcttacctattaaatatattattggattatg

SEQ ID NO: 466287 - DNA, 3427 bp, Homo sapiens
agcgataaaaccaaggtcctgaattccctggatgctctctgctgagggttgatgagtgtcaccagacttcgacctggagcggaaacagctcacttgaattctccgcagaatggaaatagtcgtcacccatctggctatgttccagggaaggttgtcccattgcgtccccctcctcctccaaagagtcaagcttcagccaaatttacctccatcagacgagaagaccgggcaaccttcgcattctcacctgaagaacagcaagcccagagagaaagtcaaaagcaaaagagacacaaaaatactttcatttgttttgctattactagtttctcattttttattgcacttgcaatcattttaggaatatcctcaaaatatgctccagatgaaaattgcccagatcaaaatcctcgtctcaggaattgggatccaggacaagattctgcaaagcaagttgttatcaaggagggagatatgctccgtctgacctcagacgccaccgtgcattctatagtcattcaggatggaggactgcttgtatttggggacaataaagatggatccagaaatattactttgaggactcattacatcctgatccaggatggtggggcgcttcatattggagcagaaaaatgccgctataaatccaaagcgacaattaccttgtatggcaagtcagatgaaggtgaaagtatgccaacatttggcaaaaagtttattggtgtggaagctggcgggacactggagttacatggggcacggaaggcatcgtggacgttgttggcaaggaccctgaattcctcaggcttgccctttgggtcctatacctttgaaaaggacttttcccggggcctcaatgtgagggtcattgaccaagacacggccaaaattttggaaagtgagagatttgatacccatgaataccgcaatgagagcaggcggcttcaggagtttctgagattccaggatccaggtcggattgttgccatagctgtcggggattcagccgctaaaagtctcttacaaggaaccatccagatgatccaggaacggttgggaagtgaactgatccaaggactgggctacaggcaagcttgggctttagttggtgtcattgatggtggaagcacttcttgcaatgaatccgtgagaaactatgaaaatcatagcagtggcgggaaggctcttgcccaaagagaattttatactgtggatggccagaagttctctgtgacagcttatagtgaatggattgaaggcgtttctctttcaggattccgggtagaggttgtagatggagtgaagctaaatttgctagatgatgttagtagttggaaacctggagaccagattgtggtcgcaagcacagactattccatgtaccaagcagaggagttcactcttcttccctgttctgaatgcagccattttcaggtcaaagtcaaagaaacccctcagttcctgcacatgggtgagatcatagacggtgtagacatgagagctgaggttggaattcttacccggaatattgtgatccaaggagaagtggaggactcatgctacgcagaaaatcagtgccaattttttgattatgatacctttgggggacacattatgataatgaaaaattttacttcagtccatctttcttatgtggaattgaaacacatgggtcagcagcagatggggcgataccctgttcattttcacctgtgtggtgacgtggattataaaggaggatacagacatgcaacatttgtggacggcctgtctattcatcacagcttctcaaggtgcatcactgtgcatgggacaaatggcttgctaataaaagacaccattgggtttgacacactaggtcattgtttctttttggaagatggtattgaacagaggaatactttgttccacaatctgggactcctcaccaagccgggtactctcctgcccaccgataggaacaactccatgtgtaccaccatgcgagataaagtgtttggaaattacattcctgtgcctgctactgactgtatggctgtttcaactttctggattgctcatcccaacaataatctgattaataatgcagctgcaggctcacaggatgctggaatatggtatttattccacaaggaaccaactggggaatccagtggattgcagctcttggcaaaaccagaactcactccattgggtatattttataacaacagggtccattcaaattttaaggctggcttatttattgacaaaggtgtcaaaacaaccaactctagtgctgctgacccaagggaatacctctgtttggacaatagtgcaagatttcgacctcatcaggatgcaaaccccgaaaaaccacgtgttgctgctctaattgacaggctcattgcttttaaaaataatgataatggagcttgggtcagaggaggagatattatcgttcaaaattcagcatttgcagataatggaataggactgacctttgccagtgatggaagcttcccaagtgatgaaggttccagccaagaggtatctgaatctctctttgttggggagagcaggaattacggctttcagggtggtcagaacaagtatgtaggcactggaggaatagaccagaagcctcgaacattacccaggaacaggacgttcccaattagaggctttcagatttatgatgggcccattcatctcacaaggagcactttcaaaaaatatgtgccaactccagataggtacagcagtgcaattggcttcctcatgaagaattcctggcagataacccccaggaataatatctccctcgtgaagtttggtccacatgtctctctgaatgtcttttttggaaagcctggtccctggtttgaagattgtgagatggatggtgataagaactccatattccatgacattgatggctctgtgacaggatacaaggatgcttatgtgggaagaatggacaactacctgatccgccatccaagctgtgtaaatgtgtctaagtggaatgcagtgatctgcagtgggacctatgcacaggtctatgtacagacatggagcactcagaatctttctatgaccattacacgagatgagtatccgtccaaccctatggtgctccgaggtattaatcagaaggctgcctttccacagtaccagcctgtcgtcatgctggagaagggttataccatccactggaatgggccggcaccacggactacatttctatacctcgtcaacttcaacaagtatgtttctgttactgttatttcaaatagttgagcaagtagtaatttagtggagaaaaagaataacttatgtctcctttgcagcaagcaaagaaagccaattttacatactttgcttctcttgtggggaggctgtatattttgtgttgatggaattaaagagattatacaaattg

SEQ ID NO: 466288 - DNA, 784 bp, Homo sapiens
acagaaaggcttttaagatactggtaatgctgtttcttgatctgcctctggttatgcagataggtttcgtttgcaaaaattcagtgtgtgtgttttatgacttaaatatctttacgtgtgttttttagagcttggttctttaaagatttggagaagatatgtaaattaccaaggcacttggtttttctgttttatatactaataatcagggcctaagttaaataaaaatatgtgtgcatgtattttatatatgtgtgtggattgcgttagaatcttgggttgaaacctagaaatctgcccttcaacctaactagtggaatgagtcagagaacctggaaatgatgtgtgacaaagatggcattaaaaatcagcatgtaaatgataaattattcaataaataatgtgagaaaaattggttttccatatggaaaaaaatgtgattagatccctacctcacaccgtgaaacaaaataaactccatctcacatgaaaagtatattcatcccagtagcccccaaagttttacctgattccagcatcaactttaaaatctaagtccaaagtatcatctaaatataattcaaatcagatataggtgagactgaagggaagggaaaagatgccataccgttttctgaaactctaaagataaaaatctttcatagaattgtagtgccggaggatctcagaaaacacctagttctagagtgtcatgtttacagattgaatgactagttaatgcaagtcacatgtgacaagccatggtcaagtgtgttattctttg

SEQ ID NO: 466289 - DNA, 466 bp, Homo sapiens
ctaggtgaacgtacgtaaatgatttggtttatgtatgcgttaccccttgtaagagcaacgtgtgaagcccatggtggtggggtggaagagtgggaattggatggaaaatcatctagacttttttctttttggagttctgcttttatctaatatttctattcagcagtcagttcagaaagatactcagtagaaagatactcatgctgaaggattgaaattggctctgactttctaaatttcacatacaggtccattgttctgttgagcacaagaggagaaataaagcagttaaacatttcacacttactagtacctctgggattagccaaaccagctcatctttatgacaaaggtttgtatttgtattatttcatgaagttcttacagggccagcaacataggtaattttatggtgcaattcagctaccagaccattttcatgagcttgtttgctggagtgggtatc

SEQ ID NO: 466290 - DNA, 552 bp, Homo sapiens
tcatttcacctttgtaccatcatttagtggcttgagaggtggttctctgcctaagcgcagacttgtcttttgttctcatggttggagatttggaaacgaagaccaaagtacctgaggttccgaataaaagatcttaactgagttgattctaggaagacaaagtcacctcttcagagaggcctccattctgtctaaaatagcatctttctccccacccaatctatgataatgttgtgtcttatggtctctatagcacttattttctgaaatgatcctttgtttttctgtttgtctttcccactacagcatatgtttcattcaatcaggtatcttgttttggctcctactgtatcctagaattttgcttagttcataccggatatttagctgtcttcataaaacaagtaagtgaagtgctgctaaggggacagcccatatgcattaaacaaaatcttgtatttccacaggacgttcccaattagaggctttcagatttatgatgggcccattcatctcacaaggagcactttcaaaaaatatgtgccaactcca

SEQ ID NO: 466291 - DNA, 391 bp, Homo sapiens
aaaaggacttttcccggggcctcaatgtgagggtcattgaccaagacacggccaaaattttggaaagtgagagatttgatacccatgaataccgcaatgagagcaggcggcttcaggagtttctgagattccaggatccaggtcggattgttgccatagctgtcggggattcagccgctaaaagtctcttacaaggaaccatccagatgatccaggaacggttgggaagtgaactgatccaaggactgggctacaggtaggcataccttcttcccagatccctatcagagtccgtgtctgtgtgagaggagagtgagggtggggaaaggagccacagccacagcatgactcaggcatcagaagggccactctaccatttgcatgtctggta

SEQ ID NO: 466292 - DNA, 731 bp, Homo sapiens
gaagtgataagctaaaatctattttcatgaatcattgtatatgttgttgtaagttgggattcatattcattccagtccattatttatatttttcaggctggcttatttattgacaaaggtgtcaaaacaaccaactctagtgctgctgacccaagggaatacctctgtttggacaatagtgcaaggtaaagctggctcttttaagtcacactcaagctatactttgccaaagcaaaactttctaactggagtttattgtgctctttctgtggtaatacatttaaaataaagttttagaagttcgtaaaagggtttttggaaaaccacttattctgttgtcccaggtcctgtgactggtcttttatcttattgaaatactaaagaggttgatgtttttctcctttttcattgctataaatagatgctagagagagttgcagaaagagaaagaaaaaagaggagatatgttgagaaagtttccaaatttggtgtgcagtatgattcattgaaaaataagttaaactaagatgtttagtctcatccttgaaaaaccaaaccatatagaatttattctttgtggtcaaaatgaatactgcatttaatatttcaaaaggaatgatcccaaatttgatgagcaacctggttctggttcagccctttgtagcctcagatttacatcatagccaggctctaggttactttcttttgtaatcacaaaatgcattaggtat

SEQ ID NO: 466293 - DNA, 6588 bp, Homo sapiens
agcgataaaaccaaggtcctgaattccctggatgctctctgctgagggttgatgagtgtcaccagacttcgacctggagcggaaacagctcacttgaattctccgcagaatggaaatagtcgtcacccatctggctatgttccagggaaggttgtcccattgcgtccccctcctcctccaaagagtcaagcttcagccaaatttacctccatcagacgagaagaccgggcaaccttcgcattctcacctgaagaacagcaagcccagagagaaagtcaaaagcaaaagagacacaaaaatactttcatttgttttgctattactagtttctcattttttattgcacttgcaatcattttaggaatatcctcaaaatatgctccagatgaaaattgcccagatcaaaatcctcgtctcaggaattgggatccaggacaagattctgcaaagcaagttgttatcaaggagggagatatgctccgtctgacctcagacgccaccgtgcattctatagtcattcaggatggaggactgcttgtatttggggacaataaagatggatccagaaatattactttgaggactcattacatcctgatccaggatggtggggcgcttcatattggagcagaaaaatgccgctataaatccaaagcgacaattaccttgtatggcaagtcagatgaaggtgaaagtatgccaacatttggcaaaaagtttattggtgtggaagctggcgggacactggagttacatggggcacggaaggcatcgtggacgttgttggcaaggaccctgaattcctcaggcttgccctttgggtcctatacctttgaaaaggacttttcccggggcctcaatgtgagggtcattgaccaagacacggccaaaattttggaaagtgagagatttgatacccatgaataccgcaatgagagcaggcggcttcaggagtttctgagattccaggatccaggtcggattgttgccatagctgtcggggattcagccgctaaaagtctcttacaaggaaccatccagatgatccaggaacggttgggaagtgaactgatccaaggactgggctacaggcaagcttgggctttagttggtgtcattgatggtggaagcacttcttgcaatgaatccgtgagaaactatgaaaatcatagcagtggcgggaaggctcttgcccaaagagaattttatactgtggatggccagaagttctctgtgacagcttatagtgaatggattgaaggcgtttctctttcaggattccgggtagaggttgtagatggagtgaagctaaatttgctagatgatgttagtagttggaaacctggagaccagattgtggtcgcaagcacagactattccatgtaccaagcagaggagttcactcttcttccctgttctgaatgcagccattttcaggtcaaagtcaaagaaacccctcagttcctgcacatgggtgagatcatagacggtgtagacatgagagctgaggttggaattcttacccggaatattgtgatccaaggagaagtggaggactcatgctacgcagaaaatcagtgccaattttttgattatgatacctttgggggacacattatgataatgaaaaattttacttcagtccatctttcttatgtggaattgaaacacatgggtcagcagcagatggggcgataccctgttcattttcacctgtgtggtgacgtggattataaaggaggatacagacatgcaacatttgtggacggcctgtctattcatcacagcttctcaaggtgcatcactgtgcatgggacaaatggcttgctaataaaagacaccattgggtttgacacactaggtcattgtttctttttggaagatggtattgaacagaggaatactttgttccacaatctgggactcctcaccaagccgggtactctcctgcccaccgataggaacaactccatgtgtaccaccatgcgagataaagtgtttggaaattacattcctgtgcctgctactgactgtatggctgtttcaactttctggattgctcatcccaacaataatctgattaataatgcagctgcaggctcacaggatgctggaatatggtatttattccacaaggaaccaactggggaatccagtggattgcagctcttggcaaaaccagaactcactccattgggtatattttataacaacagggtccattcaaattttaaggctggcttatttattgacaaaggtgtcaaaacaaccaactctagtgctgctgacccaagggaatacctctgtttggacaatagtgcaagatttcgacctcatcaggatgcaaaccccgaaaaaccacgtgttgctgctctaattgacaggctcattgcttttaaaaataatgataatggagcttgggtcagaggaggagatattatcgttcaaaattcagcatttgcagataatggaataggactgacctttgccagtgatggaagcttcccaagtgatgaaggttccagccaagaggtatctgaatctctctttgttggggagagcaggaattacggctttcagggtggtcagaacaagtatgtaggcactggaggaatagaccagaagcctcgaacattacccaggaacaggacgttcccaattagaggctttcagatttatgatgggcccattcatctcacaaggagcactttcaaaaaatatgtgccaactccagataggtacagcagtgcaattggcttcctcatgaagaattcctggcagataacccccaggaataatatctccctcgtgaagtttggtccacatgtctctctgaatgtcttttttggaaagcctggtccctggtttgaagattgtgagatggatggtgataagaactccatattccatgacattgatggctctgtgacaggatacaaggatgcttatgtgggaagaatggacaactacctgatccgccatccaagctgtgtaaatgtgtctaagtggaatgcagtgatctgcagtgggacctatgcacaggtctatgtacagacatggagcactcagaatctttctatgaccattacacgagatgagtatccgtccaaccctatggtgctccgaggtattaatcagaaggctgcctttccacagtaccagcctgtcgtcatgctggagaagggttataccatccactggaatgggccggcaccacggactacatttctatacctcgtcaacttcaacaagaatgactggattcgagttggcctttgctatccatcaaacacaagttttcaagttacctttggctatttgcagcggcagaatggctcattatccaaaatcgaagaatatgagcctgtgcattcactggaagaactgcaaagaaagcaatccgagaggaaattctattttgactccagcacggggttactgtttttgtatctcaaagccaaaagccacaggcatggccacagttactgttcatctcagggatgtgaaagagtcaagatccaagcagccacagactcaaaggacatcagtaactgcatggccaaagcatacccacagtactacagaaagccgtcagtggtcaagcggatgccggccatgctcactggactctgtcaaggctgtggcactcggcaggtggtgtttactagtgatcctcataaaagttacctccctgtgcaattccagtcacctgataaagcagaaacccagcgtggagacccgtctgttatttctgtcaatggcactgactttaccttccgaagtgcaggcgtcctcctccttgttgtggatccgtgcagcgttccattccgcttgacggaaaaaacggtttttcctcttgctgatgtcagtcgcattgaagagtatttaaaaacaggcatccctccaaggtccattgttctgttgagcacaagaggagaaataaagcagttaaacatttcacacttactagtacctctgggattagccaaaccagctcatctttatgacaaagggagtaccatatttttgggattcagtggaaactttaaaccatcatggactaagctatttaccagtcctgctggacagggccttggggtgcttgaacaattcatacctttgcagctggacgaatatggttgtcccagagccaccactgtccgcagaagagacctggaactgctaaagcaagcttcaaaagcacattagagactaactgtaacttaagtgctgggggaaaaaaaatgtgaactaacttatttaatttatggcattttaaaatgacactgttaacccaacggaaccattttccagtttgatacagaatggggagaaaagaaagcgtttgaaattattgcttggataccagcttcatgcaccttctagttgtacaaaatgttaaagacgttgtttgtatttgtaaggctggtgtattcagagagcagatctcttattcctcactttccacccccgtattttgtaatgaccatgagcaatgtttttactttttgtataatggggtggggtggagtgggggcttctgagagtcagcctgaggtctttagaggaccagctattgtagcaccttggatacttgaagtttaatgctcagttgggtcgggtggcagttgacttggtggctggcatgttcagcagtgcctggggccctgtttctgggcagcctttgaggattttctatgatattgaatgacagttttaagtggcaactcaggcccagctcatgcccttttttgcctggacatgtgctatttttattcacttatatatcaattacttgtaagggttaaactttcaaacaggaagtatattgggacaaaagggctcttggggattagatatccctttaatctgtgaccattgggcaaaaaattttcctgcagcaaaagtctgaggctgttgggaccatttttgcagctttaatccttagcctcttttgactgtatatttgtgtttaaaatgcagagctcaactgaatatttccttttttgttttgttttgttttgttttaagaagtaggttgttttcctgaaccgtaaacttgtatcattttaacttgcacaaaggaagtctgttcttggtattgctcttgcacttgggttttttgttattgttttgtgtggattttttaaagcttttctgttcaccctcctgccaggaaaatcccagaaagcttaatgataccccaaaatgattacacccagggaggaaaaaaaggagcgctttctagggtcagaatcgtggagagaatactcagaaatgaacctctttaaagccttgcaggaatgagtcactcttacttaatgaaatgttaaagccaattaaaaagcatgctgtgatgcccagcttccctttccacagggtgcatgcgtctcctgctggtgaatcacatgcggcaagaggcaactggctccacagcctgggatgctgccgtaccaagaggaaagaagcagcaaaatgcctttacgttgttctaaacccccgacgcataaagtgtagaggagggatggccaagggtgggtggtagaaagtgtgttcaggctgacactggcaatgagtacagataatttcactttcctcttccaggggcaaaggctgatggcctctacctttgtatccaggagaaactgcagagcagccctgtgactttacaaaatatgctacctcaaagtgctaccgataaacctttctaattgtaagtgcccttactaagggcacatgtcttaatcaaagttagttttttgttttctggtttgtttttttttttttgtatattgatgaatgagatcttacctattaaatatattattggattatggttcctgaaggtcattaaagtttgagtgtgtgtgtgtgtgtgtgtgtgtgtgtgtgtgtgttttatgacttaaatatctttacgtgtgttttttagagcttggttctttaaagatttggagaagatatgtaaattaccaaggcacttggtttttctgttttatatactaataatcagggcctaagttaaataaaaatatgtgtgcatgtattttatatatgtgtgtggattgcgttagaatcttgggttgaaacctagaaatctgcccttcaacctaactagtggaatgagtcagagaacctggaaatgatgtgtgacaaagatggcattaaaaatcagcatgtaaatgataaattattcaataaataatgtgagaaaaattggttttccatatggaaaaaaatgtgattagatccctacctcacaccgtgaaacaaaataaactccatctcacatgaaaagtatattcatcccagtagcccccaaagttttacctgattccagcatcaactttaaaatctaagtccaaagtatcatctaaatataattcaaatcagatataggtgagactgaagggaagggaaaagatgccataccgttttctgaaactctaaagataaaaatctttcatagaattgtagtgccggaggatctcagaaaacacctagttctagagtgtcatgtttacagattgaatgactagttaatgcaagtcacatgtgacaagccatggtcaagtgtgttattctttg

SEQ ID NO: 466294 - DNA, 3865 bp, Homo sapiens
aatcacacttgatcaagtttttttagaatcttgacttcctttggtttggaaggactgggtttgctgatagagattgaactgctacctggaagttagactttttcattcatcttggcagtgggaagataattcagaatgggtgggatggactgttcattttgcctggttttggccctaatatagaccgaaggaacccaggtccatctgctcttcataaatatcacaggaattgatttgagactttatcttggccttagccaaagaagtcacagttcctgtttttattatttcagttttatgccttaaccaaatgatttatgaatgagaacaacaaaaagaatgaaccacactaatttaccaaatcctaaactcaacacattatgtataaagtgttccaaggaatttttgagccaaaccaaatttcatccccccaaattacctatcgaactaattcaaaccagaaatcagctttgatatgttccacaacaatggaagcagggtatgacatatttcctaaagtgttactgcatttgacttaggacccttgaaggatagaaagaaaacagaaataactattcattttgtaatttatgttttaaggaaaagttactaattggaggaatatcccttttggccatgagctgatttgaggaattttgtaagtttttgagaataagtctaactacatggattggtttctgttttgtgcaggttactgtttttgtatctcaaagccaaaagccacaggcatggccacagttactgttcatctcagggatgtgaaagagtcaagatccaagcagccacagactcaaaggacatcagtaactgcatggccaaagcatacccacagtactacagaaagccgtcagtggtcaagcggatgccggccatgctcactggactctgtcaaggctgtggcactcggcaggtggtgtttactagtgatcctcataaaagttacctccctgtgcaattccagtcacctgataaagcagaaacccagcgtggagacccgtctgttatttctgtcaatggcactgactttaccttccgaagtgcaggcgtcctcctccttgttgtggatccgtgcagcgttccattccgcttgacggaaaaaacggtttttcctcttgctgatgtcagtcgcattgaagagtatttaaaaacaggcatccctccaaggtccattgttctgttgagcacaagaggagaaataaagcagttaaacatttcacacttactagtacctctgggattagccaaaccagctcatctttatgacaaagggagtaccatatttttgggattcagtggaaactttaaaccatcatggactaagctatttaccagtcctgctggacagggccttggggtgcttgaacaattcatacctttgcagctggacgaatatggttgtcccagagccaccactgtccgcagaagagacctggaactgctaaagcaagcttcaaaagcacattagagactaactgtaacttaagtgctgggggaaaaaaaatgtgaactaacttatttaatttatggcattttaaaatgacactgttaacccaacggaaccattttccagtttgatacagaatggggagaaaagaaagcgtttgaaattattgcttggataccagcttcatgcaccttctagttgtacaaaatgttaaagacgttgtttgtatttgtaaggctggtgtattcagagagcagatctcttattcctcactttccacccccgtattttgtaatgaccatgagcaatgtttttactttttgtataatggggtggggtggagtgggggcttctgagagtcagcctgaggtctttagaggaccagctattgtagcaccttggatacttgaagtttaatgctcagttgggtcgggtggcagttgacttggtggctggcatgttcagcagtgcctggggccctgtttctgggcagcctttgaggattttctatgatattgaatgacagttttaagtggcaactcaggcccagctcatgcccttttttgcctggacatgtgctatttttattcacttatatatcaattacttgtaagggttaaactttcaaacaggaagtatattgggacaaaagggctcttggggattagatatccctttaatctgtgaccattgggcaaaaaattttcctgcagcaaaagtctgaggctgttgggaccatttttgcagctttaatccttagcctcttttgactgtatatttgtgtttaaaatgcagagctcaactgaatatttccttttttgttttgttttgttttgttttaagaagtaggttgttttcctgaaccgtaaacttgtatcattttaacttgcacaaaggaagtctgttcttggtattgctcttgcacttgggttttttgttattgttttgtgtggattttttaaagcttttctgttcaccctcctgccaggaaaatcccagaaagcttaatgataccccaaaatgattacacccagggaggaaaaaaaggagcgctttctagggtcagaatcgtggagagaatactcagaaatgaacctctttaaagccttgcaggaatgagtcactcttacttaatgaaatgttaaagccaattaaaaagcatgctgtgatgcccagcttccctttccacagggtgcatgcgtctcctgctggtgaatcacatgcggcaagaggcaactggctccacagcctgggatgctgccgtaccaagaggaaagaagcagcaaaatgcctttacgttgttctaaacccccgacgcataaagtgtagaggagggatggccaagggtgggtggtagaaagtgtgttcaggctgacactggcaatgagtacagataatttcactttcctcttccaggggcaaaggctgatggcctctacctttgtatccaggagaaactgcagagcagccctgtgactttacaaaatatgctacctcaaagtgctaccgataaacctttctaattgtaagtgcccttactaagggcacatgtcttaatcaaagttagttttttgttttctggtttgtttttttttttttgtatattgatgaatgagatcttacctattaaatatattattggattatggttcctgaaggtcattaaagtttgagtgtgtgtgtgtgtgtgtgtgtgtgtgtgtgtgtgttttatgacttaaatatctttacgtgtgttttttagagcttggttctttaaagatttggagaagatatgtaaattaccaaggcacttggtttttctgttttatatactaataatcagggcctaagttaaataaaaatatgtgtgcatgtattttatatatgtgtgtggattgcgttagaatcttgggttgaaacctagaaatctgcccttcaacctaactagtggaatgagtcagagaacctggaaatgatgtgtgacaaagatggcattaaaaatcagcatgtaaatgataaattattcaataaataatgtgagaaaaattggttttccatatggaaaaaaatgtgattagatccctacctcacaccgtgaaacaaaataaactccatctcacatgaaaagtatattcatcccagtagcccccaaagttttacctgattccagcatcaactttaaaatctaagtccaaagtatcatctaaatataattcaaatcagatataggtgagactgaagggaagggaaaagatgccataccgttttctgaaactctaaagataaaaatctttcatagaattgtagtgccggaggatctcagaaaacacctagttctagagtgtcatgtttacagattgaatgactagttaatgcaagtcacatgtgacaagccatggtcaagtgtgttattctttg

SEQ ID NO: 466295 - DNA, 4961 bp, Homo sapiens
  misc_feature (4776)..(4776): n is a, c, g, or t
agcgataaaaccaaggtcctgaattccctggatgctctctgctgagggttgatgagtgtcaccagacttcgacctggagcggaaacagctcacttgaattctccgcagaatggaaatagtcgtcacccatctggctatgttccagggaaggttgtcccattgcgtccccctcctcctccaaagagtcaagcttcagccaaatttacctccatcagacgagaagaccgggcaaccttcgcattctcacctgaagaacagcaagcccagagagaaagtcaaaagcaaaagagacacaaaaatactttcatttgttttgctattactagtttctcattttttattgcacttgcaatcattttaggaatatcctcaaaatatgctccagatgaaaattgcccagatcaaaatcctcgtctcaggaattgggatccaggacaagattctgcaaagcaagttgttatcaaggagggagatatgctccgtctgacctcagacgccaccgtgcattctatagtcattcaggatggaggactgcttgtatttggggacaataaagatggatccagaaatattactttgaggactcattacatcctgatccaggatggtggggcgcttcatattggagcagaaaaatgccgctataaatccaaagcgacaattaccttgtatggcaagtcagatgaaggtgaaagtatgccaacatttggcaaaaagtttattggtgtggaagctggcgggacactggagttacatggggcacggaaggcatcgtggacgttgttggcaaggaccctgaattcctcaggcttgccctttgggtcctatacctttgaaaaggacttttcccggggcctcaatgtgagggtcattgaccaagacacggccaaaattttggaaagtgagagatttgatacccatgaataccgcaatgagagcaggcggcttcaggagtttctgagattccaggatccaggtcggattgttgccatagctgtcggggattcagccgctaaaagtctcttacaaggaaccatccagatgatccaggaacggttgggaagtgaactgatccaaggactgggctacaggcaagcttgggctttagttggtgtcattgatggtggaagcacttcttgcaatgaatccgtgagaaactatgaaaatcatagcagtggcgggaaggctcttgcccaaagagaattttatactgtggatggccagaagttctctgtgacagcttatagtgaatggattgaaggcgtttctctttcaggattccgggtagaggttgtagatggagtgaagctaaatttgctagatgatgttagtagttggaaacctggagaccagattgtggtcgcaagcacagactattccatgtaccaagcagaggagttcactcttcttccctgttctgaatgcagccattttcaggtcaaagtcaaagaaacccctcagttcctgcacatgggtgagatcatagacggtgtagacatgagagctgaggttggaattcttacccggaatattgtgatccaaggagaagtggaggactcatgctacgcagaaaatcagtgccaattttttgattatgatacctttgggggacacattatgataatgaaaaattttacttcagtccatctttcttatgtggaattgaaacacatgggtcagcagcagatggggcgataccctgttcattttcacctgtgtggtgacgtggattataaaggaggatacagacatgcaacatttgtggacggcctgtctattcatcacagcttctcaaggtgcatcactgtgcatgggacaaatggcttgctaataaaagacaccattgggtttgacacactaggtcattgtttctttttggaagatggtattgaacagaggaatactttgttccacaatctgggactcctcaccaagccgggtactctcctgcccaccgataggaacaactccatgtgtaccaccatgcgagataaagtgtttggaaattacattcctgtgcctgctactgactgtatggctgtttcaactttctggattgctcatcccaacaataatctgattaataatgcagctgcaggctcacaggatgctggaatatggtatttattccacaaggaaccaactggggaatccagtggattgcagctcttggcaaaaccagaactcactccattgggtatattttataacaacagggtccattcaaattttaaggctggcttatttattgacaaaggtgtcaaaacaaccaactctagtgctgctgacccaagggaatacctctgtttggacaatagtgcaagatttcgacctcatcaggatgcaaaccccgaaaaaccacgtgttgctgctctaattgacaggctcattgcttttaaaaataatgataatggagcttgggtcagaggaggagatattatcgttcaaaattcagcatttgcagataatggaataggactgacctttgccagtgatggaagcttcccaagtgatgaaggttccagccaagaggtatctgaatctctctttgttggggagagcaggaattacggctttcagggtggtcagaacaagtatgtaggcactggaggaatagaccagaagcctcgaacattacccaggaacaggacgttcccaattagaggctttcagatttatgatgggcccattcatctcacaaggagcactttcaaaaaatatgtgccaactccagataggtacagcagtgcaattggcttcctcatgaagaattcctggcagataacccccaggaataatatctccctcgtgaagtttggtccacatgtctctctgaatgtcttttttggaaagcctggtccctggtttgaagattgtgagatggatggtgataagaactccatattccatgacattgatggctctgtgacaggatacaaggatgcttatgtgggaagaatggacaactacctgatccgccatccaagctgtgtaaatgtgtctaagtggaatgcagtgatctgcagtgggacctatgcacaggtaggcttagcaaatgtataatgctcaagttcctaccagctcctgccagcactgcttctgtgagaagtactcttcagcttttcagtgtgattgacattttccaaagtatgatctatcttcctgtcctgtcctgtcctttcttttctttctttcgattcattaggagtcatggactcctggaatttttcttaaaactccccaactccagatctgtttaagaggtgaaagagtgagtcccagagaggagagctgatttaccctgggttaaatgtggttggaacgtagttgggacaagaacccatgtttcttgactcttaggttttcttgccacactacagctatgccctctaagagggatttttatcctttgcttttggggtcagtaatctctacttaatgaaagaatctgacttttgaggcaaaatatcaataggtcacatgaaaagtgagatgttcccggggacagagctggagatcaggagtgagtggacaagaaaggaatccaaggaaaatttcctaattctattatgatataatgtctatgaaaatatggaggagatgatatacattgagaaacacctctttgaagacattaagcattaatgtgtattaacttgatgcctagtataagaggatgaactaatttgcaacgtagtatatatggttaagagcacagattctagagctagactgcctgggtttgaattctggctttgttattttctaaagtatgcattggaaaagttaattaacttctctatgtcggtacacaatggggataatagtagttactctcataggaggctgttgtgaagatagagtacatgcacatatgtaaagcatttagcatatggcctggcacatagttcagtgcccgctgctcttagtattatttaaggagaagagctgtaagttgcaaaggtgattttaatagtgacattttggtggatggaagagattgcagaatggaggtaccagttgcccaggattttgaaaggagcagatcctgcccccaccctctgccccatgcagacaattaaagggtaggaatttttatttatttatttatttttgagacggagtcttgctctgtcgcccaggctggagtgcagtggcgcaatcttggctcactgcaagctccgcctcctgggttcacgccattctcctgcctcagcctcctgagcagctggactacaggcgcccgccaccatgcccggctagtttttttgtatttttaatagagacggggtttcaccgtgttagccaggatggtcttgatctcctgacctcatgatccgcccacctcggcctcccaaaatgctgggattacaggcgtgagccaccgcgcccggccaggatttaataatagactgtcagaggagataaaggaaatagatgatcagaacatggagacgagaattagaggaagagcaagggattttccacatagaattgggctgtgatagccctaaagacaggaaagaagcccctttctttgatttgctgctagatgttcttttcgtagcatgggctcttcctggggaggatccgtgctgtgctatttcccctctactgagctctgctcactttgccggtcaaaggtgtgttttcaggctcccgcttgtcacttctctgagccccctgaattacatgttgtttccaccacctgagctttcaataattggagcttcttggatcagaattcttctttgttcttctgactttgaattacgncaattaaagcaggtgatttttaaattttaaaacttaaaaagtttagatccttatctatagactaaacaaagggcttaagaggaataaagacgggagagactttctggtttattttagtgggggtattagcttctttattgctatgggatttctcatttccatgagcaaaaataaaaaatactaaa

SEQ ID NO: 466296 - DNA, 3690 bp, Homo sapiens
agcgataaaaccaaggtcctgaattccctggatgctctctgctgagggttgatgagtgtcaccagacttcgacctggagcggaaacagctcacttgaattctccgcagaatggaaatagtcgtcacccatctggctatgttccagggaaggttgtcccattgcgtccccctcctcctccaaagagtcaagcttcagccaaatttacctccatcagacgagaagaccgggcaaccttcgcattctcacctgaagaacagcaagcccagagagaaagtcaaaagcaaaagagacacaaaaatactttcatttgttttgctattactagtttctcattttttattgcacttgcaatcattttaggaatatcctcaaaatatgctccagatgaaaattgcccagatcaaaatcctcgtctcaggaattgggatccaggacaagattctgcaaagcaagttgttatcaaggagggagatatgctccgtctgacctcagacgccaccgtgcattctatagtcattcaggatggaggactgcttgtatttggggacaataaagatggatccagaaatattactttgaggactcattacatcctgatccaggatggtggggcgcttcatattggagcagaaaaatgccgctataaatccaaagcgacaattaccttgtatggcaagtcagatgaaggtgaaagtatgccaacatttggcaaaaagtttattggtgtggaagctggcgggacactggagttacatggggcacggaaggcatcgtggacgttgttggcaaggaccctgaattcctcaggcttgccctttgggtcctatacctttgaaaaggacttttcccggggcctcaatgtgagggtcattgaccaagacacggccaaaattttggaaagtgagagatttgatacccatgaataccgcaatgagagcaggcggcttcaggagtttctgagattccaggatccaggtcggattgttgccatagctgtcggggattcagccgctaaaagtctcttacaaggaaccatccagatgatccaggaacggttgggaagtgaactgatccaaggactgggctacaggcaagcttgggctttagttggtgtcattgatggtggaagcacttcttgcaatgaatccgtgagaaactatgaaaatcatagcagtggcgggaaggctcttgcccaaagagaattttatactgtggatggccagaagttctctgtgacagcttatagtgaatggattgaaggcgtttctctttcaggattccgggtagaggttgtagatggagtgaagctaaatttgctagatgatgttagtagttggaaacctggagaccagattgtggtcgcaagcacagactattccatgtaccaagcagaggagttcactcttcttccctgttctgaatgcagccattttcaggtcaaagtcaaagaaacccctcagttcctgcacatgggtgagatcatagacggtgtagacatgagagctgaggttggaattcttacccggaatattgtgatccaaggagaagtggaggactcatgctacgcagaaaatcagtgccaattttttgattatgatacctttgggggacacattatgataatgaaaaattttacttcagtccatctttcttatgtggaattgaaacacatgggtcagcagcagatggggcgataccctgttcattttcacctgtgtggtgacgtggattataaaggaggatacagacatgcaacatttgtggacggcctgtctattcatcacagcttctcaaggtgcatcactgtgcatgggacaaatggcttgctaataaaagacaccattgggtttgacacactaggtcattgtttctttttggaagatggtattgaacagaggaatactttgttccacaatctgggactcctcaccaagccgggtactctcctgcccaccgataggaacaactccatgtgtaccaccatgcgagataaagtgtttggaaattacattcctgtgcctgctactgactgtatggctgtttcaactttctggattgctcatcccaacaataatctgattaataatgcagctgcaggctcacaggatgctggaatatggtatttattccacaaggaaccaactggggaatccagtggattgcagctcttggcaaaaccagaactcactccattgggtatattttataacaacagggtccattcaaattttaaggctggcttatttattgacaaaggtgtcaaaacaaccaactctagtgctgctgacccaagggaatacctctgtttggacaatagtgcaagatttcgacctcatcaggatgcaaaccccgaaaaaccacgtgttgctgctctaattgacaggctcattgcttttaaaaataatgataatggagcttgggtcagaggaggagatattatcgttcaaaattcagcatttgcagataatggaataggactgacctttgccagtgatggaagcttcccaagtgatgaaggttccagccaagaggtatctgaatctctctttgttggggagagcaggaattacggctttcagggtggtcagaacaagtatgtaggcactggaggaatagaccagaagcctcgaacattacccaggaacaggacgttcccaattagaggctttcagatttatgatgggcccattcatctcacaaggagcactttcaaaaaatatgtgccaactccagataggtacagcagtgcaattggcttcctcatgaagaattcctggcagataacccccaggaataatatctccctcgtgaagtttggtccacatgtctctctgaatgtcttttttggaaagcctggtccctggtttgaagattgtgagatggatggtgataagaactccatattccatgacattgatggctctgtgacaggatacaaggatgcttatgtgggaagaatggacaactacctgatccgccatccaagctgtgtaaatgtgtctaagtggaatgcagtgatctgcagtgggacctatgcacaggtctatgtacagacatggagcactcagaatctttctatgaccattacacgagatgagtatccgtccaaccctatggtgctccgaggtattaatcagaaggctgcctttccacagtaccagcctgtcgtcatgctggagaagggttataccatccactggaatgggccggcaccacggactacatttctatacctcgtcaacttcaacaagaatgactggattcgagttggcctttgctatccatcaaacacaagttttcaagttacctttggctatttgcagcggcagaatggctcattatccaaaatcgaagaatatgagcctgtgcattcactggaagaactgcaaagaaagcaatccgagaggaaattctattttgactccagcacgggagacggtgtatccctatgttgcccaggctggagtgcagttcacaggcatagttgtggtacactacagccttgatctcctgggctcaagtgatcctcccacctcagcctcacaagtagctgctgccaccacacccagcattgattttcaatttttgtttagacttaaacaactacctggactttcattctgtagatgatagaacttccagattcccacttgattttccacaagaataaaaagaatatccacatttgg

SEQ ID NO: 466297 - DNA, 1134 bp, Homo sapiens
gactaggaagacaagaatttgacctagagaacaaattcaaaccattcagagcacctaaagaattgatttactacttcttggaaaagtactttccgagcattaattatacactgattgacaagtatgaaaaatgtattctgagctttttgtggagatagtggacccagtggatatctatcttaacctccttcagaccatctttgactttcatgccatcaagagtttgctgactgggcccagccaactgaagattcgcgttgatgcaatgcatggagttatggaaccttatgtgagaaaagttctgtgtgatgagctgggggccccagccaattctgcaataaactgtgttcccctggaagactttggagggcagcaccctgacccaaacctgacatatgcaatgactcttctggaagcaatgaaaggaggagaatatggatttggagctgcatttgatgctgatggggaccgttatatgatcctaggccaaaatggcttctttgtgagcccttctgactccctggccatcattgctgccaacctctcttgcattccatatttccatcagatgggggtccgcgggtttgggaggagtatgccaaccagcatggccctggacaggagatccagggaaggactcttggaggagattaggcataggaccaaagatcagaaacaggtatctggacctgactgtgatgctgggattagaaatgacacccacacatgtgaaaacacttattcctcagaagaaagagtaactgcagtaattaggacccaattgatggcaaagggatatgatctagcaaacttcactgccaacaaaatgtgttaatattctctgtgtaaggtgttctgctagattcagggaggtccgtggcttcagcgtgaatctgaaggatagagctggggagtgtttttaaatcatgatgacattgttcataaagattgtgtcacacagattctactacctatattttggggtgggagggagagacagggaatgtagtttaagaaaagcaagcatttatgtctgccagtgttctcaaatgagctcatgtatgaagtgggacatggaactcgctgacctttattggcctctgcattcagactacctggggttgaattctaact

SEQ ID NO: 466298 - DNA, 1371 bp, Homo sapiens
ggaggcacgggcaagctctggggcccactccttgggcagcgcattttggaccaagtcccttagcgttcctggctgcctctgtttctctgcctgccttgggaatccagacagcctcatgacaagaggagatgaggcagtggttgcggaagagcctggtctctcagccacagcagccacgaggagcaggaaaaaggccgtttgtcgtaagggtcactgctgttactggtcacctctgggtgcgagtcctgggctaatcgcatatcttgcgggaccctgacaactcccccatttatcagatgaggcaaagcaaggctcagtcacttgcacaacgcatatcgctagagtgccgaggaaacgctgtcaagatgtcaaaaatacgcggtaagacgtcagcccggtgagcatcctccgcactgcggaccgcccggggtcggggtcacccgggccccgccccgagcttgctgtcgtatcggccccgccccacccacgccctcccggcccctcctgctccgggcgcgctcggctccgcccccacgggcaacacggcctcccattggccgcggtttccatggttacgcgggccggcggagctgcgggctcccagacacgtgtccccgggagccgcccagaatttgacaggggaccatgtgcgcggcagcgcgggagcgagacaaaggaccgggggaggcggggaacgaagccgggcggaggggtccgcgtggcccgggcggggatgggccccgcgcttctcctgcgagcagggcaccccctcttcctttttattttgaaggaaagggaaaaaaggaattgctacggaaagagaggtgggagaggaacccagtcaatttcacctgctccccttcctccaggaagaatcgggtacgcgggcatctgagaacccgcagggtttctgcttatgcctcccggccctgagtttctaaccccacattgacctcagaccttgaggtttaaattctgtttctctgtcttgttctagaaccgaaagcttaataagtgtggttgttttgatattcgaatcatgagacccaaggcatcgtaggggacctcgcctgcatccattcgcctatccatcctacagcagcgactgcacccctgattgtgatgacgaatgcacccccatccttgggctccgtgcccactgctgggctgggctgctccctcaggtgcggcagccagaggaggtgtggactcccatcccacgcgtttatcctcctgcagcctctcgagcttggtggcatagccgtccttccagtccccaagccagatgtccttgatgccccttctcccagccccatccccatcgccagttgtatcagttttctattgctactgtaacaactcactacaaat

SEQ ID NO: 466299 - DNA, 3532 bp, Homo sapiens
ggaggcacgggcaagctctggggcccactccttgggcagcgcattttggaccaagtcccttagcgttcctggctgcctctgtttctctgcctgccttgggaatccagacagcctcatgacaagaggagatgaggcagtggttgcggaagagcctggtctctcagccacagcagccacgaggagcaggaaaaaggccgtttgtcgtaagggtcactgctgttactggtcacctctgggtgcgagtcctgggctaatcgcatatcttgcgggaccctgacaactcccccatttatcagatgaggcaaagcaaggctcagtcacttgcacaacgcatatcgctagagtgccgaggaaacgctgtcaagatgtcaaaaatacgcggtaagacgtcagcccggtgagcatcctccgcactgcggaccgcccggggtcggggtcacccgggccccgccccgagcttgctgtcgtatcggccccgccccacccacgccctcccggcccctcctgctccgggcgcgctcggctccgcccccacgggcaacacggcctcccattggccgcggtttccatggttacgcgggccggcggagctgcgggctcccagacacgtgtccccgggagccgcccagaatttgacaggggaccatgtgcgcggcagcgcgggagcgagacaaaggaccgggggaggcggggaacgaagccgggcggaggggtccgcgtggcccgggcggggatgggccccgcgcttctcctgcgagcagggcaccccctcttcctttttattttgaaggaaagggaaaaaaggaattgctacggaaagagaggtgggagaggaacccagtcaatttcacctgctccccttcctccaggaagaatcgggtacgcgggcatctgagaacccgcagggtttctgcttatgcctcccggccctgagtttctaaccccacattgacctcagaccttgaggtttaaattctgtttctctgtcttgttctagaaccgaaagcttaataagtgtggttgttttgatattcgaatcatgagacccaaggcatcgtaggggacctcgcctgcatccattcgcctatccatcctacagcagcgactgcacccctgattgtgatgacgaatgcacccccatccttgggctccgtgcccactgctgggctgggctgctccctcaggtgcggcagccagaggagcctgcccagccaggatatgcggcaggaggttcatttttgaaagtataagaagggccgccgggaatgagtgtctcacggggacagagtgtgcgtttgggaagatgagacggttgtggagatggatggtggggatggttacacaacaacgtgaatatgcttaaagccacgttcacggaacacgtacaaatgactaaaatggtaactttctggtatggatattttaccacaataaaaaaaaaatgctaaaaaaattgtaaagaaaaagtgctttgtgtttgccgaacttttgaggatgggccgcccactgcacatttgccgtttcccaagcgcctcccacgggccaggccacgcacttcctcctttcattctggaaacaagcttgaggagagaggagcgtccaacccccaagcaagaggaaagggaggggaaggtgaaggcaacagagttcttgatcccagggtatgagtcgctgcctaacacccagacctggcttctgacagaagcgccagcaggaatttcccgcacctccggtgtgaatcctgtccagcttcctgccattggcttgaattgttgcctggcactgttctcgcccagaaacacagcaggaaaaagagacaaaactttctgccatcatggcctctacgttctagtggagggagatggacagggagttgggatctggtgcaagacagggttgcctgggggcctgagtgtcgatgtctggaagcaggaaggtggctgagggacaggcccaggcacccaggggtagaagccaaggtgaccgtccctgggttttatccttcttgtctctgtccctctgaaataaaaagcagggtcgccagtggggagaggaggggtgacaaaaccgaaagtctctctttttttttttttgtaaagtcgtctcttacaggaaaatatgtggtcctttcaaagccctatcccttgtaagggtggtttctctgcactcgggggggtctccctcctgtttccttttgaagatggtgtctggctgtgtggagaagcttgcatgggccaggacaggagtctcttgccctacttgccatcactggacctgctcaggaggggcgggtctggtctgccctggtctccgggaaccgcatccacgttctctgaggctgactggacttcgctttgccctgaaaacttccaattcacagtcaatcttcttcccatatgttgtttttttctgtggctgctctaataaagtcccacaaacccggtggttgaaaaccacagaaatgtgttctctcacagtcccagaggccagaagtctgaaatcaatgtgtgggcagtgccgtgcctcctctgaaacctctaggggaaggtcctttcttgcctttccggctttagccccagacttacaaatgcatctctccactctctgcctccaatgtcacatggcattttcctcttcttctaagaacaccactcatattggattaggccccacctaatgacctcttcttaattatatctgcaaggacctttatttccaaataaggtcacattcacagctgcaggggttgggggtctctgtgagactgtcctcagcccctctgcctggggactggggaccctcagtcatttccatctgctgcagcctggccacactgggtgcaatgtcaggcctaagaaatttctacatgaactgtcccttaatttgcatataattaaaagtgggtatcactatgagtgcagaattggatctgagctgccactctgggcacacagcctgcgggggagccctgctctgcagggagcagttcctccgctgggctaggcatggccactttaatacaagctgttgtctaacaccaccagctcacccttacatactttcctgggtgaagccaagaaccctcctgggttaagccccagttttggggctcatctgccccgcatcagtaggaacccaccaagtgtgggaagagggaatggaagccagcggaagtgatgccatcattttgtatgatgtttactccgtgaaagtgccgacatgcagctgttgtcaacctacaaacatggcaactgcttatgatcaaagccctcctcaagcccccacttttggtagacccccatcacttggtgatggctcagccggttctaccttgagtgagagcgtccttccctgcccgggccccgtgcacctcgcttcctctccaccttcccctggcttcccttcacatggccccatctctcctgcgtcaccagctgtttcctctcctgggtcagccccatcagcatgccacaaacatgcaggaatgcccccagattgtaagaagccaccctctgaccccacaatccccttt

SEQ ID NO: 466300 - DNA, 4292 bp, Homo sapiens
gagatagagggatggttgatctcatgctaatgaagtttagaccatgttgagccctacttttgttctgtgggaagttggatatcccttatacatctatggctccatcttcatcgttattgtaattatctggcaagtgaaaaggagccaccatgaattgagttcagaacctaaaaggagctgctgccggtgtcaccaaaaagtcaggcaaagagctagagatgcagcatcaacagctaggagacgttcccgggaagaagctgagaagccacagaagctgctctccatcattaaaagccagggctggcttcctctggagagaagtgtgcggcgaatcctgtgtgcagatccctgctgccaaatctgcaattctgtggctctggagattcagcaattgctggtgggtgagaacaaccagatctccctgactttatcggggccattgcagggctcctcttgcctagagatgctgtctacgtctagtatgtctttagatcagagtctggagtttcattcctggcacaccagagagctttcactgtcatctgtaaccccaacactgtcacaattaacagatcagaaatctttaacccagtcagctgcccagtcaacgtatgcagatggcatacaagattactgggctgatcacctccagctagggcaggaatttcaagtgccagatgtgctccggggcccaaacaccatagcttcttcaaggattgagaagccaagggctccactgaaccaggaggagatgacgcagagcaaccccagccttgtccagggaaaccaaggccagcatcacttgaattcccaggtctccttgctgtccctgaacccagaaaccctgaaccggatgcatccaatggccttgcatatggtcctccctgcccacctgccatttctcagtcctgaagtgctgaggcttcttgaggtacatgttaaaaaatggatgcatttccagaggtgggggctcccaagacgtgtggaggagtccctgaggcagcttatgccaaacccaccattgtattaccaacctggaaatgaccagccagtttctttcaacctgaagaatactcctcaggtctctcttcatagatttgagaccatttccctccagacctggtgttcatgtgtggctggccagcccatccagaccttctgggtttctgaatggtccacaatgaacccagaacaaagacaccactgtcagcaaactccaaaccctatggctctagccttgccctctccagcccttaaagccctaagtggcccccatccacagtctgggggacaagataatgactcagggagtgatctccagcagaaatacagccagctattctgtgggctcccttctctgcacagtgagtccctggttgccactttcatgggatctcaaggcctccccaagattgaaaatgtgcccaagccccccttgaaggatccttttctcttcaatgagctctccttcccccaactgctccctaaaacttcaccccagtcagccccaccctcttccccactttccccaaactggatgtctccatctgaccatcaacgagctcagatcaatgtcccatttctgactctggctgagtatgaagccttggagtggcacctgctacagaggcaactccagcttcagtggggctggccagctgccctccagaggtctcagcacacccagtgcctcatgcagcatgagccctgtggcaaagctcagtctcctgagaccacgacagcttcccagacagggaagtccatctcagtgctcaccagggaactactcttcttcccggagcatgcccggaagctgctggaattccacatccagaaacagttgattcgccatcgctggggcctgcctcagaagatccagcagtccatccagttgctccttacctccactgatcagcagactgtgtccagcagcagcacagccctagccaacgtgagcatcccccagcctgtagccctagaggccaacggggcttgcgatgtgctgtcacccattgcggccccagtgtccatccccaggccacacttgttaactcaggtcaaggcaatactgcagagccacatcgactccaaatgtggacaaatccaccagggcaagatccccgcctgtgtacacaggtcctgggactgcagaatttctggggtcctggcagtggctccttttccctgcattccagaaagccagttcctggaactgcagacagcaagtgacccggacctgcatcacaaagttatgccctggatgccaacggcccttgatcagcagcaacaggctttaccaggtactgtcactgaacaccctaagctgctccgagtcttgtctgtggaagccattgagaaactggagacaactttacggcacaagcatctggccttcctgtcggggctgcctgctctgtattatgtggcgctccccagggccctggccccggcagtcactagccaatctgtcatcacagagatggagcctagtcccgtggaaatcccagcagagcctctgattcagatggtttcatttgaagaacagtgtataagtcttgggccatgccctcaaggcaacaatgagagttgtacagacgttgcaaaagagttccagcctgcagtgccagtaaaaggaacaatggagacgctgcctctagaaagccagacgcatcctactagcccccactcactccagacacatatcttgaccaaactaaacttccacctgagaaaaaaggtcctagagatacaatggggaattcccattagggcaaggaagtccagggaacaaactgttgcagcaccagagaacatatccacacagaagtctcttgaaagtctaaaccaccaaggggagacattgctccaggaactgcccatcccaccagacactcttcctgcccctaatccagaaggggttcaccttaaagaacagctggccaatgacttgaaggcagtgcagcagaaccaaaagcaatccaattccaaagctgtaccccagggttctgcccactcggtctccaagatctcacagcccagtggggacatgacagaggcccacatgccttgtgttcaggtagaggccaatgtgaacaaacccagcctggaggaaccctgtggccctgagcctcaaagccctagcaagagcaaggacccagcccatgtccccatgctagcaggaaacagagaggacccagaggaaaccaaagcagccagggaccacagagaaggggatgcggggtttgggcgctcctcaaccagagaagagagacgccctgctgaagaccagaggccagcagggatgcttccaaacaagacaccccgagggtcctggcgatggagccgtagctttcatcttgctgatccctgtcaacacagcccccagcatcaccctcagcttaagctcccacagctacctccacgagtccctggggagaaagagtctgagaaggacctgcaagacagtcaaaccaagctaactgtcatccttgaaccagcgacaattcctgagaatgcccagactgtgttgccccaggcttcacagggtcagcctttcctgagccaaccaactcaggctaagcctttgcagggccaaactttgcaaggccaagttttgcatgggctggtgatgccagtccatgctcaaaagaagcccagccttacagagtctagcttcagaaataaaattaaatgttttctgcagcatattaaccccaagacaaaaggcaaagggcatgaggactccatgttctcagccgctgcgaaggtggccaaaaccagaaaagaaaatgttgcaaagagcctggctccagccaagagccctgtggggagaagtaagacggagaagccgacagggtgctccaaggcccaatctcgtcctgctcagaagctggtgggcccagccttcttggatggtccccaatccctagacgataagctccggctacactccagacaacctggctctgcctcagccctgggctacccccgccactgccctcgtcactgtcctcgagaggcttgtgccaacaaaccagggcacccaacctagctcctgaccctcacctcagatagaaacattggtccgctcaaggagaacatgcagagccatgaaaaagagtttataggctccccaactgctgcagccctccagaggaccagtattgtcatttccataaatgtgcaggtgggacagatgccactagaaatacactctatatttctcagcaatacattgtctgtctgctccttgtctctgctgtattgtgttaagggaaggtgtgagggaggct

SEQ ID NO: 466301 - DNA, 1157 bp, Homo sapiens
ctggtgacgtcccacagggtggagcctccatctgccaggggctctgagaaccctgagccaccgggaaagccacagtagacatgtagcatgagaaataaaacttcgtcatgctagccactaaaatgatgaggttggctgaacgtgctgcaccctcgcctgcacaaccccatgtacttctcagcaacctctccctcatggacatctgcggcacctcctcctttgtgcctctcatgctagacaatttcctggaaacccagaggaccatttccttccctggctgtgccctgcagatgtacctgaccctggcgctgggatcaacggagtgcctgctgctggctgtgatggcatatgaccgttatgtggctatctgccagccgcttaggtacccagagctcatgagtgggcagacctgcatgcagatggcagcgctgagctgggggacaggctttgccaactcactgctacagtccatccttgtctggcacctccccttctgtggccacgtcatcaactacttctatgagatcttggcagtgctaaaactggcctgtggggacatctccctcaatgcgctggcattaatggtggccacagccgtcctgacactggcccccctcttgctcatctgcctgtcttaccttttcatcctgtctgccatccttagggtaccctctgctgcaggccggtgcaaagccttctccacctgctcagcccaccgcacagtggtggtggttttttatgggacaatctccttcatgtacttcaaacccaaggccaaggatcccaacgtggataagactgtcgcattgttctacggggttgtgacgccctcgctgaaccccatcatttacagcctgaggaatgcagaggtgaaagctgccgtcctaactctgctgagaggaggtttgctctccaggaaagcatcccactgctactgctgccctctgcccctgtcagctggcataggctaggttgtgctgtggtcatgacctcaaaccttgagaggcttaaagccatataaggtttgtttcttgctcctgatgcaggtccaccagaggctggtggggcttctgctccgcatcatggtcttcacccctctgggactcaggaatgacaaaacagctaccattgggaacactgctggtcaccatgacaaa

SEQ ID NO: 466302 - DNA, 4208 bp, Homo sapiens
gatggccttgcatatggtcctccctgcccacctgccatttctcagtcctgaagtgctgaggcttcttgagcccttaaagccctaagtggcccccatccacagtctgggggacaagataatgactcagggagtgatctccagcagaaatacagccagctattctgtgggctcccttctctgcacaatcaatgtcccatttctgactctggctgagtatgaagccttggagtggcacctgctacagaggcaactccagcttcagtggggctggccagctgccctccagaggtctcagcacacccagtgcctcatgcagcatgagccctgtggcaaagctcagtctcctgagaccacgacagcttcccagacagggaagtccatctcagtgctcaccagggaactactcttcttcccggagcatgcccggaagctgctggaattccacatccagaaacagtcgattcgccatcgctggggcctgcctcagaagatccagcagtccatccagttgctccttacctccactgaccagcagactgtgtccagcagcagcacagccctagccaacgtgagcatcccccagcctgtagccctagaggccaacggggcttgcgatgtgctgtcacccattgcggccccagtgtccatccccaggccacacttgttaactcaggtcaaggcaatactgcagagccacatcgactccaaatgtggacaaatccaccagggcaagatccccgcctgtgtacacaggtcctgggactgcagaatttctggggtcctggcagtggctccttttccctgcattccagaaagccagttcctggtactgcagacagcaagtgacccagacctacatcacaaagttatgccctggatgccaacggcccttgatcagcagcaacaggccttaccaggtactgtcactgaacaccctaagctgctccgagtcttgtctgtggaagccattgagaaactggagacaactttacggcacaagcatctggccttcctgtcggggctgcctgctctgtattatgtggcgctccccagggccctggccccggcagtcactagccaatctgtcatcacagagatggagcctagcaacaatgagagttgtacagacgttgcaaaagagttccagcctgcagtgccagtaaaaggaacaatggagacgctgcctctagaaagccagacgcatcctactagcccccactcactccagacacatatcttgaccaaactaaacttccacctgagaaaaaaggtcctagagatacaatggggaattcccattagggcaaggaagtccagggaacaaactgctgcagcaccagagaacatatccacacagaagtctcttgaaagtctaaaccaccaaggggagacattgctccaggaactgcccatcccaccagacactcttcctgcccctaatccagaaggggttcaccttaaagaacagctggccaatgacttgaaggcagtgcagcagaaccaaaagcaatccaattccaaagcagtaccccagggttctgcccactcggtctccaagatctcacaacccagtggggacatgacagaggcccacatgccttgtgttcaggtagaggccagtgtgaacaaccccagcctggaggaaccctgtggccctgagcctcaaagccctagcaagagcaaggacccagcccatgtccccatgctagcaggaaacagagaggacccagaggaaaccaaagcagccagggactacagagaaggggatgcggggtttgggcgctcctcaaccagagaagagagacgccctgctgaagaccagaggccagcagggatgcttccaaacaagacaccccgagggtcctggcgatggagccgtagctttcatcttgctgatccctgtcaacacagcccccagcatcaccctcagtttaagctcccacagctacctccacgagtccctggggagaaagagtctgagaaggacctgcaagacagtcaaaccaagctaactgtcatccttgaaccagcaacaattcctgagaatacccagactgtggtgccccagcttcacagggtcagcctttcctgagccaaccaactcaggctaagcctttgcagggccaaactttgcaatgccaagttttacatgggctggtgatgccagcccatactcaaaagaagcccagccttacagagtctagcttcagaaataaaattaaatgttttctggagtgtattaaccccaagacaaaaggcaaagggcacaaggattccatgttctctgccactgtgaaggtggccaaaaccagaaaagaaaatgttgcaaagagcctggctccagccaagagccctgtggggagaagtaagacagagaagccgacagggtgctccaaggcccaatctcatcgtgctcagaagctgatgggcccagctttcttggatggtccccagtccctagacaataagcttcggttacactccagacaacctggctctgcctcaaccccaggccacccccaccactgtcctcgtcactgtccttgagtggcttgtgccccccaaccagggcacccaccctagctcctaaccctcagttcagatagaaacattggtctgctcaaggagaacacacagagccatgaaaaagagtttataggctccccaactgctgcagccctccagaggaccagtattttcatttccataaatatgctggtggggcagggtgccactagaaatgcactctatatgtttcagcaatacgttgcccatctgctccttatctccactgtattgtgttaagggaaggtgtgagggaggctaaaaagaccttcctgtctagggaaggagctttaacccacaattcagatggttcattttagaggagtgccacagtattccctccttgaggaggtgcttttgtgtttatcaaaacacaatatctaataagacagatgtcagatccagatgatagactctcctctgacttctccctgtttatactgggaagatctttctagaaaatccatcttggagcctgctgtaatcctgctgcctgtttactgcctccactgcctctcagttgcatgaaatgaaagcctcctggaatgagatgacagtagaaaatggagaagggcctgtcccacaggcccagggattggtagggagcagggtcacgtagttggaggtcagagtacctgtgacaaaagttgattctcatgcctgaccaggacatgagaatagagaaaagacagtttgcttggtgctaaaatgagcctagagccaggaggcaaacccaaggcccaagtgctttgggagggatcactgagcttagttctgcttgcccttagtgtgatgaagggcagggtgttgagcactgaagtttctgggaaagaaccacaaatataagaggttttctaaacatatgtgagcctgtcaagttactgccagcagcttgtacccaggcctactgtttctataccacctgtgcctggagcccttctccaccactctccttgccatgatccttactccttaaatttatcttcacagtaactaatggtgggcacccagtcagctgaatcccctcccaggatctacctggtgccttttcctcaggggatgactcctacactttttcctgccaaggacggcaccacagaagcctggcagctccagcccttggttcctgtcacccttctacatctcttcattgtgtcccactgcatttctgaaaacactgaagccaatcaccttggctgtcaaaagaagacaaggcttttggaaagtgtcctattaacacagaaagtgaccacaaatctacaatttaatgccacacatgagtctaacaatgagatcagctgctcataactgaggtggtgggactctggcccttttgcctctctctgggaatgtccaatattttgctattcagggaaatacatagttattattaatgaattctctgaaacctttggaatgaaatgaagtccaagagggaggctgagtggcaagctgagatctacaaggagctgctaagaaatggtgaagagaggcaagaagcaaaagtcacatgaagggtataaactcaagaatttactacttcaggtttgggggtagatgctaggaatacatcagtgcttgcttgggatctttgggttcacctctggcacactcaggtaacaacatgtcatggtgaatgcccc

SEQ ID NO: 466303 - DNA, 2249 bp, Homo sapiens
tccggttccaatcctgcctgttgacatcgaaggccggggactccgagcggatgcatccccgcacctcgctgctcgctgccttctccgagtgtaatcaaacatcaagctaagtagcaaataaatctctcgatctcataagctgcacagcgagatcatgtaaatgcaaatgaaggacctgatttcaagctgtcgagggggaggggagggaacggtggggccctgtcaccgtgaccgcctcacacggcaagggccatacatcagccgccagaacagagcaggcagccggaagggaggccgggctgccccggggagcggggaccaggcaggcggcagagcgcaggcagccccgggccgtgggaaccagacagggctggactgggtggcggggcaggcctgaggacgcctggaggggctccccacggtccgcggctccctttggacccgagctgggagctgctatagcagtcttaacaataagacagcagtaatagaagccatcggttactgagcaacctcctgggccaggagatgattagatcatgaaagcagagcccttgtgatggaatttgtgcccttaaatgaagaggaagaaagctaactctatctctgctctctgccacgtgaagatacaacaagaaggcggccatctgcaaaccaagaagagagccctcaccaagacactggcacccagcctgtgggagctggagagagggggatatagacgagatggcaggagacagcgaggccagagcccaccagaccctctggacagtctttggcgcagccagagtggagagatcccgggaaatgtaacaccctgtgacttcgaaaccaccgcctgtggcctgtggcctgtggcctgtggacagtggaaggagcagctgcacccacccttctcagtaatggccccggggcctgctggcaccagggagccacaagaagctggggctgctgaactcggcaagccccgggaaagaagctacagtctgcccggcattaattttaattatggactctacatccgagggcttgacggaggagtccctgaagccatcggacgctggaacgtgttcaagcagcagcccacctgcccccacgagctgacccggaattatatcgcaatgaaccgcggggcggtgaaagccggcctggtgactgcccgggagaacttgctctaccgtcagctcaatgacatccgcatcagtgaccaggatgaccggcgcatgaagaaagagccgccccctctccctccaaacatgacatttgggatccgggcacgaaaactttccaaacaaatagaaaagttcagaagcaacataactaactcccgtgaacccactacctggatttagcacgctaaccatctggccgctttcgcttctgatcctttcctttaatattgaagaaataaaacgtgtcaaacacaatctgaggcccctgtgcacaccttcctagcctcagcccctccccgtcttccctgaggaccctcccgaggttggagcacgcatgctttccacccagcgtgcccagttttgctctgtcgttagcgatccataaatcatagggactactgagcggggtcctgtgccctggaagtcactctgcacatgactcgctcatctcatgacacacatttgcaacatcaccctgtcccactgtctgaatcgtccgccacaggtgtacccatctctctactgctaaggtgtttctcgtgtccccccatgacaaggcccccaccggcaccctggcacacctggtgcccctgtgcgagggtcctcggggttgatgtccacgagcagagctgctggttggaatgagacctcctctgcctgtgccgacaaccccaattgtccttccgggtgctggccccatctgccctcccatcttctcaactctttctacctcctctgtgtcattgaccacgggtgactgtgaggagatgacccttcccctgtacccctgaccacagatgacagtgaggagatctccctcccgtgtccctgaccatgggtgacagtgagatgacccttcccctgtgtcactgaacacgggtgacagtgaggagatccccccgtcttgtgtccctgaccacaggtgatggtgagatgacccttcacctatatccctgaacacaggtgacagtgaggagatccccctcccctgtgtccctgaccacgggtgacagtgaggagacgccccttccctgtgtcattgaccacgagtgagagtgaggggacgcccccttccct

SEQ ID NO: 466304 - DNA, 913 bp, Homo sapiens
acagcgaatactgctgaacggcaaatgttgctacctgatcgttcctctggaagcttcatctcagatgggtacctggccgttctgcagaggtttctgctgacttttgttcagctatgccctgcccccataggtggagtctacagaggcaggcaggcctccttgatctgtggtgggctccacacagttccagcttcccggccactttgtttacctactcaagcctcagcaatggtgggcgccctacccccagcctcgctgctgccttgcagttcaatctcagaccactgtgccagcaatgtgcaaggctccctgggcatgggaccctctgagccatgtgcgggatataatctcctggtgtgccatttgctaagaccgttggaaaagcgcagtattagggtgggagtgacccagttttccaggtgtctgtcacagctttccttggctaggaaagggaattccctgacaccttgcacttcccagttttgctacttacttcaagactttgggtatgctcacaacattcaagggcttaaatgattagttatgcctagcatggatatgggagggggaattggatgatcagttatgtctgacagcagcatgaaaagggagaatggcaacacgcttactgcactgcatttactgtttctgagctggatagctttgaagagatctttgaaggctaactttatgcagttctgcaaaaatcaacttctccatatttttcaaaagagcttgccacagagacagagctgggagactgctggaccaccataaaccaattgaaagatcatctcttgaaattcaatcctaaatgccattgctggaactcagtagcttctcaataaaagatacacactgaataaatttacatatttaagttcattttccattagctttcctttcaggaaat

SEQ ID NO: 466305 - DNA, 2134 bp, Homo sapiens
ggcccggggcggggctgcggttgcggtgcctgcgcccgcggcggcggaggcgcaggcggtggcgagtggatatctccggagcatttggataatgtgacagttggaatgcagtgatgtcgactctttgcccaccgccatctccagctgttgccaagacagagattgctttaagtggcaaatcacctttattagcagctacttttgcttactgggacaatattcttggtcctagagtaaggcacatttgggctccaaagacagaacaggtacttctcagtgatggagaaataacttttcttgccaaccacactctaaatggagaaatccttcgaaatgcagagagtggtgctatagatgtaaagttttttgtcttgtctgaaaagggagtgattattgtttcattaatctttgatggaaactggaatggggatcgcagcacatatggactatcaattatacttccacagacagaacttagtttctacctcccacttcatagagtgtgtgttgatagattaacacatataatccggaaaggaagaatatggatgcataaggaaagacaagaaaatgtccagaagattatcttagaaggcacagagagaatggaagatcagggtcagagtattattccaatgcttactggagaagtgattcctgtaatggaactgctttcatctatgaaatcacacagtgttcctgaagaaatagatatagctgatacagtactcaatgatgatgatattggtgacagctgtcatgaaggctttcttctcaagtaagaatttttcttttcataaaagctggatgaagcagataccatcttatgctcacctatgacaagatttggaagaaagtgttgcttaaatttgtgttatttttcactcattatatttctatatatatttggtgttattccatttgctatttaaagaaaccgagtttccatcccagacaagaaatcatggccccttgcttgattctggtttcttgttttacttctcattaaagctaacagaatcctttcatattaagttgtactgtagatgaacttaagttatttaggcgtagaacaaaattattcatatttatactgatctttttccatccagcagtggagtttagtacttaagagtttgtgcccttaaaccagactccctggattaatgctgtgtacccgtgggcaaggtgcctgaattctctatacacctatttcctcatctgtaaaatggcaataatagtaatagtacctaatgtgtagggttgttataagcattgagtaagataaataatataaagcacttagaacagtgcctggaacataaaaacacttaataatagctcatagctaacatttcctatttacatttcttctagaaatagccagtatttgttgagtgcctacatgttagttcctttactagttgctttacatgtattatcttatattctgttttaaagtttcttcacagttacagattttcatgaaattttacttttaataaaagagaagtaaaagtataaagtattcacttttatgttcacagtcttttcctttaggctcatgatggagtatcagaggcatgagtgtgtttaacctaagagccttaatggcttgaatcagaagcactttagtcctgtatctgttcagtgtcagcctttcatacatcattttaaatcccatttgactttaagtaagtcacttaatctctctacatgtcaatttcttcagctataaaatgatggtatttcaataaataaatacattaattaaatgatattatactgactaattgggctgttttaaggctcaataagaaaatttctgtgaaaggtctctagaaaatgtaggttcctatacaaataaaagataacattgtgcttatagcttcggtgtttatcatataaagctattctgagttatttgaagagctcacctacttttttttgtttttagtttgttaaattgttttataggcaatgtttttaatctgttttctttaacttacagtgccatcagctcacacttgcaaacctgtggctgttccgttgtagtaggtagcagtgcagagaaagtaaataaggtagtttattttataatctagcaaatgatttgactctttaagactgatga

SEQ ID NO: 466306 - DNA, 2188 bp, Homo sapiens
ggcccggggcggggctgcggttgcggtgcctgcgcccgcggcggcggaggcgcaggcggtggcgagtggatatctccggagcatttggataatgtgacagttggaatgcagtgatgtcgactctttgcccaccgccatctccagctgttgccaagacagagattgctttaagtggcaaatcacctttattagcagctacttttgcttactgggacaatattcttggtcctagagtaaggcacatttgggctccaaagacagaacaggtacttctcagtgatggagaaataacttttcttgccaaccacactctaaatggagaaatccttcgaaatgcagagagtggtgctatagatgtaaagttttttgtcttgtctgaaaagggagtgattattgtttcattaatctttgatggaaactggaatggggatcgcagcacatatggactatcaattatacttccacagacagaacttagtttctacctcccacttcatagagtgtgtgttgatagattaacacatataatccggaaaggaagaatatggatgcataaggaaagacaagaaaatgtccagaagattatcttagaaggcacagagagaatggaagatcagggtcagagtattattccaatgcttactggagaagtgattcctgtaatggaactgctttcatctatgaaatcacacagtgttcctgaagaaatagatatagctgatacagtactcaatgatgatgatattggtgacagctgtcatgaaggctttcttctcaagtaagaatttttcttttcataaaagctggatgaagcagataccatcttatgctcacctatgacaagatttggaagaaagaaaataacagactgtctacttagattgttctagggcaacattacgtatttgaactgttgcttaaatttgtgttatttttcactcattatatttctatatatatttggtgttattccatttgctatttaaagaaaccgagtttccatcccagacaagaaatcatggccccttgcttgattctggtttcttgttttacttctcattaaagctaacagaatcctttcatattaagttgtactgtagatgaacttaagttatttaggcgtagaacaaaattattcatatttatactgatctttttccatccagcagtggagtttagtacttaagagtttgtgcccttaaaccagactccctggattaatgctgtgtacccgtgggcaaggtgcctgaattctctatacacctatttcctcatctgtaaaatggcaataatagtaatagtacctaatgtgtagggttgttataagcattgagtaagataaataatataaagcacttagaacagtgcctggaacataaaaacacttaataatagctcatagctaacatttcctatttacatttcttctagaaatagccagtatttgttgagtgcctacatgttagttcctttactagttgctttacatgtattatcttatattctgttttaaagtttcttcacagttacagattttcatgaaattttacttttaataaaagagaagtaaaagtataaagtattcacttttatgttcacagtcttttcctttaggctcatgatggagtatcagaggcatgagtgtgtttaacctaagagccttaatggcttgaatcagaagcactttagtcctgtatctgttcagtgtcagcctttcatacatcattttaaatcccatttgactttaagtaagtcacttaatctctctacatgtcaatttcttcagctataaaatgatggtatttcaataaataaatacattaattaaatgatattatactgactaattgggctgttttaaggctcaataagaaaatttctgtgaaaggtctctagaaaatgtaggttcctatacaaataaaagataacattgtgcttatagcttcggtgtttatcatataaagctattctgagttatttgaagagctcacctacttttttttgtttttagtttgttaaattgttttataggcaatgtttttaatctgttttctttaacttacagtgccatcagctcacacttgcaaacctgtggctgttccgttgtagtaggtagcagtgcagagaaagtaaataaggtagtttattttataatctagcaaatgatttgactctttaagactgatga

SEQ ID NO: 466307 - DNA, 5520 bp, Homo sapiens
tcacctccttctgtggggcatggtgcttcagaggggtcacattccattgggactagtatgtccttggctgctgtccacctacaagacgctccacaacttctttagctcttctgagcttgtggcctgtctatccaactggcacatccctggagaatctgacagtgctgaagacgtggtggcccgtgtgccaggaagtcagctcacgctgggctacatggaggagcacggcttcaccgagcccatcctcgtccctaagaaagacgggctgggtctggctgtcccggcccccacgttctatgtcagtgacgtcgagaactacgtggggccggaacggagtgtggatgtgacagatgtcaccaagcagaaggactgcaagatgaagctgaaggagtttgtggactattactacagcaccaaccgcaagcgggtcctcaacgtcaccaacctcgagttctctgacacccgaatgtccagcttcgtggagccacctgacattgtaaagaaactgtcatgggtagaaaactactggccagatgatgcattgctggccaagcccaaagtgaccaagtactgcctaatctgcgtgaaggacagttacaccgacttccacatcgactctgggggcgcctctgcctggtaccacgtgctcaagggggagaagaccttctatctcatcaggccggcctcggccaacatctccctgtatgagcgctggcggtctgcctctaaccacagcgagatgttctttgctgaccaggtcgacaaatgctacaagtgcatcgtcaagcagggccagaccctcttcatcccctcaggctggatctacgccacactcacccctgtggactgcctggccttcgcgggacatttcctccacagcctgagtgtggagatgcagatgagagcatatgaagtggaaaggaggttgaaactgggcagcctgactcagtttcccaactttgaaactgcgtgctggtacatggggaagcacctgctggaggcattcaaaggctctcacaaatctgggaagcagctgccccctcatctagtccaaggagctaaaattctcaatggtgctttccgatcgtggacgaagaagcaggctttggcagagcatgaggacgagctcccggagcacttcaaaccttcacagctaatcaaagacctggccaaagagatccggctcagtgagaatgcctccaaagccgtccgaccggaagtgaatactgtcgcctcgtcagatgaggtgtgtgacggggaccgggagaaggaggagcccccgtctcccattgaggccaccccgcctcaatccctcctggagaaagtgtccaaaaaaaagactcccaaaactgtgaagatgcccaagccatccaaaatccccaagcccccgaagccccctaagcccccaaggccccccaaaacgctgaagctcaaagatggaggcaagaagaaagggaagaagtcccgggagtcagcctcacccaccatccccaacctggacctgctcgaagcccacaccaaggaggcactgaccaagatggagccgcccaagaagggcaaggccacaaagagtgtcctgagtgtgcccaacaaagatgtggttcacatgcagaatgatgtggagaggctggaaattcgagagcaaaccaagagcaagtcagaggccaagtggaagtacaagaacagcaaacctgactccttactgaagatggaagaggagcagaagctagagaagtcgcctctagctggaaacaaagacaataagttctctttttctttctccaacaagaaactcctcggctccaaggctctcaggcccccgacgagccctggtgtgttcggggccttgcagaacttcaaggaggacaagcccaagcccgtgcgggatgagtatgagtacgtgtcggatgacggtgagctcaagatcgacgagtttcccatcaggaggaagaaaaacgccccgaaaagggacttgtccttcttgttggataagaaggctgtgctgcccacgcctgtcacgaagccaaagctggactcggcagcgtacaagcagagtgatgactcctcggacgagggttcgctgcacatcgacacagacaccaagcccggccgcaatgccagagtcaagaaggagagtgggagctcggcagctggcatcttggacctgctgcaggccagtgaggaggttggcgcgctggagtacaaccccagcagccagcccccggcctcccccagcacacaggaagccattcagggaatgctgtccatggccaacctgcaggcctccgactcctgcctgcagaccacgtggggagctggccaggccaaggggagctcgctggctgcccatggtgcccggaagaatgggggtggcagtggcaagagtgcaggcaaacgactgctgaagagggctgccaagaacagtgtcgacctggacgactacgaggaagagcaggaccacctggatgcctgcttcaaggactcagactacgtttacccctcactggagtcagatgaagacaaccccatctttaagtcccggtcgaagaaaaggaaaggctcagacgacgctccctacagcccaacagcaagggtcggcccatcggtgccaagacaggacaggcctgtgcgtgagggtacacgggtggcttccatcgagaccgggctggcggctgctgcagctaagttgtcccagcaggaggagcagaaaagcaagaaaaaaaagagtgccaagaggaagctgactcctaacaccacctccccttccacctccacctccatctctgccggcaccacctccacctccaccacgccagcctctaccaccccggcctccaccaccccggcctccaccagcacggccagcagccaggcctcgcaggagggcagctcgccagagcccccgcctgagtcgcatagcagcagcctggcggaccatgagtacacagccgctggcaccttcaccggggcccaggctggccgcacctcccagcccatggcccctggggtctttctcacacagaggcggccctccgcatcgtctccaaacaacaacaccgctgccaaaggaaaacgtacgaaaaagggcatggcgaccgccaagcagaggcttgggaaaattttgaaaattcatcggaacgggaaactactcctttaagatttggaaagccaggatccttctgctccgctcaggacccccggagccccgcgaaaacatctgcctcccaggagggtgccgagctgcctcaccagggagggccttgcctcttcccggctgccatctccccaacaagcgtctgtcccttcagccggcagagcgagcccagcgtggcccctcaatttgaaaatggacgtcttttctcaagttgctaagagtgatctgtcccagaaaagcggccctgcaagtttgaggaccgcttattccactttaaggacagccttcaggccccctgagcgtgggtgtgattgcagggcctctgcagctctgctgagagcatgagtccttcaaggaagacagagtgagccaatgctcaccagccccagagtcagagctggccacaggctggcagcctccaggggcttaaaaaaaaaggcaaagaacacagaaagaggaggagcaagtgggatgtttatgtccccccttctcttcctgagtgattctcagccaagtccagacagtgctcggcgggtgaggaagggtctgccccgagctttctggttggcaggtggcagcaggatggtgggtgttcagcctgaatgcccaggagcatttctggggggcagctaagactggcagctgggttggtgtgttagcgggcaggggagccattgtggggtccccaggaaagggcaagggctcagccacatcttggggtctgggaggcccaggctaagccatgtggcagggaccgtcttgccctgctggccacactctggagaagcacttctcagccaaggcacccctgccctgggactggcagggcaggggcaggggcagggacagtggccaggcggcccgaggacttacggtcggcacttctctgttctcccgtgtcagcgtgtggtgtcgcctgcatgggtcgtacctggatggtgtgtccaccatcgacacggaggggctggatttgtttctcaggcaatcctgtattttaattttagatgtatttcctgaagcatatttttcatagaatgtagcgtgtaaatagctttttaaataacttcttttttataagagtaaaagtatctttaggaatttctttctatagagttcttcattaacatttatacgagttttttgctgagtcagatggacagttgggttctgatgctttttccttctcctttccttttattattattatttttttcttttaagaactaaggtattgcctgaaaaacaagtgatgtctgtgcagccttacactctgtctttacagaagcaaatagtacacaaaagatctatttcagacacattttgaagatgaatcttcaactttaataccagctctttgttttccttgtatgatgaggggattgggggatacagttattttactagcaccttgtgaagtgtttccgtgttttgtgatgctgtaatttattaatgtttgtagctttttatatttgtacatttcttatgagctttgtttatatacccattacctggatgtttttgtccactgggagaggcagcttggtggaggccttatccactcccacttgtcctgtttggagggacgcagtccctagggcccgagactgggtgggagagggggagtctcacggggccccaggcttattcagaactggtgtttttaaagtttcctttaccctgcccttgttgaacatttatataatctaacctggacatcaagctgttctctctctctcttttttttaattttattattattattttggcaacatgtacatttctaacaaagtttatcgtggctattaaagtgttttatttcccaattcatattactcttgtatcgagtccatgaggtctaaggcaacttagatcaaagttttaaaaaagtaaaaatatttcaggttttgtacagaaccatgtctgtgtcatttctgcctcgactgtagttgttcaccctggcagtgagggtggtggggaggctccagccacctgcgttcctcatggaaagcttcgggttgctcagccaaatcacacacagcaccccaagctggctggcaggagtggacagaagagaccctcgggggctgcaggggtggcagcagcgtttgtcagtcccagccctgaggatgtccttgggaagcctctagaaccttcttttggactcaagggtatggcgtttggctgagtccagtaggcacacacatgtgcaccccagcacggatgcacacccagaagcattcagtcccttgcacggttctagcctaagtctgatgtgattacagctaactaccaggaacagcccttacctgacagaggcactcaaatggtgcaagcccagggagggtgctgagcgcaggggtggggtc

SEQ ID NO: 466308 - DNA, 3458 bp, Homo sapiens
ccgatcctagaggatcccctcgctattcatcggcaccccaagagcaagtcagaggccaagtggaagtacaagaacagcaaacctgactccttactgaagatggaagaggagcagaagctagagaagtcgcctctagctggaaacaaagacaataagttctctttttctttctccaacaagaaactcctcggctccaaggctctcaggcccccgacgagccctggtgtgttcggggccttgcagaacttcaaggaggacaagcccaagcccgtgcgggatgagtatgagtacgtgtcggatgacggtgagctcaagatcgacgagtttcccatcaggaggaagaaaaacgccccgaaaagggacttgtccttcttgttggataagaaggctgtgctgcccacgcctgtcacgaagccaaagctggactcggcagcgtacaagcagagtgatgactcctcggacgagggttcgctgcacatcgacacagacaccaagcccggccgcaatgccagagtcaagaaggagagtgggagctcggcagctggcatcttggacctgctgcaggccagtgaggaggttggcgcgctggagtacaaccccagcagccagcccccggcctcccccagcacacaggaagccattcagggaatgctgtccatggccaacctgcaggcctccgactcctgcctgcagaccacgtggggagctggccaggccaaggggagctcgctggctgcccatggtgcccggaagaatgggggtggcagtggcaagagtgcaggcaaacgactgctgaagagggctgccaagaacagtgtcgacctggacgactacgaggaagagcaggaccacctggatgcctgcttcaaggactcagactacgtttacccctcactggagtcagatgaagacaaccccatctttaagtcccggtcgaagaaaaggaaaggctcagacgacgctccctacagcccaacagcaagggtcggcccatcggtgccaagacaggacaggcctgtgcgtgagggtacacgggtggcttccatcgagaccgggctggcggctgctgcagctaagttgtcccagcaggaggagcagaaaagcaagaaaaaaaagagtgccaagaggaagctgactcctaacaccacctccccttccacctccacctccatctctgccggcaccacctccacctccaccacgccagcctctaccaccccggcctccaccaccccggcctccaccagcacggccagcagccaggcctcgcaggagggcagctcgccagagcccccgcctgagtcgcatagcagcagcctggcggaccatgagtacacagccgctggcaccttcaccggggcccaggctggccgcacctcccagcccatggcccctggggtctttctcacacagaggcggccctccgcatcgtctccaaacaacaacaccgctgccaaaggaaaacgtacgaaaaagggcatggcgaccgccaagcagaggcttgggaaaattttgaaaattcatcggaacgggaaactactcctttaagatttggaaagccaggatccttctgctccgctcaggacccccggagccccgcgaaaacatctgcctcccaggagggtgccgagctgcctcaccagggagggccttgcctcttcccggctgccatctccccaacaagcgtctgtcccttcagccggcagagcgagcccagcgtggcccctcaatttgaaaatggacgtcttttctcaagttgctaagagtgatctgtcccagaaaagcggccctgcaagtttgaggaccgcttattccactttaaggacagccttcaggccccctgagcgtgggtgtgattgcagggcctctgcagctctgctgagagcatgagtccttcaaggaagacagagtgagccaatgctcaccagccccagagtcagagctggccacaggctggcagcctccaggggcttaaaaaaaaaggcaaagaacacagaaagaggaggagcaagtgggatgtttatgtccccccttctcttcctgagtgattctcagccaagtccagacagtgctcggcgggtgaggaagggtctgccccgagctttctggttggcaggtggcagcaggatggtgggtgttcagcctgaatgcccaggagcatttctggggggcagctaagactggcagctgggttggtgtgttagcgggcaggggagccattgtggggtccccaggaaagggcaagggctcagccacatcttggggtctgggaggcccaggctaagccatgtggcagggaccgtcttgccctgctggccacactctggagaagcacttctcagccaaggcacccctgccctgggactggcagggcaggggcaggggcagggacagtggccaggcggcccgaggacttacggtcggcacttctctgttctcccgtgtcagcgtgtggtgtcgcctgcatgggtcgtacctggatggtgtgtccaccatcgacacggaggggctggatttgtttctcaggcaatcctgtattttaattttagatgtatttcctgaagcatatttttcatagaatgtagcgtgtaaatagctttttaaataacttcttttttataagagtaaaagtatctttaggaatttctttctatagagttcttcattaacatttatacgagttttttgctgagtcagatggacagttgggttctgatgctttttccttctcctttccttttattattattatttttttcttttaagaactaaggtattgcctgaaaaacaagtgatgtctgtgcagccttacactctgtctttacagaagcaaatagtacacaaaagatctatttcagacacattttgaagatgaatcttcaactttaataccagctctttgttttccttgtatgatgaggggattgggggatacagttattttactagcaccttgtgaagtgtttccgtgttttgtgatgctgtaatttattaatgtttgtagctttttatatttgtacatttcttatgagctttgtttatatacccattacctggatgtttttgtccactgggagaggcagcttggtggaggccttatccactcccacttgtcctgtttggagggacgcagtccctagggcccgagactgggtgggagagggggagtctcacggggccccaggcttattcagaactggtgtttttaaagtttcctttaccctgcccttgttgaacatttatataatctaacctggacatcaagctgttctctctctctcttttttttaattttattattattattttggcaacatgtacatttctaacaaagtttatcgtggctattaaagtgttttatttcccaattcatattactcttgtatcgagtccatgaggtctaaggcaacttagatcaaagttttaaaaaagtaaaaatatttcaggttttgtacaga

SEQ ID NO: 466309 - DNA, 2592 bp, Homo sapiens
aggcctgcctggccagggggacaggctggggtgggggcagggtagccccaaaccaggaggggtggacaggctgtggcctacagcttgagggggctggcccttcttttccacagcaagggtcggcccatcggtgccaagacaggacaggcctgtgcgtgagggtacacgggtggcttccatcgagaccgggctggcggctgctgcagctaagttgtcccagcaggaggagcagaaaagcaagaaaaaaaagagtgccaagaggaagctgactcctaacaccacctccccttccacctccacctccatctctgccggcaccacctccacctccaccacgccagcctctaccaccccggcctccaccaccccggcctccaccagcacggccagcagccaggcctcgcaggagggcagctcgccagagcccccgcctgagtcgcatagcagcagcctggcggaccatgagtacacagccgctggcaccttcaccggggcccaggctggccgcacctcccagcccatggcccctggggtctttctcacacagaggcggccctccgcatcgtctccaaacaacaacaccgctgccaaaggaaaacgtacgaaaaagggcatggcgaccgccaagcagaggcttgggaaaattttgaaaattcatcggaacgggaaactactcctttaagatttggaaagccaggatccttctgctccgctcaggacccccggagccccgcgaaaacatctgcctcccaggagggtgccgagctgcctcaccagggagggccttgcctcttcccggctgccatctccccaacaagcgtctgtcccttcagccggcagagcgagcccagcgtggcccctcaatttgaaaatggacgtcttttctcaagttgctaagagtgatctgtcccagaaaagcggccctgcaagtttgaggaccgcttattccactttaaggacagccttcaggccccctgagcgtgggtgtgattgcagggcctctgcagctctgctgagagcatgagtccttcaaggaagacagagtgagccaatgctcaccagccccagagtcagagctggccacaggctggcagcctccaggggcttaaaaaaaaaggcaaagaacacagaaagaggaggagcaagtgggatgtttatgtccccccttctcttcctgagtgattctcagccaagtccagacagtgctcggcgggtgaggaagggtctgccccgagctttctggttggcaggtggcagcaggatggtgggtgttcagcctgaatgcccaggagcatttctggggggcagctaagactggcagctgggttggtgtgttagcgggcaggggagccattgtggggtccccaggaaagggcaagggctcagccacatcttggggtctgggaggcccaggctaagccatgtggcagggaccgtcttgccctgctggccacactctggagaagcacttctcagccaaggcacccctgccctgggactggcagggcaggggcaggggcagggacagtggccaggcggcccgaggacttacggtcggcacttctctgttctcccgtgtcagcgtgtggtgtcgcctgcatgggtcgtacctggatggtgtgtccaccatcgacacggaggggctggatttgtttctcaggcaatcctgtattttaattttagatgtatttcctgaagcatatttttcatagaatgtagcgtgtaaatagctttttaaataacttcttttttataagagtaaaagtatctttaggaatttctttctatagagttcttcattaacatttatacgagttttttgctgagtcagatggacagttgggttctgatgctttttccttctcctttccttttattattattatttttttcttttaagaactaaggtattgcctgaaaaacaagtgatgtctgtgcagccttacactctgtctttacagaagcaaatagtacacaaaagatctatttcagacacattttgaagatgaatcttcaactttaataccagctctttgttttccttgtatgatgaggggattgggggatacagttattttactagcaccttgtgaagtgtttccgtgttttgtgatgctgtaatttattaatgtttgtagctttttatatttgtacatttcttatgagctttgtttatatacccattacctggatgtttttgtccactgggagaggcagcttggtggaggccttatccactcccacttgtcctgtttggagggacgcagtccctagggcccgagactgggtgggagagggggagtctcacggggccccaggcttattcagaactggtgtttttaaagtttcctttaccctgcccttgttgaacatttatataatctaacctggacatcaagctgttctctctctctcttttttttaattttattattattattttggcaacatgtacatttctaacaaagtttatcgtggctattaaagtgttttatttcccaattcatattactcttgtatcgagtccatgaggtctaaggcaacttagatcaaagttttaaaaaagtaaaaatatttcaggttttgtacaga

SEQ ID NO: 466310 - DNA, 4421 bp, Homo sapiens
tcacctccttctgtggggcatggtgcttcagaggggtcacattccattgggactagtatgtccttggctgctgtccacctacaagacgctccacaacttctttagctcttctgagcttgtggcctgtctatccaactggcacatccctggagaatctgacagtgctgaagacgtggtggcccgtgtgccaggaagtcagctcacgctgggctacatggaggagcacggcttcaccgagcccatcctcgtccctaagaaagacgggctgggtctggctgtcccggcccccacgttctatgtcagtgacgtcgagaactacgtggggccggaacggagtgtggatgtgacagatgtcaccaagcagaaggactgcaagatgaagctgaaggagtttgtggactattactacagcaccaaccgcaagcgggtcctcaacgtcaccaacctcgagttctctgacacccgaatgtccagcttcgtggagccacctgacattgtaaagaaactgtcatgggtagaaaactactggccagatgatgcattgctggccaagcccaaagtgaccaagtactgcctaatctgcgtgaaggacagttacaccgacttccacatcgactctgggggcgcctctgcctggtaccacgtgctcaagggggagaagaccttctatctcatcaggccggcctcggccaacatctccctgtatgagcgctggcggtctgcctctaaccacagcgagatgttctttgctgaccaggtcgacaaatgctacaagtgcatcgtcaagcagggccagaccctcttcatcccctcaggctggatctacgccacactcacccctgtggactgcctggccttcgcgggacatttcctccacagcctgagtgtggagatgcagatgagagcatatgaagtggaaaggaggttgaaactgggcagcctgactcagtttcccaactttgaaactgcgtgctggtacatggggaagcacctgctggaggcattcaaaggctctcacaaatctgggaagcagctgccccctcatctagtccaaggagctaaaattctcaatggtgctttccgatcgtggacgaagaagcaggctttggcagagcatgaggacgagctcccggagcacttcaaaccttcacagctaatcaaagacctggccaaagagatccggctcagtgagaatgcctccaaagccgtccgaccggaagtgaatactgtcgcctcgtcagatgaggtgtgtgacggggaccgggagaaggaggagcccccgtctcccattgaggccaccccgcctcaatccctcctggagaaagtgtccaaaaaaaagactcccaaaactgtgaagatgcccaagccatccaaaatccccaagcccccgaagccccctaagcccccaaggccccccaaaacgctgaagctcaaagatggaggcaagaagaaagggaagaagtcccgggagtcagcctcacccaccatccccaacctggacctgctcgaagcccacaccaaggaggcactgaccaagatggagccgcccaagaagggcaaggccacaaagagtgtcctgagtgtgcccaacaaagatgtggttcacatgcagaatgatgtggagaggctggaaattcgagagcaaaccaagagcaagtcagaggccaagtggaagtacaagaacagcaaacctgactccttactgaagatggaagaggagcagaagctagagaagtcgcctctagctggaaacaaagacaataagttctctttttctttctccaacaagaaactcctcggctccaaggctctcaggcccccgacgagccctggtgtgttcggggccttgcagaacttcaaggaggacaagcccaagcccgtgcgggatgagtatgagtacgtgtcggatgacggtgagctcaagatcgacgagtttcccatcaggaggaagaaaaacgccccgaaaagggacttgtccttcttgttggataagaaggctgtgctgcccacgcctgtcacgaagccaaagctggactcggcagcgtacaagcagagtgatgactcctcggacgagggttcgctgcacatcgacacagacaccaagcccggccgcaatgccagagtcaagaaggagagtgggagctcggcagctggcatcttggacctgctgcaggccagtgaggaggttggcgcgctggagtacaaccccagcagccagcccccggcctcccccagcacacaggaagccattcagggaatgctgtccatggccaacctgcaggcctccgactcctgcctgcagaccacgtggggagctggccaggccaaggggagctcgctggctgcccatggtgcccggaagaatgggggtggcagtggcaagagtgcaggcaaacgactgctgaagagggctgccaagaacagtgtcgacctggacgactacgaggaagagcaggaccacctggatgcctgcttcaaggactcagactacgtttacccctcactggagtcagatgaagacaaccccatctttaagtcccggtcgaagaaaaggaaaggctcagacgacgctccctacagcccaacagcaagggtcggcccatcggtgccaagacaggacaggcctgtgcgtgagggtacacgggtggcttccatcgagaccgggctggcggctgctgcagctaagttgtcccagcaggaggagcagaaaagcaagaaaaaaaagagtgccaagaggaagctgactcctaacaccacctccccttccacctccacctccatctctgccggcaccacctccacctccaccacgccagcctctaccaccccggcctccaccaccccggcctccaccagcacggccagcagccaggcctcgcaggagggcagctcgccagagcccccgcctgagtcgcatagcagcagcctggcggaccatgagtacacagccgctggcaccttcaccggggcccaggctggccgcacctcccagcccatggcccctggggtctttctcacacagaggcggccctccgcatcgtctccaaacaacaacaccgctgccaaaggaaaacgtacgaaaaagggcatggcgaccgccaagcagaggcttgggaaaattttgaaaattcatcggaacgggaaactactcctttaagatttggaaagccaggatccttctgctccgctcaggacccccggagccccgcgaaaacatctgcctcccaggagggtgccgagctgcctcaccagggagggccttgcctcttcccggctgccatctccccaacaagcgtctgtcccttcagccggcagagcgagcccagcgtggcccctcaatttgaaaatggacgtcttttctcaagttgctaagagtgatctgtcccagaaaagcggccctgcaagtttgaggaccgcttattccactttaaggacagccttcaggccccctgagcgtgggtgtgattgcagggcctctgcagctctgctgagagcatgagtccttcaaggaagacagagtgagccaatgctcaccagccccagagtcagagctggccacaggctggcagcctccaggggcttaaaaaaaaaggcaaagaacacagaaagaggaggagcaagtgggatgtttatgtccccccttctcttcctgagtgattctcagccaagtccagacagtgctcggcgggtgaggaagggtctgccccgagctttctggttggcaggtggcagcaggatggtgggtgttcagcctgaatgcccaggagcatttctggggggcagctaagactggcagctgggttggtgtgttagcgggcaggggagccattgtggggtccccaggaaagggcaagggctcagccacatcttggggtctgggaggcccaggctaagccatgtggcagggaccgtcttgccctgctggccacactctggagaagcacttctcagccaaggcacccctgccctgggactggcagggcaggggcaggggcagggacagtggccaggcggcccgaggacttacggtcggcacttctctgttctcccgtgtcagcgtgtggtgtcgcctgcatgggtcgtacctggatggtgtgtccaccatcgacacggaggggctggatttgtttctcaggcaatcctgtattttaattttagatgtatttcctgaagcatatttttcatagaatgtagcgtgtaaatagctttttaaataacttcttttttataagagtaaaagtatctttaggaatttctttctatagagttcttcattaacatttatacgagttttttgctgagtcagatggacagttgggttctgatgctttttccttctcctttccttttattattattatttttttcttttaagaactaaggtattgcctgacaatcaaaaaaaataagaataaaaaaaa

SEQ ID NO: 466311 - DNA, 4016 bp, Homo sapiens
tcacctccttctgtggggcatggtgcttcagaggggtcacattccattgggactagtatgtccttggctgctgtccacctacaagacgctccacaacttctttagctcttctgagcttgtggcctgtctatccaactggcacatccctggagaatctgacagtgctgaagacgtggtggcccgtgtgccaggaagtcagctcacgctgggctacatggaggagcacggcttcaccgagcccatcctcgtccctaagaaagacgggctgggtctggctgtcccggcccccacgttctatgtcagtgacgtcgagaactacgtggggccggaacggagtgtggatgtgacagatgtcaccaagcagaaggactgcaagatgaagctgaaggagtttgtggactattactacagcaccaaccgcaagcgggtcctcaacgtcaccaacctcgagttctctgacacccgaatgtccagcttcgtggagccacctgacattgtaaagaaactgtcatgggtagaaaactactggccagatgatgcattgctggccaagcccaaagtgaccaagtactgcctaatctgcgtgaaggacagttacaccgacttccacatcgactctgggggcgcctctgcctggtaccacgtgctcaagggggagaagaccttctatctcatcaggccggcctcggccaacatctccctgtatgagcgctggcggtctgcctctaaccacagcgagatgttctttgctgaccaggtcgacaaatgctacaagtgcatcgtcaagcagggccagaccctcttcatcccctcaggctggatctacgccacactcacccctgtggactgcctggccttcgcgggacatttcctccacagcctgagtgtggagatgcagatgagagcatatgaagtggaaaggaggttgaaactgggcagcctgactcagtttcccaactttgaaactgcgtgctggtacatggggaagcacctgctggaggcattcaaaggctctcacaaatctgggaagcagctgccccctcatctagtccaaggagctaaaattctcaatggtgctttccgatcgtggacgaagaagcaggctttggcagagcatgaggacgagctcccggagcacttcaaaccttcacagctaatcaaagacctggccaaagagatccggctcagtgagaatgcctccaaagccgtccgaccggaagtgaatactgtcgcctcgtcagatgaggtgtgtgacggggaccgggagaaggaggagcccccgtctcccattgaggccaccccgcctcaatccctcctggagaaagtgtccaaaaaaaagactcccaaaactgtgaagatgcccaagccatccaaaatccccaagcccccgaagccccctaagcccccaaggccccccaaaacgctgaagctcaaagatggaggcaagaagaaagggaagaagtcccgggagtcagcctcacccaccatccccaacctggacctgctcgaagcccacaccaaggaggcactgaccaagatggagccgcccaagaagggcaaggccacaaagagtgtcctgagtgtgcccaacaaagatgtggttcacatgcagaatgatgtggagaggctggaaattcgagagcaaaccaagagcaagtcagaggccaagtggaagtacaagaacagcaaacctgactccttactgaagatggaagaggagcagaagctagagaagtcgcctctagctggaaacaaagacaataagttctctttttctttctccaacaagaaactcctcggctccaaggctctcaggcccccgacgagccctggtgtgttcggggccttgcagaacttcaaggaggacaagcccaagcccgtgcgggatgagtatgagtacgtgtcggatgacggtgagctcaagatcgacgagtttcccatcaggaggaagaaaaacgccccgaaaagggacttgtccttcttgttggataagaaggctgtgctgcccacgcctgtcacgaagccaaagctggactcggcagcgtacaagcagagtgatgactcctcggacgagggttcgctgcacatcgacacagacaccaagcccggccgcaatgccagagtcaagaaggagagtgggagctcggcagctggcatcttggacctgctgcaggccagtgaggaggttggcgcgctggagtacaaccccagcagccagcccccggcctcccccagcacacaggaagccattcagggaatgctgtccatggccaacctgcaggcctccgactcctgcctgcagaccacgtggggagctggccaggccaaggggagctcgctggctgcccatggtgcccggaagaatgggggtggcagtggcaagagtgcaggcaaacgactgctgaagagggctgccaagaacagtgtcgacctggacgactacgaggaagagcaggaccacctggatgcctgcttcaaggactcagactacgtttacccctcactggagtcagatgaagacaaccccatctttaagtcccggtcgaagaaaaggaaaggctcagacgacgctccctacagcccaacagcaagggtcggcccatcggtgccaagacaggacaggcctgtgcgtgagggtacacgggtggcttccatcgagaccgggctggcggctgctgcagctaagttgtcccagcaggaggagcagaaaagcaagaaaaaaaagagtgccaagaggaagctgactcctaacaccacctccccttccacctccacctccatctctgccggcaccacctccacctccaccacgccagcctctaccaccccggcctccaccaccccggcctccaccagcacggccagcagccaggcctcgcaggagggcagctcgccagagcccccgcctgagtcgcatagcagcagcctggcggaccatgagtacacagccgctggcaccttcaccggggcccaggctggccgcacctcccagcccatggcccctggggtctttctcacacagaggcggccctccgcatcgtctccaaacaacaacaccgctgccaaaggaaaacgtacgaaaaagggcatggcgaccgccaagcagaggcttgggaaaattttgaaaattcatcggaacgggaaactactcctttaagatttggaaagccaggatccttctgctccgctcaggacccccggagccccgcgaaaacatctgcctcccaggagggtgccgagctgcctcaccagggagggccttgcctcttcccggctgccatctccccaacaagcgtctgtcccttcagccggcagagcgagcccagcgtggcccctcaatttgaaaatggacgtcttttctcaagttgctaagagtgatctgtcccagaaaagcggccctgcaagtttgaggaccgcttattccactttaaggacagccttcaggccccctgagcgtgggtgtgattgcagggcctctgcagctctgctgagagcatgagtccttcaaggaagacagagtgagccaatgctcaccagccccagagtcagagctggccacaggctggcagcctccaggggcttaaaaaaaaaggcaaagaacacagaaagaggaggagcaagtgggatgtttatgtccccccttctcttcctgagtgattctcagccaagtccagacagtgctcggcgggtgaggaagggtctgccccgagctttctggttggcaggtggcagcaggatggtgggtgttcagcctgaatgcccaggagcatttctggggggcagctaagactggcagctgggttggtgtgttagcgggcaggggagccattgtggggtccccaggaaagggcaagggctcagccacatcttggggtctgggaggcccaggctaagccatgtggcagggaccgtcttgccctgctggccacactctggagaagcacttctcagccaaggcacccctgccctgggactggcagggcaggggcaggtaaggctcccaggaccttgcactt

SEQ ID NO: 466312 - DNA, 5067 bp, Homo sapiens
tcacctccttctgtggggcatggtgcttcagaggggtcacattccattgggactagtatgtccttggctgctgtccacctacaagacgctccacaacttctttagctcttctgagcttgtggcctgtctatccaactggcacatccctggagaatctgacagtgctgaagacgtggtggcccgtgtgccaggaagtcagctcacgctgggctacatggaggagcacggcttcaccgagcccatcctcgtccctaagaaagacgggctgggtctggctgtcccggcccccacgttctatgtcagtgacgtcgagaactacgtggggccggaacggagtgtggatgtgacagatgtcaccaagcagaaggactgcaagatgaagctgaaggagtttgtggactattactacagcaccaaccgcaagcgggtcctcaacgtcaccaacctcgagttctctgacacccgaatgtccagcttcgtggagccacctgacattgtaaagaaactgtcatgggtagaaaactactggccagatgatgcattgctggccaagcccaaagtgaccaagtactgcctaatctgcgtgaaggacagttacaccgacttccacatcgactctgggggcgcctctgcctggtaccacgtgctcaagggggagaagaccttctatctcatcaggccggcctcggccaacatctccctgtatgagcgctggcggtctgcctctaaccacagcgagatgttctttgctgaccaggtcgacaaatgctacaagtgcatcgtcaagcagggccagaccctcttcatcccctcaggctggatctacgccacactcacccctgtggactgcctggccttcgcgggacatttcctccacagcctgagtgtggagatgcagatgagagcatatgaagtggaaaggaggttgaaactgggcagcctgactcagtttcccaactttgaaactgcgtgctggtacatggggaagcacctgctggaggcattcaaaggctctcacaaatctgggaagcagctgccccctcatctagtccaaggagctaaaattctcaatggtgctttccgatcgtggacgaagaagcaggctttggcagagcatgaggacgagctcccggagcacttcaaaccttcacagctaatcaaagacctggccaaagagatccggctcagtgagaatgcctccaaagccgtccgaccggaagtgaatactgtcgcctcgtcagatgaggtgtgtgacggggaccgggagaaggaggagcccccgtctcccattgaggccaccccgcctcaatccctcctggagaaagtgtccaaaaaaaagactcccaaaactgtgaagatgcccaagccatccaaaatccccaagcccccgaagccccctaagcccccaaggccccccaaaacgctgaagctcaaagatggaggcaagaagaaagggaagaagtcccgggagtcagcctcacccaccatccccaacctggacctgctcgaagcccacaccaaggaggcactgaccaagatggagccgcccaagaagggcaaggccacaaagagtgtcctgagtgtgcccaacaaagatgtggttcacatgcagaatgatgtggagaggctggaaattcgagagcaaaccaagagcaagtcagaggccaagtggaagtacaagaacagcaaacctgactccttactgaagatggaagaggagcagaagctagagaagtcgcctctagctggaaacaaagacaataagttctctttttctttctccaacaagaaactcctcggctccaaggctctcaggcccccgacgagccctggtgtgttcggggccttgcagaacttcaaggaggacaagcccaagcccgtgcgggatgagtatgagtacgtgtcggatgacggtgagctcaagatcgacgagtttcccatcaggaggaagaaaaacgccccgaaaagggacttgtccttcttgttggataagaaggctgtgctgcccacgcctgtcacgaagccaaagctggactcggcagcgtacaagcagagtgatgactcctcggacgagggttcgctgcacatcgacacagacaccaagcccggccgcaatgccagagtcaagaaggagagtgggagctcggcagctggcatcttggacctgctgcaggccagtgaggaggttggcgcgctggagtacaaccccagcagccagcccccggcctcccccagcacacaggaagccattcagggaatgctgtccatggccaacctgcaggcctccgactcctgcctgcagaccacgtggggagctggccaggccaaggggagctcgctggctgcccatggtgcccggaagaatgggggtggcagtggcaagagtgcaggcaaacgactgctgaagagggctgccaagaacagtgtcgacctggacgactacgaggaagagcaggaccacctggatgcctgcttcaaggactcagactacgtttacccctcactggagtcagatgaagacaaccccatctttaagtcccggtcgaagaaaaggaaaggctcagacgacgctccctacagcccaacagcaagggtcggcccatcggtgccaagacaggacaggcctgtgcgtgagggtacacgggtggcttccatcgagaccgggctggcggctgctgcagctaagttgtcccagcaggaggagcagaaaagcaagaaaaaaaagagtgccaagaggaagctgactcctaacaccacctccccttccacctccacctccatctctgccggcaccacctccacctccaccacgccagcctctaccaccccggcctccaccaccccggcctccaccagcacggccagcagccaggcctcgcaggagggcagctcgccagagcccccgcctgagtcgcatagcagcagcctggcggaccatgagtacacagccgctggcaccttcaccggggcccaggctggccgcacctcccagcccatggcccctggggtctttctcacacagaggcggccctccgcatcgtctccaaacaacaacaccgctgccaaaggaaaacgtacgaaaaagggcatggcgaccgccaagcagaggcttgggaaaattttgaaaattcatcggaacgggaaactactcctttaagatttggaaagccaggatccttctgctccgctcaggacccccggagccccgcgaaaacatctgcctcccaggagggtgccgagctgcctcaccagggagggccttgcctcttcccggctgccatctccccaacaagcgtctgtcccttcagccggcagagcgagcccagcgtggcccctcaatttgaaaatggacgtcttttctcaagttgctaagagtgatctgtcccagaaaagcggccctgcaagtttgaggaccgcttattccactttaaggacagccttcaggccccctgagcgtgggtgtgattgcagggcctctgcagctctgctgagagcatgagtccttcaaggaagacagagtgagccaatgctcaccagccccagagtcagagctggccacaggctggcagcctccaggggcttaaaaaaaaaggcaaagaacacagaaagaggaggagcaagtgggatgtttatgtccccccttctcttcctgagtgattctcagccaagtccagacagtgctcggcgggtgaggaagggtctgccccgagctttctggttggcaggtggcagcaggatggtgggtgttcagcctgaatgcccaggagcatttctggggggcagctaagactggcagctgggttggtgtgttagcgggcaggggagccattgtggggtccccaggaaagggcaagggctcagccacatcttggggtctgggaggcccaggctaagccatgtggcagggaccgtcttgccctgctggccacactctggagaagcacttctcagccaaggcacccctgccctgggactggcagggcaggggcaggggcagggacagtggccaggcggcccgaggacttacggtcggcacttctctgttctcccgtgtcagcgtgtggtgtcgcctgcatgggtcgtacctggatggtgtgtccaccatcgacacggaggggctggatttgtttctcaggcaatcctgtattttaattttagatgtatttcctgaagcatatttttcatagaatgtagcgtgtaaatagctttttaaataacttcttttttataagagtaaaagtatctttaggaatttctttctatagagttcttcattaacatttatacgagttttttgctgagtcagatggacagttgggttctgatgctttttccttctcctttccttttattattattatttttttcttttaagaactaaggtattgcctgaaaaacaagtgatgtctgtgcagccttacactctgtctttacagaagcaaatagtacacaaaagatctatttcagacacattttgaagatgaatcttcaactttaataccagctctttgttttccttgtatgatgaggggattgggggatacagttattttactagcaccttgtgaagtgtttccgtgttttgtgatgctgtaatttattaatgtttgtagctttttatatttgtacatttcttatgagctttgtttatatacccattacctggatgtttttgtccactgggagaggcagcttggtggaggccttatccactcccacttgtcctgtttggagggacgcagtccctagggcccgagactgggtgggagagggggagtctcacggggccccaggcttattcagaactggtgtttttaaagtttcctttaccctgcccttgttgaacatttatataatctaacctggacatcaagctgttctctctctctcttttttttaattttattattattattttggcaacatgtacatttctaacaaagtttatcgtggctattaaagtgttttatttcccaattcatattactcttgtatcgagtccatgaggtctaaggcaacttagatcaaagttttaaaaaagtaaaaatatttcaggttttgtacaga

SEQ ID NO: 466313 - DNA, 5014 bp, Homo sapiens
tcacctccttctgtggggcatggtgcttcagaggggtcacattccattgggactagtatgtccttggctgctgtccacctacaagacgctccacaacttctttagctcttctgagcttgtggcctgtctatccaactggcacatccctggagaatctgacagtgctgaagacgtggtggcccgtgtgccaggaagtcagctcacgctgggctacatggaggagcacggcttcaccgagcccatcctcgtccctaagaaagacgggctgggtctggctgtcccggcccccacgttctatgtcagtgacgtcgagaactacgtggggccggaacggagtgtggatgtgacagatgtcaccaagcagaaggactgcaagatgaagctgaaggagtttgtggactattactacagcaccaaccgcaagcgggtcctcaacgtcaccaacctcgagttctctgacacccgaatgtccagcttcgtggagccacctgacattgtaaagaaactgtcatgggtagaaaactactggccagatgatgcattgctggccaagcccaaagtgaccaagtactgcctaatctgcgtgaaggacagttacaccgacttccacatcgactctgggggcgcctctgcctggtaccacgtgctcaagggggagaagaccttctatctcatcaggccggcctcggccaacatctccctgtatgagcgctggcggtctgcctctaaccacagcgagatgttctttgctgaccaggtcgacaaatgctacaagtgcatcgtcaagcagggccagaccctcttcatcccctcaggctggatctacgccacactcacccctgtggactgcctggccttcgcgggacatttcctccacagcctgagtgtggagatgcagatgagagcatatgaagtggaaaggaggttgaaactgggcagcctgactcagtttcccaactttgaaactgcgtgctggtacatggggaagcacctgctggaggcattcaaaggctctcacaaatctgggaagcagctgccccctcatctagtccaaggagctaaaattctcaatggtgctttccgatcgtggacgaagaagcaggctttggcagagcatgaggacgagctcccggagcacttcaaaccttcacagctaatcaaagacctggccaaagagatccggctcagtgagaatgcctccaaagccgtccgaccggaagtgaatactgtcgcctcgtcagatgaggtgtgtgacggggaccgggagaaggaggagcccccgtctcccattgaggccaccccgcctcaatccctcctggagaaagtgtccaaaaaaaagactcccaaaactgtgaagatgcccaagccatccaaaatccccaagcccccgaagccccctaagcccccaaggccccccaaaacgctgaagctcaaagatggaggcaagaagaaagggaagaagtcccgggagtcagcctcacccaccatccccaacctggacctgctcgaagcccacaccaaggaggcactgaccaagatggagccgcccaagaagggcaaggccacaaagagtgtcctgagtgtgcccaacaaagatgtggttcacatgcagaatgatgtggagaggctggaaattcgagagcaaaccaagagcaagtcagaggccaagtggaagtacaagaacagcaaacctgactccttactgaagatggaagaggagcagaagctagagaagtcgcctctagctggaaacaaagacaataagttctctttttctttctccaacaagaaactcctcggctccaaggctctcaggcccccgacgagccctggtgtgttcggggccttgcagaacttcaaggaggacaagcccaagcccgtgcgggatgagtatgagtacgtgtcggatgacggtgagctcaagatcgacgagtttcccatcaggaggaagaaaaacgccccgaaaagggacttgtccttcttgttggataagaaggctgtgctgcccacgcctgtcacgaagccaaagctggactcggcagcgtacaagcagagtgatgactcctcggacgagggttcgctgcacatcgacacagacaccaagcccggccgcaatgccagagtcaagaaggagagtgggagctcggcagctggcatcttggacctgctgcaggccagtgaggaggttggcgcgctggagtacaaccccagcagccagcccccggcctcccccagcacacaggaagccattcagggaatgctgtccatggccaacctgcaggcctccgactcctgcctgcagaccacgtggggagctggccaggccaaggggagctcgctggctgcccatggtgcccggaagaatgggggtggcagtggcaagagtgcaggcaaacgactgctgaagagggctgccaagaacagtgtcgacctggacgactacgaggaagagcaggaccacctggatgcctgcttcaaggactcagactacgtttacccctcactggagtcagatgaagacaaccccatctttaagtcccggtcgaagaaaaggaaaggctcagacgacgctccctacagcccaacagcaagggtcggcccatcggtgccaagacaggacaggcctgtgcgtgagggtacacgggtggcttccatcgagaccgggctggcggctgctgcagctaagttgtcccagcaggaggagcagaaaagcaagaaaaaaaagagtgccaagaggaagctgactcctaacaccacctccccttccacctccacctccatctctgccggcaccacctccacctccaccacgccagcctctaccaccccggcctccaccaccccggcctccaccagcacggccagcagccaggcctcgcaggagggcagctcgccagagcccccgcctgagtcgcatagcagcagcctggcggaccatgagtacacagccgctggcaccttcaccggggcccaggctggccgcacctcccagcccatggcccctggggtctttctcacacagaggcggccctccgcatcgtctccaaacaacaacaccgctgccaaaggaaaacgtacgaaaaagggcatggcgaccgccaagcagaggcttgggaaaattttgaaaattcatcggaacgggaaactactcctttaagatttggaaagccaggatccttctgctccgctcaggacccccggagccccgcgaaaacatctgcctcccaggagggtgccgagctgcctcaccagggagggccttgcctcttcccggctgccatctccccaacaagcgtctgtcccttcagccggcagagcgagcccagcgtggcccctcaatttgaaaatggacgtcttttctcaagttgctaagagtgatctgtcccagaaaagcggccctgcaagtttgaggaccgcttattccactttaaggacagccttcaggccccctgagcgtgggtgtgattgcagggcctctgcagctctgctgagagcatgagtccttcaaggaagacagagtgagccaatgctcaccagccccagagtcagagctggccacaggctggcagcctccaggggcttaaaaaaaaaggcaaagaacacagaaagaggaggagcaagtgggatgtttatgtccccccttctcttcctgagtgattctcagccaagtccagacagtgctcggcgggtgaggaagggtctgccccgagctttctggttggcaggtggcagcaggatggtgggtgttcagcctgaatgcccaggagcatttctggggggcagctaagactggcagctgggttggtgtgttagcgggcaggggagccattgtggggtccccaggaaagggcaagggctcagccacatcttggggtctgggaggcccaggctaagccatgtggcagggaccgtcttgccctgctggccacactctggagaagcacttctcagccaaggcacccctgccctgggactggcagggcaggggcaggggcagggacagtggccaggcggcccgaggacttacggtcggcacttctctgttctcccgtgtcagcgtgtggtgtcgcctgcatgggtcgtacctggatggtgtgtccaccatcgacacggaggggctggatttgtttctcaggcaatcctgtattttaattttagatgtatttcctgaagcatatttttcatagaatgtagcgtgtaaatagctttttaaataacttcttttttataagagtaaaagtatctttaggaatttctttctatagagttcttcattaacatttatacgagttttttgctgagtcagatggacagttgggttctgatgctttttccttctcctttccttttattattattatttttttcttttaagaactaaggtattgcctgatacacaaaagatctatttcagacacattttgaagatgaatcttcaactttaataccagctctttgttttccttgtatgatgaggggattgggggatacagttattttactagcaccttgtgaagtgtttccgtgttttgtgatgctgtaatttattaatgtttgtagctttttatatttgtacatttcttatgagctttgtttatatacccattacctggatgtttttgtccactgggagaggcagcttggtggaggccttatccactcccacttgtcctgtttggagggacgcagtccctagggcccgagactgggtgggagagggggagtctcacggggccccaggcttattcagaactggtgtttttaaagtttcctttaccctgcccttgttgaacatttatataatctaacctggacatcaagctgttctctctctctcttttttttaattttattattattattttggcaacatgtacatttctaacaaagtttatcgtggctattaaagtgttttatttcccaattcatattactcttgtatcgagtccatgaggtctaaggcaacttagatcaaagttttaaaaaagtaaaaatatttcaggttttgtacaga

SEQ ID NO: 466314 - DNA, 4436 bp, Homo sapiens
  misc_feature (4375)..(4375): n is a, c, g, or t
  misc_feature (4387)..(4387): n is a, c, g, or t
  misc_feature (4398)..(4398): n is a, c, g, or t
tcacctccttctgtggggcatggtgcttcagaggggtcacattccattgggactagtatgtccttggctgctgtccacctacaagacgctccacaacttctttagctcttctgagcttgtggcctgtctatccaactggcacatccctggagaatctgacagtgctgaagacgtggtggcccgtgtgccaggaagtcagctcacgctgggctacatggaggagcacggcttcaccgagcccatcctcgtccctaagaaagacgggctgggtctggctgtcccggcccccacgttctatgtcagtgacgtcgagaactacgtggggccggaacggagtgtggatgtgacagatgtcaccaagcagaaggactgcaagatgaagctgaaggagtttgtggactattactacagcaccaaccgcaagcgggtcctcaacgtcaccaacctcgagttctctgacacccgaatgtccagcttcgtggagccacctgacattgtaaagaaactgtcatgggtagaaaactactggccagatgatgcattgctggccaagcccaaagtgaccaagtactgcctaatctgcgtgaaggacagttacaccgacttccacatcgactctgggggcgcctctgcctggtaccacgtgctcaagggggagaagaccttctatctcatcaggccggcctcggccaacatctccctgtatgagcgctggcggtctgcctctaaccacagcgagatgttctttgctgaccaggtcgacaaatgctacaagtgcatcgtcaagcagggccagaccctcttcatcccctcaggctggatctacgccacactcacccctgtggactgcctggccttcgcgggacatttcctccacagcctgagtgtggagatgcagatgagagcatatgaagtggaaaggaggttgaaactgggcagcctgactcagtttcccaactttgaaactgcgtgctggtacatggggaagcacctgctggaggcattcaaaggctctcacaaatctgggaagcagctgccccctcatctagtccaaggagctaaaattctcaatggtgctttccgatcgtggacgaagaagcaggctttggcagagcatgaggacgagctcccggagcacttcaaaccttcacagctaatcaaagacctggccaaagagatccggctcagtgagaatgcctccaaagccgtccgaccggaagtgaatactgtcgcctcgtcagatgaggtgtgtgacggggaccgggagaaggaggagcccccgtctcccattgaggccaccccgcctcaatccctcctggagaaagtgtccaaaaaaaagactcccaaaactgtgaagatgcccaagccatccaaaatccccaagcccccgaagccccctaagcccccaaggccccccaaaacgctgaagctcaaagatggaggcaagaagaaagggaagaagtcccgggagtcagcctcacccaccatccccaacctggacctgctcgaagcccacaccaaggaggcactgaccaagatggagccgcccaagaagggcaaggccacaaagagtgtcctgagtgtgcccaacaaagatgtggttcacatgcagaatgatgtggagaggctggaaattcgagagcaaaccaagagcaagtcagaggccaagtggaagtacaagaacagcaaacctgactccttactgaagatggaagaggagcagaagctagagaagtcgcctctagctggaaacaaagacaataagttctctttttctttctccaacaagaaactcctcggctccaaggctctcaggcccccgacgagccctggtgtgttcggggccttgcagaacttcaaggaggacaagcccaagcccgtgcgggatgagtatgagtacgtgtcggatgacggtgagctcaagatcgacgagtttcccatcaggaggaagaaaaacgccccgaaaagggacttgtccttcttgttggataagaaggctgtgctgcccacgcctgtcacgaagccaaagctggactcggcagcgtacaagcagagtgatgactcctcggacgagggttcgctgcacatcgacacagacaccaagcccggccgcaatgccagagtcaagaaggagagtgggagctcggcagctggcatcttggacctgctgcaggccagtgaggaggttggcgcgctggagtacaaccccagcagccagcccccggcctcccccagcacacaggaagccattcagggaatgctgtccatggccaacctgcaggcctccgactcctgcctgcagaccacgtggggagctggccaggccaaggggagctcgctggctgcccatggtgcccggaagaatgggggtggcagtggcaagagtgcaggcaaacgactgctgaagagggctgccaagaacagtgtcgacctggacgactacgaggaagagcaggaccacctggatgcctgcttcaaggactcagactacgtttacccctcactggagtcagatgaagacaaccccatctttaagtcccggtcgaagaaaaggaaaggctcagacgacgctccctacagcccaacagcaagggtcggcccatcggtgccaagacaggacaggcctgtgcgtgagggtacacgggtggcttccatcgagaccgggctggcggctgctgcagctaagttgtcccagcaggaggagcagaaaagcaagaaaaaaaagagtgccaagaggaagctgactcctaacaccacctccccttccacctccacctccatctctgccggcaccacctccacctccaccacgccagcctctaccaccccggcctccaccaccccggcctccaccagcacggccagcagccaggcctcgcaggagggcagctcgccagagcccccgcctgagtcgcatagcagcagcctggcggaccatgagtacacagccgctggcaccttcaccggggcccaggctggccgcacctcccagcccatggcccctggggtctttctcacacagaggcggccctccgcatcgtctccaaacaacaacaccgctgccaaaggaaaacgtacgaaaaagggcatggcgaccgccaagcagaggcttgggaaaattttgaaaattcatcggaacgggaaactactcctttaagatttggaaagccaggatccttctgctccgctcaggacccccggagccccgcgaaaacatctgcctcccaggagggtgccgagctgcctcaccagggagggccttgcctcttcccggctgccatctccccaacaagcgtctgtcccttcagccggcagagcgagcccagcgtggcccctcaatttgaaaatggacgtcttttctcaagttgctaagagtgatctgtcccagaaaagcggccctgcaagtttgaggaccgcttattccactttaaggacagccttcaggccccctgagcgtgggtgtgattgcagggcctctgcagctctgctgagagcatgagtccttcaaggaagacagagtgagccaatgctcaccagccccagagtcagagctggccacaggctggcagcctccaggggcttaaaaaaaaaggcaaagaacacagaaagaggaggagcaagtgggatgtttatgtccccccttctcttcctgagtgattctcagccaagtccagacagtgctcggcgggtgaggaagggtctgccccgagctttctggttggcaggtggcagcaggatggtgggtgttcagcctgaatgcccaggagcatttctggggggcagctaagactggcagctgggttggtgtgttagcgggcaggggagccattgtggggtccccaggaaagggcaagggctcagccacatcttggggtctgggaggcccaggctaagccatgtggcagggaccgtcttgccctgctggccacactctggagaagcacttctcagccaaggcacccctgccctgggactggcagggcaggggcaggggcagggacagtggccaggcggcccgaggacttacggtcggcacttctctgttctcccgtgtcagcgtgtggtgtcgcctgcatgggtcgtacctggatggtgtgtccaccatcgacacggaggggctggatttgtttctcaggcaatcctgtattttaattttagatgtatttcctgaagcatatttttcatagaatgtagcgtgtaaatagctttttaaataacttcttttttataagagtaaaagtatctttaggaatttctttctatagagttcttcattaacatttatacgagttttttgctgagtcagatggacagttgggttctgatgctttttccttcccgcctgccaggctggcccaggcagtgctcccaccantctatgagcgtntccggggccgnggatctgggcagcatccatggtgccggggccatcccca

SEQ ID NO: 466315 - DNA, 3513 bp, Homo sapiens
tcacctccttctgtggggcatggtgcttcagaggggtcacattccattgggactagtatgtccttggctgctgtccacctacaagacgctccacaacttctttagctcttctgagcttgtggcctgtctatccaactggcacatccctggagaatctgacagtgctgaagacgtggtggcccgtgtgccaggaagtcagctcacgctgggctacatggaggagcacggcttcaccgagcccatcctcgtccctaagaaagacgggctgggtctggctgtcccggcccccacgttctatgtcagtgacgtcgagaactacgtggggccggaacggagtgtggatgtgacagatgtcaccaagcagaaggactgcaagatgaagctgaaggagtttgtggactattactacagcaccaaccgcaagcgggtcctcaacgtcaccaacctcgagttctctgacacccgaatgtccagcttcgtggagccacctgacattgtaaagaaactgtcatgggtagaaaactactggccagatgatgcattgctggccaagcccaaagtgaccaagtactgcctaatctgcgtgaaggacagttacaccgacttccacatcgactctgggggcgcctctgcctggtaccacgtgctcaagggggagaagaccttctatctcatcaggccggcctcggccaacatctccctgtatgagcgctggcggtctgcctctaaccacagcgagatgttctttgctgaccaggtcgacaaatgctacaagtgcatcgtcaagcagggccagaccctcttcatcccctcaggctggatctacgccacactcacccctgtggactgcctggccttcgcgggacatttcctccacagcctgagtgtggagatgcagatgagagcatatgaagtggaaaggaggttgaaactgggcagcctgactcagtttcccaactttgaaactgcgtgctggtacatggggaagcacctgctggaggcattcaaaggctctcacaaatctgggaagcagctgccccctcatctagtccaaggagctaaaattctcaatggtgctttccgatcgtggacgaagaagcaggctttggcagagcatgaggacgagctcccggagcacttcaaaccttcacagctaatcaaagacctggccaaagagatccggctcagtgagaatgcctccaaagccgtccgaccggaagtgaatactgtcgcctcgtcagatgaggtgtgtgacggggaccgggagaaggaggagcccccgtctcccattgaggccaccccgcctcaatccctcctggagaaagtgtccaaaaaaaagactcccaaaactgtgaagatgcccaagccatccaaaatccccaagcccccgaagccccctaagcccccaaggccccccaaaacgctgaagctcaaagatggaggcaagaagaaagggaagaagtcccgggagtcagcctcacccaccatccccaacctggacctgctcgaagcccacaccaaggaggcactgaccaagatggagccgcccaagaagggcaaggccacaaagagtgtcctgagtgtgcccaacaaagatgtggttcacatgcagaatgatgtggagaggctggaaattcgagagcaaaccaagagcaagtcagaggccaagtggaagtacaagaacagcaaacctgactccttactgaagatggaagaggagcagaagctagagaagtcgcctctagctggaaacaaagacaataagttctctttttctttctccaacaagaaactcctcggctccaaggctctcaggcccccgacgagccctggtgtgttcggggccttgcagaacttcaaggaggacaagcccaagcccgtgcgggatgagtatgagtacgtgtcggatgacggtgagctcaagatcgacgagtttcccatcaggaggaagaaaaacgccccgaaaagggacttgtccttcttgttggataagaaggctgtgctgcccacgcctgtcacgaagccaaagctggactcggcagcgtacaagcagagtgatgactcctcggacgagggttcgctgcacatcgacacagacaccaagcccggccgcaatgccagagtcaagaaggagagtgggagctcggcagctggcatcttggacctgctgcaggccagtgaggaggttggcgcgctggagtacaaccccagcagccagcccccggcctcccccagcacacaggaagccattcagggaatgctgtccatggccaacctgcaggcctccgactcctgcctgcagaccacgtggggagctggccaggccaaggggagctcgctggctgcccatggtgcccggaagaatgggggtggcagtggcaagagtgcaggcaaacgactgctgaagagggctgccaagaacagtgtcgacctggacgactacgaggaagagcaggaccacctggatgcctgcttcaaggactcagactacgtttacccctcactggagtcagatgaagacaaccccatctttaagtcccggtcgaagaaaaggaaaggctcagacgacgctccctacagcccaacagcaagggtcggcccatcggtgccaagacaggacaggcctgtgcgtgagggtacacgggtggcttccatcgagaccgggctggcggctgctgcagctaagttgtcccagcaggaggagcagaaaagcaagaaaaaaaagagtgccaagaggaagctgactcctaacaccacctccccttccacctccacctccatctctgccggcaccacctccacctccaccacgccagcctctaccaccccggcctccaccaccccggcctccaccagcacggccagcagccaggcctcgcaggagggcagctcgccagagcccccgcctgagtcgcatagcagcagcctggcggaccatgagtacacagccgctggcaccttcaccggggcccaggctggccgcacctcccagcccatggcccctggggtctttctcacacagaggcggccctccgcatcgtctccaaacaacaacaccgctgccaaaggaaaacgtacgaaaaagggcatggcgaccgccaagcagaggcttgggaaaattttgaaaattcatcggaacgggaaactactcctttaagatttggaaagccaggatccttctgctccgctcaggacccccggagccccgcgaaaacatctgcctcccaggagggtgccgagctgcctcaccagggagggccttgcctcttcccggctgccatctccccaacaagcgtctgtcccttcagccggcagagcgagcccagcgtggcccctcaatttgaaaatggacgtcttttctcaagttgctaagagtgatctgtcccagaaaagcggccctgcaagtttgaggaccgcttattccactttaaggacagccttcaggccccctgagcgtgggtgtgattgcagggcctctgcagctctgttaccattctgatgttggagcggccc

SEQ ID NO: 466316 - DNA, 1083 bp, Homo sapiens
aggcgggaacaacagctgcgccatgtgcagcctggccaacatctccctctgcggctcctgcaacaagggctacaagctgtatcgaggccgctgtgaaccacagaacgtggactcggagcggagcgagcagttcatcagctttgagactgacctggacttccaggacctggagctgaagtacctgctgcagaagatggactcacgcctctacgtccacaccaccttcatcagcaacgagatccgcctcgacaccttctttgaccctcggtggcgcaagcgcatgtccctcactctcaagagcaacaagaaccgcatggacttcatccacatggtgatcggcatgtccatgcgcatctgccagatgcgcaacagcagcctggaccccatgttctttgtctatgtcaacccctttagcgggagccattcggagggctggaacatgcccttcggggaatttggctacccacgctgggagaagatccgtctccaaaacagccagtgctacaactggactcttttgctgggcaatcggtggaaaacatttttcgagacggtccacatctacctacgtagtcggactcggctacctaccctactgcgaaatgagactggccagggccccgtggacctgtcggatccctccaagaggcagttctacatcaagatctcagacgtgcaggtgtttgggtatagcctgaggttcaacgccgacctcctgcgcagtgcagtgcagcaggtcaaccagtcctacacacagggcggccagttctattcctcttcgtcggtgatgctcctcttgttggatattcgggaccgaattaatcgcctggcccctcctgtggccccggggaaaccccagctggacttgttctcctgtatgctgaaacaccgcctgaaactgaccaacagcgagatcatcagggtgaaccacgccttggacctgtacaacacggagatcctcaaacagtcggaccagatgacagccaaactctgctaacccgggactccttgccatggacttttcctgttgttgtacacacacaacagaacaaaatgaagcaaaacaaaacaaaaaaacccaca

SEQ ID NO: 466317 - DNA, 1819 bp, Homo sapiens
aggcgggaacaacagctgcgccatgtgcagcctggccaacatctccctctgcggctcctgcaacaagggctacaagctgtatcgaggccgctgtgaaccacagaacgtggactcggagcggagcgagcagttcatcagctttgagactgacctggacttccaggacctggagctgaagtacctgctgcagaagatggactcacgcctctacgtccacaccaccttcatcagcaacgagatccgcctcgacaccttctttgaccctcggtggcgcaagcgcatgtccctcactctcaagagcaacaagaaccgcatggacttcatccacatggtgatcggcatgtccatgcgcatctgccagatgcgcaacagcagcctggaccccatgttctttgtctatgtcaacccctttagcgggagccattcggagggctggaacatgcccttcggggaatttggctacccacgctgggagaagatccgtctccaaaacagccagtgctacaactggactcttttgctgggcaatcggtggaaaacatttttcgagacggtccacatctacctacgtagtcggactcggctacctaccctactgcgaaatgagactggccagggccccgtggacctgtcggatccctccaagaggcagttctacatcaagatctcagacgtgcaggtgtttgggtatagcctgaggttcaacgccgacctcctgcgcagtgcagtgcagcaggtcaaccagtcctacacacagggcggccagttctattcctcttcgtcggtgatgctcctcttgttggatattcgggaccgaattaatcgcctggcccctcctgtggccccggggaaaccccagctggacttgttctcctgtatgctgaaacaccgcctgaaactgaccaacagcgagatcatcagggtgaaccacgccttggacctgtacaacacggagatcctcaaacagtcggaccagatgacagccaaactctgctaacccgggactccttgccatggacttttcctgttgttgtacacacacaacagaacaaaatgaagcaaaacaaaacaaaaaaacccacaaaaatttgtaaaatgtaattaatattcaaagaaaaggaggaaaatcttcatttgttggaaatgaaaacgttctagcaactgtataaaagcgttgggcatgtttgttatttctatactcactctgtcatgaagaagggtctcagccttttgtggagcattgagggagttgcttcttaggcctcaggtgctgtattgggggagaagggagaaagcatatgcaatgaattgtaaagatctctgctgtgcaggtgctaagattaaacactaaaaagaaagagagatatatgtaatgtacaactgacactgccatttttcctttttggaggaaatggacatagataaagaagatatttcttcggttaagatttattccctctttatgcttaattaattccttgtgtgtgtgtgttttctcttctttttgactctttctcacacaggggtgggaatacagtgacaatgctatcttacccatagggcatctttcattctgaatacattaaaactaatgcaagctggccagcacttccaaagactcctaatgtaataagcccttgtatttacacagtactttacagattgctaagcaatcttcatatgcagtgtgctacttaatccttatcacaattcaattaggaccttcaatctgagttcttttccagacttcactcactgcagttgtaggaaaaattcttcccttcaccttgaaaatattaactcagtcacttcatcttat

SEQ ID NO: 466318 - DNA, 4498 bp, Homo sapiens
agcgcagaccgcacgggccctccgcgtaccaaggcacacgcatgcgcattggttctgggagccctgaagacctggcggagcccagcgcggatggaggcctgagggtggcgggggcggagcgcgccgcgagctgggggcatgtccgcggcgggcgccgtctagaggaaggccaagcagccgccaccacgctgtcggtcgcggagagacgcaagcgagccaggccgagggccgcggcggcgatgcagcgacggcgtcgccctccgccgcccacctcccggctgcccgagggctgcgggggaggaggcggtggcagcgaggaggtggaagtgcagttttccgccgggcgttggggctcggccgcggcggtttcggcggcagcggcggcggccacgcgcagcaccgaggaggaggaggagaggcttgagcgtgagcacttctggaagatcattaatgccttccgctactacggcaccagtatgcatgagcgggtgaaccgaacagaaagacagtttcgatcacttccagctaaccaacagaaactacttcctcagtttcttcttcacttggacaagatccggaaatgcattgatcataatcaagaaatactactgaccattgtgaatgattgcatacatatgtttgaaaataaagaatatggagaagatgggaatggaaagattatgccagcatctacatttgacatggataagttaaaatccacgctgaaacagtttgtgagagactggagtgaaactgggaaagcagaaagggatgcctgttaccagccaatcattaaagaaattttaaaaaattttccaaaagagagatgggatccttctaaagtaaatattctggtacctggtgctggactaggaagactggcctgggaaatagctatgctaggttatgcttgtcaaggaaatgaatggagtttttttatgctcttttcttccaactttgtactcaacagatgttctgaaattaataaatataaactttatccttggatccatcagtttagcaataaccggagatcagctgatcagattcgacccatctttttccctgatgttgacccccacagtcttcctcctggttctaacttttctatgacagcaggagattttcaagagatttattcagaatgcaatacctgggactgtattgctacctgtttcttcatagacacagctcacaatgtaattgattatattgatacaatatggaaaatactcaagccaggtggaatttggataaatctaggtcctctgctgtaccactttgaaaatctggcaaatgaactttccatagaattgagctatgaggatataaaaaacgttgttctgcagtatggattcaaggtagaggtggaaaaagaatctgtattgtcaacatatactgtgaatgatctctctatgatgaaatactactatgaatgtgtcttgtttgtggtccgtaagccacaataatggtctcaagtgataccacctggaaaaaagtttagtaagaacaaatgctgaaatcaacgactcaaaatcaactatcagtgatgacaggacacaacctcaaatcagtggtgccttcttattcctaacgaaatttagaaatagtgtctattttcttaatatgtctattgctttttcagaaatatactatgccatgcagatttgtactacacaagtaaaaatggaggaaatgtcttgaagtatactttttccttgaagcccagaattgtgtttcagtaggaaaaaaacctaatctccagtgtcttcatgatgctgtccattgcaagtctgccgaattaatgactaatagtattgaagtacataataatcttcctttttttgttgttttgtatgcattgcacatgtaacttttagaagagtctaaggatcctcagtcatattcaacatctggagttgggactttgttcactttcaatctaagaaaactatgcgtaaaatatgtctttttttttttttttcttcagagacaggatcccgctctgtctcccaggccggagtgcagtggcacgatcatagctcactgtaacctcaaactcctggactcaagcgatcttcctgccttagccttagcctcctgagtagctaggactgtaggcatgtaccaccgcgcctggcctgtgtctattttatcattcagattaatttaattttgtattttctggctcagatgaacttaaagaagcatcaaacatttcttttttatgaaatgttaaatttaatagcatcacaggccggtaaaatatattcaagtaacagaaatatcaaagtcttttggccacaataaactgaacactttatgaaagcatactcatcatggatcactttgaaatatacgagatctcaacattcaaagtgagaaataaaaagcctttattaaaagtagtgctaggaaacagagaaaataagaataaaatttacccatttgaaatatgtgattttcagactctaaatgaatacagagtttgacagtgtgatgtttacaataatgtcttttctttagaatatctggattatgaaagcaagcacttttttcattaaaaaaattatatactaggaaaaactgtcataatagtattaatgtggggaattttgattatgaaattcagggatatattactgcccgtggtctgtgtcttcaatattgtaagcagcagccatcatgtaatttcagattaataccaattttgttccctgatagatggagcttaaacagtatatgctgctttaaatttctacctctagcagatctttattggagggagttttcctttgtattttttaatgtatgatattctgtttccagtagcttggaaagtagagatgactaatgttttagccttttcttggagaaaaggaagaactcttcttgaatattttcacagatgattgtgattgctttaaatgacctctgtggcaatttaaattagatggatttaatctcagtaatgtgctggtcgcataaatgtcatgttttaataggaaaagttacttgtaaatctttagacctttgttgtcacttaggctggggagtcactaccctatttggcatcttactagttggggggaccttttccgtgtacagtgatgggacttttgtgacctttactctcactatgcaatagagggtttcatgtagttaatctgacatgtcaaaattgggaagactgtaaccttttttttttttttttaagatttctcttttttgtgtccctcaatacttagcagatgttcatttggtggaaattcttattacttacatgaatgagtttgaatttagtggcaaggaagaaaaaaaaaactcaaattattgttttaaaagaagaaaacttgcaaagtacataagtattttttaaaaatcaatcgaacagaaaggaatgcatgctgtttttcaatggcttagacatgctttttattcactgactagtattcacttttttacaacttgtatcaaaacaaatgatctttgtttttgtcacaggcaaaaacaggttgacactggtgggttggctttattaattaattttttttctattaggttttctttaataatgttaaatttctaaattatagcatatgttttagttaattctgaaatcagttacttcatttgttaatttatccctcatatcatgaatattgttttttaaatgttctatacaaatttgcatcacttcttttcttacagcttttgcagttaatatattctaaacttgaaaatgtggtatcaatcaataatagaagtatcactggaggatttatttagctttgtatttcttaattttagtcctagctactaaagtatgtaagccttaaagtttaaaatgtttttcttaaattagctttatacacaaacattttcatttactttatgaaatgggaggagatagtccactgtgcttatgtttttttgtttaatttctatattctgaagcagtgcagatatagggtatgctaatcaagtgagcaaggtggaacatgtacaatataaggagaagctgtaaaaatcacagtataaaattatgaagtttggtaactgtaaaatgtactgtatttatatgtaactctcattctaaaagttgccacaaaagctgaattggaagcttcatgtctgcatgaaatttcctatatttttaatgtgtatgatgaaattaatttttcttgaatattaaagtctgccaattgctatgaaacgatagttgcttggttttcatctaaattaatgtaactatagatgtggggattttaatgagttgagcatatatacttttgaactcttggattagcctatttttatatgcttctaagaagtcagtaacatgaatacttcgccttataatatgccaggccttatactaactattttcactttgtttcattcaagttcactgtaataaagttagaatccattgaggaaaatgaataatcttgattttcagttttgttaaataatggaaaaagaactataaaaggaa

SEQ ID NO: 466319 - DNA, 279 bp, Homo sapiens
actacagcagaattaaggattcagagaaaccaccagtatgcatgagcgggtgaaccgaacagaaagacagtttcgatcacttccagctaaccaacagaaactacttcctcagtttcttcttcacttggacaagatccggaaatgcattgatcataatcaagaaatactactgaccattgtgaatgattgcatacatatgtttgaaaataaagaatatggagaagatgatggatacagttgggccactccagtgtgagcctctccatgctgccccatcaa

SEQ ID NO: 466320 - DNA, 4167 bp, Homo sapiens
agcgcagaccgcacgggccctccgcgtaccaaggcacacgcatgcgcattggttctgggagccctgaagacctggcggagcccagcgcggatggaggcctgagggtggcgggggcggagcgcgccgcgagctgggggcatgtccgcggcgggcgccgtctagaggaaggccaagcagccgccaccacgctgtcggtcgcggagagacgcaagcgagccaggccgagggccgcggcggcgatgcagcgacggcgtcgccctccgccgcccacctcccggctgcccgagggctgcgggggaggaggcggtggcagcgaggaggtggaagtgcagttttccgccgggcgttggggctcggccgcggcggtttcggcggcagcggcggcggccacgcgcagcaccgaggaggaggaggagaggcttgagcgtgagcacttctggaagatcattaatgccttccgctactacggcaccagtatgcatgagcgggtgaaccgaacagaaagacagtttcgatcacttccagctaaccaacagaaactacttcctcagtttcttcttcacttggacaagatccggaaatgcattgatcataatcaagaaatactactgaccattgtgaatgattgcatacatatgtttgaaaataaagaatatggagaagatgggaatggaaagattatgccagcatctacatttgacatggataagttaaaatccacgctgaaacagtttgtgagagactggagtgaaactgggaaagcagaaagggatgcctgttaccagccaatcattaaagaaattttaaaaaattttccaaaagagagatgatgttctgaaattaataaatataaactttatccttggatccatcagtttagcaataaccggagatcagctgatcagattcgacccatctttttccctgatgttgacccccacagtcttcctcctggttctaacttttctatgacagcaggagattttcaagagatttattcagaatgcaactgggacaacctgtactctgaaggaagaaagggagagatggaagatgttaggtgttgtggataaggaatgaaataatggaaaacatcacttagatacctgggactgtattgctacctgtttcttcatagacacagctcacaatgtaattgattatattgatacaatatggaaaatactcaagccaggtggaatttggataaatctaggtcctctgctgtaccactttgaaaatctggcaaatgaactttccatagaattgagctatgaggatataaaaaacgttgttctgcagtatggattcaaggtagaggtggaaaaagaatctgtattgtcaacatatactgtgaatgatctctctatgatgaaatactactatgaatgtgtcttgtttgtggtccgtaagccacaataatggtctcaagtgataccacctggaaaaaagtttagtaagaacaaatgctgaaatcaacgactcaaaatcaactatcagtgatgacaggacacaacctcaaatcagtggtgccttcttattcctaacgaaatttagaaatagtgtctattttcttaatatgtctattgctttttcagaaatatactatgccatgcagatttgtactacacaagtaaaaatggaggaaatgtcttgaagtatactttttccttgaagcccagaattgtgtttcagtaggaaaaaaacctaatctccagtgtcttcatgatgctgtccattgcaagtctgccgaattaatgactaatagtattgaagtacataataatcttcctttttttgttgttttgtatgcattgcacatgtaacttttagaagagtctaaggatcctcagtcatattcaacatctggagttgggactttgttcactttcaatctaagaaaactatgcgtaaaatatgtctttttttttttttttcttcagagacaggatcccgctctgtctcccaggccggagtgcagtggcacgatcatagctcactgtaacctcaaactcctggactcaagcgatcttcctgccttagccttagcctcctgagtagctaggactgtaggcatgtaccaccgcgcctggcctgtgtctattttatcattcagattaatttaattttgtattttctggctcagatgaacttaaagaagcatcaaacatttcttttttatgaaatgttaaatttaatagcatcacaggccggtaaaatatattcaagtaacagaaatatcaaagtcttttggccacaataaactgaacactttatgaaagcatactcatcatggatcactttgaaatatacgagatctcaacattcaaagtgagaaataaaaagcctttattaaaagtagtgctaggaaacagagaaaataagaataaaatttacccatttgaaatatgtgattttcagactctaaatgaatacagagtttgacagtgtgatgtttacaataatgtcttttctttagaatatctggattatgaaagcaagcacttttttcattaaaaaaattatatactaggaaaaactgtcataatagtattaatgtggggaattttgattatgaaattcagggatatattactgcccgtggtctgtgtcttcaatattgtaagcagcagccatcatgtaatttcagattaataccaattttgttccctgatagatggagcttaaacagtatatgctgctttaaatttctacctctagcagatctttattggagggagttttcctttgtattttttaatgtatgatattctgtttccagtagcttggaaagtagagatgactaatgttttagccttttcttggagaaaaggaagaactcttcttgaatattttcacagatgattgtgattgctttaaatgacctctgtggcaatttaaattagatggatttaatctcagtaatgtgctggtcgcataaatgtcatgttttaataggaaaagttacttgtaaatctttagacctttgttgtcacttaggctggggagtcactaccctatttggcatcttactagttggggggaccttttccgtgtacagtgatgggacttttgtgacctttactctcactatgcaatagagggtttcatgtagttaatctgacatgtcaaaattgggaagactgtaaccttttttttttttttttaagatttctcttttttgtgtccctcaatacttagcagatgttcatttggtggaaattcttattacttacatgaatgagtttgaatttagtggcaaggaagaaaaaaaaaactcaaattattgttttaaaagaagaaaacttgcaaagtacataagtattttttaaaaatcaatcgaacagaaaggaatgcatgctgtttttcaatggcttagacatgctttttattcactgactagtattcacttttttacaacttgtatcaaaacaaatgatctttgtttttgtcacaggcaaaaacaggttgacactggtgggttggctttattaattaattttttttctattaggttttctttaataatgttaaatttctaaattatagcatatgttttagttaattctgaaatcagttacttcatttgttaatttatccctcatatcatgaatattgttttttaaatgttctatacaaatttgcatcacttcttttcttacagcttttgcagttaatatattctaaacttgaaaatgtggtatcaatcaataatagaagtatcactggaggatttatttagctttgtatttcttaattttagtcctagctactaaagtatgtaagccttaaagtttaaaatgtttttcttaaattagctttatacacaaacattttcatttactttatgaaatgggaggagatagtccactgtgcttatgtttttttgtttaatttctatattctgaagcagtgcagatatagggtatgctaatcaagtgagcaaggtggaacatgtacaatataaggagaagctgtaaaaatcacagtataaaattatgaagtttggtaactgtaaaatgtactgtatttatatgtaactctcattctaaaagttgccacaaaagctgaattggaagcttcatgtctgcatgaaatttcctatatttttaatgtgtatgatgaaattaatttttcttgaatattaaagtctgccaattgctatga

SEQ ID NO: 466321 - DNA, 3797 bp, Homo sapiens
actatgttctgaggctgcagttggaatcagacagacatgacctcctacgcagcaccagtatgcatgagcgggtgaaccgaacagaaagacagtttcgatcacttccagctaaccaacagaaactacttcctcagtttcttcttcacttggacaagatccggaaatgcattgatcataatcaagaaatactactgaccattgtgaatgattgcatacatatgtttgaaaataaagaatatggagaagatgggaatggaaagattatgccagcatctacatttgacatggataagttaaaatccacgctgaaacagtttgtgagagactggagtgaaactgggaaagcagaaagggatgcctgttaccagccaatcattaaagaaattttaaaaaattttccaaaagagagatgggatccttctaaagtaaatattctggtacctggtgctggactaggaagactggcctgggaaatagctatgctaggttatgcttgtcaaggaaatgaatggagtttttttatgctcttttcttccaactttgtactcaacagatgttctgaaattaataaatataaactttatccttggatccatcagtttagcaataaccggagatcagctgatcagattcgacccatctttttccctgatgttgacccccacagtcttcctcctggttctaacttttctatgacagcaggagattttcaagagatttattcagaatgcaatacctgggactgtattgctacctgtttcttcatagacacagctcacaatgtaattgattatattgatacaatatggaaaatactcaagccaggtggaatttggataaatctaggtcctctgctgtaccactttgaaaatctggcaaatgaactttccatagaattgagctatgaggatataaaaaacgttgttctgcagtatggattcaaggtagaggtggaaaaagaatctgtattgtcaacatatactgtgaatgatctctctatgatgaaatactactatgaatgtgtcttgtttgtggtccgtaagccacaataatggtctcaagtgataccacctggaaaaaagtttagtaagaacaaatgctgaaatcaacgactcaaaatcaactatcagtgatgacaggacacaacctcaaatcagtggtgccttcttattcctaacgaaatttagaaatagtgtctattttcttaatatgtctattgctttttcagaaatatactatgccatgcagatttgtactacacaagtaaaaatggaggaaatgtcttgaagtatactttttccttgaagcccagaattgtgtttcagtaggaaaaaaacctaatctccagtgtcttcatgatgctgtccattgcaagtctgccgaattaatgactaatagtattgaagtacataataatcttcctttttttgttgttttgtatgcattgcacatgtaacttttagaagagtctaaggatcctcagtcatattcaacatctggagttgggactttgttcactttcaatctaagaaaactatgcgtaaaatatgtctttttttttttttttcttcagagacaggatcccgctctgtctcccaggccggagtgcagtggcacgatcatagctcactgtaacctcaaactcctggactcaagcgatcttcctgccttagccttagcctcctgagtagctaggactgtaggcatgtaccaccgcgcctggcctgtgtctattttatcattcagattaatttaattttgtattttctggctcagatgaacttaaagaagcatcaaacatttcttttttatgaaatgttaaatttaatagcatcacaggccggtaaaatatattcaagtaacagaaatatcaaagtcttttggccacaataaactgaacactttatgaaagcatactcatcatggatcactttgaaatatacgagatctcaacattcaaagtgagaaataaaaagcctttattaaaagtagtgctaggaaacagagaaaataagaataaaatttacccatttgaaatatgtgattttcagactctaaatgaatacagagtttgacagtgtgatgtttacaataatgtcttttctttagaatatctggattatgaaagcaagcacttttttcattaaaaaaattatatactaggaaaaactgtcataatagtattaatgtggggaattttgattatgaaattcagggatatattactgcccgtggtctgtgtcttcaatattgtaagcagcagccatcatgtaatttcagattaataccaattttgttccctgatagatggagcttaaacagtatatgctgctttaaatttctacctctagcagatctttattggagggagttttcctttgtattttttaatgtatgatattctgtttccagtagcttggaaagtagagatgactaatgttttagccttttcttggagaaaaggaagaactcttcttgaatattttcacagatgattgtgattgctttaaatgacctctgtggcaatttaaattagatggatttaatctcagtaatgtgctggtcgcataaatgtcatgttttaataggaaaagttacttgtaaatctttagacctttgttgtcacttaggctggggagtcactaccctatttggcatcttactagttggggggaccttttccgtgtacagtgatgggacttttgtgacctttactctcactatgcaatagagggtttcatgtagttaatctgacatgtcaaaattgggaagactgtaaccttttttttttttttttaagatttctcttttttgtgtccctcaatacttagcagatgttcatttggtggaaattcttattacttacatgaatgagtttgaatttagtggcaaggaagaaaaaaaaaactcaaattattgttttaaaagaagaaaacttgcaaagtacataagtattttttaaaaatcaatcgaacagaaaggaatgcatgctgtttttcaatggcttagacatgctttttattcactgactagtattcacttttttacaacttgtatcaaaacaaatgatctttgtttttgtcacaggcaaaaacaggttgacactggtgggttggctttattaattaattttttttctattaggttttctttaataatgttaaatttctaaattatagcatatgttttagttaattctgaaatcagttacttcatttgttaatttatccctcatatcatgaatattgttttttaaatgttctatacaaatttgcatcacttcttttcttacagcttttgcagttaatatattctaaacttgaaaatgtggtatcaatcaataatagaagtatcactggaggatttatttagctttgtatttcttaattttagtcctagctactaaagtatgtaagccttaaagtttaaaatgtttttcttaaattagctttatacacaaacattttcatttactttatgaaatgggaggagatagtccactgtgcttatgtttttttgtttaatttctatattctgaagcagtgcagatatagggtatgctaatcaagtgagcaaggtggaacatgtacaatataaggagaagctgtaaaaatcacagtataaaattatgaagtttggtaactgtaaaatgtactgtatttatatgtaactctcattctaaaagttgccacaaaagctgaattggaagcttcatgtctgcatgaaatttcctatatttttaatgtgtatgatgaaattaatttttcttgaatattaaagtctgccaattgctatga

SEQ ID NO: 466322 - DNA, 1810 bp, Homo sapiens
gcaataaactacacggcgtatggtagcgaggcgggtggcgccatttgaaatatgtgattttcagactctaaatgaatacagagtttgacagtgtgatgtttacaataatgtcttttctttagaatatctggattatgaaagcaagcacttttttcattaaaaaaattatatactaggaaaaactgtcataatagtattaatgtggggaattttgattatgaaattcagggatatattactgcccgtggtctgtgtcttcaatattgtaagcagcagccatcatgtaatttcagattaataccaattttgttccctgatagatggagcttaaacagtatatgctgctttaaatttctacctctagcagatctttattggagggagttttcctttgtattttttaatgtatgatattctgtttccagtagcttggaaagtagagatgactaatgttttagccttttcttggagaaaaggaagaactcttcttgaatattttcacagatgattgtgattgctttaaatgacctctgtggcaatttaaattagatggatttaatctcagtaatgtgctggtcgcataaatgtcatgttttaataggaaaagttacttgtaaatctttagacctttgttgtcacttaggctggggagtcactaccctatttggcatcttactagttggggggaccttttccgtgtacagtgatgggacttttgtgacctttactctcactatgcaatagagggtttcatgtagttaatctgacatgtcaaaattgggaagactgtaaccttttttttttttttttaagatttctcttttttgtgtccctcaatacttagcagatgttcatttggtggaaattcttattacttacatgaatgagtttgaatttagtggcaaggaagaaaaaaaaaactcaaattattgttttaaaagaagaaaacttgcaaagtacataagtattttttaaaaatcaatcgaacagaaaggaatgcatgctgtttttcaatggcttagacatgctttttattcactgactagtattcacttttttacaacttgtatcaaaacaaatgatctttgtttttgtcacaggcaaaaacaggttgacactggtgggttggctttattaattaattttttttctattaggttttctttaataatgttaaatttctaaattatagcatatgttttagttaattctgaaatcagttacttcatttgttaatttatccctcatatcatgaatattgttttttaaatgttctatacaaatttgcatcacttcttttcttacagcttttgcagttaatatattctaaacttgaaaatgtggtatcaatcaataatagaagtatcactggaggatttatttagctttgtatttcttaattttagtcctagctactaaagtatgtaagccttaaagtttaaaatgtttttcttaaattagctttatacacaaacattttcatttactttatgaaatgggaggagatagtccactgtgcttatgtttttttgtttaatttctatattctgaagcagtgcagatatagggtatgctaatcaagtgagcaaggtggaacatgtacaatataaggagaagctgtaaaaatcacagtataaaattatgaagtttggtaactgtaaaatgtactgtatttatatgtaactctcattctaaaagttgccacaaaagctgaattggaagcttcatgtctgcatgaaatttcctatatttttaatgtgtatgatgaaattaatttttcttgaatattaaagtctgccaattgctatga

SEQ ID NO: 466323 - DNA, 618 bp, Homo sapiens
gtcattcatttctcagttggcaactggtgcctgcagtctttctgaaacctgccagaattggtggttaacactagtttaaatttgaatgactattattttgttttaagtgattttaaatgaaggctagaagttgaatagaggataaacaaaactctaacaaataccatttggtaataatatgtagagattagattataatattagtgttattggggatgatttccaaattgattacttaatcagattattgatatcagtatttcccataaatgactgtttggttactgtaattataatgttgatcagaagtttagcttctgtatctctgtcaaatattaatactctgtaaaaggtaactggcagatttaaataattaattaaaagaaaaaagcaaaataacataacagatgcagtaatttgatttttcttcattagatacctgggactgtattgctacctgtttcttcatagacacagctcacaatgtaattgattatattgatacaatatggaaaatactcaagccaggtggaatttggataaatctaggtaagttttttagtatttactaaaattttgtatattaatctgagtacttacagctgtattacatttaac

SEQ ID NO: 466324 - DNA, 4214 bp, Homo sapiens
agcgcagaccgcacgggccctccgcgtaccaaggcacacgcatgcgcattggttctgggagccctgaagacctggcggagcccagcgcggatggaggcctgagggtggcgggggcggagcgcgccgcgagctgggggcatgtccgcggcgggcgccgtctagaggaaggccaagcagccgccaccacgctgtcggtcgcggagagacgcaagcgagccaggccgagggccgcggcggcgatgcagcgacggcgtcgccctccgccgcccacctcccggctgcccgagggctgcgggggaggaggcggtggcagcgaggaggtggaagtgcagttttccgccgggcgttggggctcggccgcggcggtttcggcggcagcggcggcggccacgcgcagcaccgaggaggaggaggagaggcttgagcgtgagcacttctggaagatcattaatgccttccgctactacggcaccagtatgcatgagcgggtgaaccgaacagaaagacagtttcgatcacttccagctaaccaacagaaactacttcctcagtttcttcttcacttggacaagatccggaaatgcattgatcataatcaagaaatactactgaccattgtgaatgattgcatacatatgtttgaaaataaagaatatggagaagatgggaatggaaagattatgccagcatctacatttgacatggataagttaaaatccacgctgaaacagtttgtgagagactggagtgaaactgggaaagcagaaagggatgcctgttaccagccaatcattaaagaaattttaaaaaattttccaaaagagagatgggatccttctaaagtaaatattctggtacctggtgctggactaggaagactggcctgggaaatagctatgctaggttatgcttgtcaaggaaatgaatggagtttttttatgctcttttcttccaactttgtactcaacagatgttctgaaattaataaatataaactttatccttggatccatcagtttagcaataaccggagatcagctgatcagattcgacccatctttttccctgatgttgacccccacagtcttcctcctggttctaacttttctatgacagcaggagattttcaagagatttattcagaatgcaatacctgggactgtattgctacctgtttcttcatagacacagctcacaatgtaattgattatattgatacaatatggaaaatactcaagccaggtggaatttggataaatctaggtcctctgctgtaccactttgaaaatctggcaaatgaactttccatagaattgagctatgaggatataaaaaacgttgttctgcagtatggattcaaggtagaggtggaaaaagaatctgtattgtcaacatatactgtgaatgatctctctatgatgaaatactactatgaatgtgtcttgtttgtggtccgtaagccacaataatggtctcaagtgataccacctggaaaaaagtttagtaagaacaaatgctgaaatcaacgactcaaaatcaactatcagtgatgacaggacacaacctcaaatcagtggtgccttcttattcctaacgaaatttagaaatagtgtctattttcttaatatgtctattgctttttcagaaatatactatgccatgcagatttgtactacacaagtaaaaatggaggaaatgtcttgaagtatactttttccttgaagcccagaattgtgtttcagtaggaaaaaaacctaatctccagtgtcttcatgatgctgtccattgcaagtctgccgaattaatgactaatagtattgaagtacataataatcttcctttttttgttgttttgtatgcattgcacatgtaacttttagaagagtctaaggatcctcagtcatattcaacatctggagttgggactttgttcactttcaatctaagaaaactatgcgtaaaatatgtctttttttttttttttcttcagagacaggatcccgctctgtctcccaggccggagtgcagtggcacgatcatagctcactgtaacctcaaactcctggactcaagcgatcttcctgccttagccttagcctcctgagtagctaggactgtaggcatgtaccaccgcgcctggcctgtgtctattttatcattcagattaatttaattttgtattttctggctcagatgaacttaaagaagcatcaaacatttcttttttatgaaatgttaaatttaatagcatcacaggccggtaaaatatattcaagtaacagaaatatcaaagtcttttggccacaataaactgaacactttatgaaagcatactcatcatggatcactttgaaatatacgagatctcaacattcaaagtgagaaataaaaagcctttattaaaagtagtgctaggaaacagagaaaataagaataaaatttacccatttgaaatatgtgattttcagactctaaatgaatacagagtttgacagtgtgatgtttacaataatgtcttttctttagaatatctggattatgaaagcaagcacttttttcattaaaaaaattatatactaggaaaaactgtcataatagtattaatgtggggaattttgattatgaaattcagggatatattactgcccgtggtctgtgtcttcaatattgtaagcagcagccatcatgtaatttcagattaataccaattttgttccctgatagatggagcttaaacagtatatgctgctttaaatttctacctctagcagatctttattggagggagttttcctttgtattttttaatgtatgatattctgtttccagtagcttggaaagtagagatgactaatgttttagccttttcttggagaaaaggaagaactcttcttgaatattttcacagatgattgtgattgctttaaatgacctctgtggcaatttaaattagatggatttaatctcagtaatgtgctggtcgcataaatgtcatgttttaataggaaaagttacttgtaaatctttagacctttgttgtcacttaggctggggagtcactaccctatttggcatcttactagttggggggaccttttccgtgtacagtgatgggacttttgtgacctttactctcactatgcaatagagggtttcatgtagttaatctgacatgtcaaaattgggaagactgtaaccttttttttttttttttaagatttctcttttttgtgtccctcaatacttagcagatgttcatttggtggaaattcttattacttacatgaatgagtttgaatttagtggcaaggaagaaaaaaaaaactcaaattattgttttaaaagaagaaaacttgcaaagtacataagtattttttaaaaatcaatcgaacagaaaggaatgcatgctgtttttcaatggcttagacatgctttttattcactgactagtattcacttttttacaacttgtatcaaaacaaatgatctttgtttttgtcacaggcaaaaacaggttgacactggtgggttggctttattaattaattttttttctattaggttttctttaataatgttaaatttctaaattatagcatatgttttagttaattctgaaatcagttacttcatttgttaatttatccctcatatcatgaatattgttttttaaatgttctatacaaatttgcatcacttcttttcttacagcttttgcagttaatatattctaaacttgaaaatgtggtatcaatcaataatagaagtatcactggaggatttatttagctttgtatttcttaattttagtcctagctactaaagtatgtaagccttaaagtttaaaatgtttttcttaaattagctttatacacaaacattttcatttactttatgaaatgggaggagatagtccactgtgcttatgtttttttgtttaatttctatattctgaagcagtgcagatatagggtatgctaatcaagtgagcaaggtggaacatgtacaatataaggagaagctgtaaaaatcacagtataaaattatgaagtttggtaactgtaaaatgtactgtatttatatgtaactctcattctaaaagttgccacaaaagctgaattggaagcttcatgtctgcatgaaatttcctatatttttaatgtgtatgatgaaattaatttttcttgaatattaaagtctgccaattgctatga

SEQ ID NO: 466325 - DNA, 3873 bp, Homo sapiens
agcgcagaccgcacgggccctccgcgtaccaaggcacacgcatgcgcattggttctgggagccctgaagacctggcggagcccagcgcggatggaggcctgagggtggcgggggcggagcgcgccgcgagctgggggcatgtccgcggcgggcgccgtctagaggaaggccaagcagccgccaccacgctgtcggtcgcggagagacgcaagcgagccaggccgagggccgcggcggcgatgcagcgacggcgtcgccctccgccgcccacctcccggctgcccgagggctgcgggggaggaggcggtggcagcgaggaggtggaagtgcagttttccgccgggcgttggggctcggccgcggcggtttcggcggcagcggcggcggccacgcgcagcaccgaggaggaggaggagaggcttgagcgtgagcacttctggaagatcattaatgccttccgctactacggcaccagtatgcatgagcgggtgaaccgaacagaaagacagtttcgatcacttccagctaaccaacagaaactacttcctcagtttcttcttcacttggacaagatccggaaatgcattgatcataatcaagaaatactactgaccattgtgaatgattgcatacatatgtttgaaaataaagaatatggagaagatgggaatggaaagattatgccagcatctacatttgacatggataagttaaaatccacgctgaaacagtttgtgagagactggagtgaaactgggaaagcagaaagggatgcctgttaccagccaatcattaaagaaattttaaaaaattttccaaaagagagatgggatccttctaaagtaaatattctggtacctggtgctggactaggaagactggcctgggaaatagctatgctaggttatgcttgtcaaggaaatgaatggagtttttttatgctcttttcttccaactttgtactcaacagatgttctgaaattaataaatataaactttatccttggatccatcagtttagcaataaccggagatcagctgatcagattcgacccatctttttccctgatgttgacccccacagtcttcctcctggttctaacttttctatgacagcaggagattttcaagagatttattcagaatgcaatacctgggactgtattgctacctgtttcttcatagacacagctcacaatgtaattgattatattgatacaatatggaaaatactcaagccaggtggaatttggataaatctaggtcctctgctgtaccactttgaaaatctggcaaatgaactttccatagaattgagctatgaggatataaaaaacgttgttctgcagtatggattcaaggtagaggtggaaaaagaatctgtattgtcaacatatactgtgaatgatctctctatgatgaaatactactatgaatgtgtcttgtttgtggtccgtaagccacaataatggtctcaagtgataccacctggaaaaaagtttagtaagaacaaatgctgaaatcaacgactcaaaatcaactatcagtgatgacaggacacaacctcaaatcagtggtgccttcttattcctaacgaaatttagaaatagtgtctattttcttaatatgtctattgctttttcagaaatatactatgccatgcagatttgtactacacaagtaaaaatggaggaaatgtcttgaagtatactttttccttgaagcccagaattgtgtttcagtaggaaaaaaacctaatctccagtgtcttcatgatgctgtccattgcaagtctgccgaattaatgactaatagtattgaagtacataataatcttcctttttttgttgttttgtatgcattgcacatgtaacttttagaagagtctaaggatcctcagtcatattcaacatctggagttgggactttgttcactttcaatctaagaaaactatgcgtaaaatatgtctttttttttttttttcttcagagacaggatcccgctctgtctcccaggccggagtgcagtggcacgatcatagctcactgtaacctcaaactcctggactcaagcgatcttcctgccttagccttagcctcctgagtagctaggactgtaggcatgtaccaccgcgcctggcctgtgtctattttatcattcagattaatttaattttgtattttctggctcagatgaacttaaagaagcatcaaacatttcttttttatgaaatgttaaatttaatagcatcacaggccggtaaaatatattcaagtaacagaaatatcaaagtcttttggccacaataaactgaacactttatgaaagcatactcatcatggatcactttgaaatatacgagatctcaacattcaaagtgagaaataaaaagcctttattaaaagtagtgctaggaaacagagaaaataagaataaaatttacccatttgaaatatgtgattttcagactctaaatgaatacagagtttgacagtgtgatgtttacaataatgtcttttctttagaatatctggattatgaaagcaagcacttttttcattaaaaaaattatatactaggaaaaactgtcataatagtattaatgtggggaattttgattatgaaattcagggatatattactgcccgtggtctgtgtcttcaatattgtaagcagcagccatcatgtaatttcagattaataccaattttgttccctgatagatggagcttaaacagtatatgctgctttaaatttctacctctagcagatctttattggagggagttttcctttgtattttttaatgtatgatattctgtttccagtagcttggaaagtagagatgactaatgttttagccttttcttggagaaaaggaagaactcttcttgaatattttcacagatgattgtgattgctttaaatgacctctgtggcaatttaaattagatggatttaatctcagtaatgtgctggtcgcataaatgtcatgttttaataggaaaagttacttgtaaatctttagacctttgttgtcacttaggctggggagtcactaccctatttggcatcttactagttggggggaccttttccgtgtacagtgatgggacttttgtgacctttactctcactatgcaatagagggtttcatgtagttaatctgacatgtcaaaattgggaagactgtaaccttttttttttttttttaagatttctcttttttgtgtccctcaatacttagcagatgttcatttggtggaaattcttattacttacatgaatgagtttgaatttagtggcaaggaagaaaaaaaaaactcaaattattgttttaaaagaagaaaacttgcaaagtacataagtattttttaaaaatcaatcgaacagaaaggaatgcatgctgtttttcaatggcttagacatgctttttattcactgactagtattcacttttttacaacttgtatcaaaacaaatgatctttgtttttgtcacaggcaaaaacaggttgacactggtgggttggctttattaattaattttttttctattaggttttctttaataatgttaaatttctaaattatagcatatgttttagttaattctgaaatcagttacttcatttgttaatttatccctcatatcatgaatattgttttttaaatgttctatacaaatttgcatcacttcttttcttacagcttttgcagttaatatattctaaacttgaaaatgtggtatcaatcaataatagaagtatcactggaggatttatttagctttgtatttcttaattttagtcctagctactaaagtatgtaagccttaaagtttggggaatggccctggcctatggttttttg

SEQ ID NO: 466326 - DNA, 943 bp, Homo sapiens
tcaaagagcataaactttcagttacaagatgaaggattcctgtgctttaagagttttaaaccataatttacttcccaggttaaaggtgacacatatcgttttttggcctttattattttgtgccagaaataatgaattcaatttcatggataagaaaaggccaggtcactcatatgtatcctgtctttcttttctgatctccctagtcttgtttaagctaagtggcttctggactgttacccctaaacctttctcacttccaatacctagccctcctaaagatcaggtcttcttcaaggggttcttgattcttgaatcctctatgcaccctaagtccattgtggtaattatggggatagtgggagtggaacaagggacttcagcagaagcagatgccggcactatgcttcttgtacagcctgcagaaccatttacctttttcagcggttgatttttctggaggttttattcacttggattcatattgattggaagaatgcatgagaccagatttgttagtagtactgacacagtggttgctgttggcttcctggtgatgaaaatgagcttctttgcagctgctctgagagctcccagtcttattgatgagaaatagtaccagaaagcaactagctggggacctgtaccattagggtccaggcaggaaacagaaaccactgcaatcattttaacagaaagaatttaatataaacaattgcaaagggtatcgaagaattgaaagataaacagaactaaagtattagagaagggagcaacagtaggaattaactaccagctcctgggttgggaaacaaagcccaatgcatttggcagaaaattcagatgtgttgattggccatgttctatagcaacgacaaaaacttcagttaaaaaatgcatcatttgcctgcactgacattccttccagcagatgacatttcag

SEQ ID NO: 466327 - DNA, 957 bp, Homo sapiens
tcaaagagcataaactttcagttacaagatgaaggattcctgtgctttaagagttttaaaccataatttacttcccaggttaaaggtgacacatatcgttttttggcctttattattttgtgccagaaataatgaattcaatttcatggataagaaaaggccaggtcactcatatgtatcctgtctttcttttctgatctccctagtcttgtttaagctaagtggcttctggactgttacccctaaacctttctcacttccaatacctagccctcctaaagatcaggtcttcttcaaggggttcttgattcttgaatcctctatgcaccctaagtccattgtggtaattatggggatagtgggagtggaacaagggacttcagcagaagcagatgccggcactatgcttcttgtacagcctgcagaaccatttacctttttcagcggttgatttttctggaggttttattcacttggattcatattgattggaagaatgcatgagaccagatttgttagtagtactgacacagtggttgctgttggcttcctggtgatgaaaatgagcttctttgcagctgctctgagagctcccagtcttattgatgagaaatagtaccagaaagcaactagctggggacctgtaccattagggtccaggcaggaaacagaaaccactgcaatcattttaacagaaagaatttaatataaacaattgcaaagggtatcgaagaattgaaagataaacagaactaaagtattagagaagggagcaacagtaggaattaactaccagctcctgggttgggaaacaaaggtaaataatggaattatcacaatttagaagtttggaggagggtatctctggggttgggacccatgaatttgagggggtggggacagacaattggtccagatatttcttagtgaatgtgatgggactggtctgcatgtgtt

SEQ ID NO: 466328 - DNA, 1442 bp, Homo sapiens
  misc_feature (3)..(5): n is a, c, g, or t
  misc_feature (11)..(12): n is a, c, g, or t
  misc_feature (14)..(14): n is a, c, g, or t
ccnnntctctnncngggatgcctcagggctgcctggcacatgccaagcccagtgtgctgtcatctttctccagagaagcgcccagtcccattgaccacccaagggctgaggagtgcgggcgcacagcacaggactggcaggcagctccacctgtggccctggtgtgggatccactgggtgaagccagctgggctcctaagtctagtggggacttggagaacctttatgtctgcagcttcactcctgaagccatcgagaccatgaacccaccgggaggaatgaacaactccagacgcaccaccttaagagctgtaacactgaccgcgaaggtctgcagcttcactcctgagccagtgagaccacgaacccaccagaaggaagaaactctgaacacgtccgaacatcagaacgaacaaactccagacacactgcctttaagaactgtaacactcaccacgagggtccgcagcttcattcttgacgtcagtgagaccaagaacccaccaattccggacacaaagggatgagtcataccactgtctcctcacaccggacatgggatagccacagcagaagccactttatggcccagagaaattccagggaaaaaggattgtattaattgataacatcatcagcaatgcatgaaagcacacatctcctcatacctggtcattacaggataatctttactaactgattagtgggtagcatgttgttatttgttttgggattggtacacttgagccttttccaagcttccatggttgtatattctcttatttggagtggtctgttcatgtcctatggtcactgatttgtaggagatctttatgccaaagttactgatctttcttcactgcaaatacttgttccagtcattacttttttattggaaagcgtcagattatacacagaaattccaggcagactaaaatgttttccaaaataatagaaaatttgaagagaaccaagtttcaaattcttaatagctgttagaagaaacaattttaaaagaaatatatacgtattttttgtgacaaggtctctctctgttgtccaggctagatagtatgatcacagcacactagtcttgaactcccaatcaatcctcccaccttagcctcccacgtatctgggactacaggcgcaagccacaacacccactacttgggaggcagaggcaggagaattgcttgaacctgggaggtggagattgcagtgagctgagattgtgccattgcacttcagcctggggaacaagagcaagactttgtctcaaaaaaaaaaaaaaaagtatgcttaaaacagaacaaataattctgaatacaaatttttaattatgaataaactagattcatcttcatcatagtaatatggcaatggatactggactcttgaaccaggagtaaaaaaatgaaaaaaaaaaccccttcaaatat

SEQ ID NO: 466329 - DNA, 1489 bp, Homo sapiens
  misc_feature (3)..(5): n is a, c, g, or t
  misc_feature (11)..(12): n is a, c, g, or t
  misc_feature (14)..(14): n is a, c, g, or t
ccnnntctctnncngggatgcctcagggctgcctggcacatgccaagcccagtgtgctgtcatctttctccagagaagcgcccagtcccattgaccacccaagggctgaggagtgcgggcgcacagcacaggactggcaggcagctccacctgtggccctggtgtgggatccactgggtgaagccagctgggctcctaagtctagtggggacttggagaacctttatgtctgcagcttcactcctgaagccatcgagaccatgaacccaccgggaggaatgaacaactccagacgcaccaccttaagagctgtaacactgaccgcgaaggtctgcagcttcactcctgagccagtgagaccacgaacccaccagaaggaagaaactctgaacacgtccgaacatcagaacgaacaaactccagacacactgcctttaagaactgtaacactcaccacgagggtccgcagcttcattcttgacgtcagtgagaccaagaacccaccaattccggacacaaagggatgagtcataccactgtctcctcacaccggacatgggatagccacagcagaagccactttatggcccagagaaattccagggaaaaaggattgtattaattgataacatcatcagcaatgcatgaaagcacacatctcctcatacctggtcattacaggataatctttactaactgattagtgggtagcatgttgttatttgttttgggattggtacacttgagccttttccaagcttccatggttgtatattctcttatttggagtggtctgttcatgtcctatggtcactgatttgtaggagatctttatgccaaagttactgatctttcttcactgcaaatacttgttccagtcattacttttttattggaaagcgtcagattatacacagaaattccaggcagactaaaatgttttccaaaataatagaaaatttgaagagaaccaagtttcaaattcttaatagctgttagaagaaacaattttaaaagaaatatatacgtattttttgtgacaaggtctctctctgttgtccaggctagatagtatgatcacagcacactagtcttgaactcccaatcaatcctcccaccttagcctcccacgtatctgggactacaggcgcaagccacaacacccagccaattttttttttgtagagacgggttttcgccatgctggtctcaaagtcctgggctcaagcgatccacccacttcagcctcccaaagtgctgggattacagtgagctgagattgtgccattgcacttcagcctggggaacaagagcaagactttgtctcaaaaaaaaaaaaaaaagtatgcttaaaacagaacaaataattctgaatacaaatttttaattatgaataaactagattcatcttcatcatagtaatatggcaatggatactggactcttgaaccaggagtaaaaaaatgaaaaaaaaaaccccttcaaatat

SEQ ID NO: 466330 - DNA, 853 bp, Homo sapiens
gcgagaagttgatggtctcgttactttatcttatcttgcccttttcgggcatttgggctctgaattggagcagatggagaggacaagaacttgaaatgaaaagcacaagctttcaacatagtggccttttattttctgcgcttttggagtgtgagaacaccatagaggctacacgcaccacggcgtttctgtgggctgggaatcaaggcctggagaagggggtgggcagccgggaagtgacagtgcagggagggggagttggcagctgtcaaatgaatgcatttccctcttctattatcctgctatccgaatgctccatctattcatattcatggtttccatcactgtgcatagcaccaaggccagcttccttttcacatttcatcttcttgtctttcttggagtttcattttgatttactaaaaatcagtggactgcttctaaacaaggatcagctaatagaaactggaggtagttggtagagaatctactgggaggaatttatttacatacaagaagttaaagccaaatgtatgtgctccattcatttaattaattaatttatttatttatttatctatttatttatttattttggagacagggtctcactctgtcaccaggctggagtgtggtggtacaatcatggcttactgcagccttgacttccagggctcaagtgatccttctgcctcagcctgctgaatagctgagactgtaggtgtatgccactgtgcccagctgatttttaaaaatcacttgtagagacaaggtctcaccagcctggccaaaatggtgaaaccccgtctctattaaaaatgcaaaaattagccaggtttggtggtgcgtgcct

SEQ ID NO: 466331 - DNA, 1337 bp, Homo sapiens
cccagagggttgggaaactcactccacagataaccctcttgatatagtcaattagatgaggttgatggcaatatgttttcctcatgttttaggacaagactccctcacacatggcacttctcacacctagcccaaagcaagaaatttgctgggtggaaagcaccccaggtctttgactgccatttccttcccaacgaagtcaagtatgttcacaatggttgtccaattcttgatgaagacacagtgaagctcagactttacagatttactgaaagagataccttcatagaaacttttatcctgtgggtctatctcctggaaccagactgtaacatcatccatatgagtaacaatgtgctggaggtgcctgaattcaatggcttgtcccaagcgattgataaaaatctgctcagattcgattatgataggatggctagcctggaatgtaccgtcagcctggacactgcgagaactcggctgccagcccatggccagatggttctcggggagcctcgaccagaagaacctcgtggagatcagccacacagttttttcccagatgactctcttaatccagtgctgtacattctagaactgagagcaaaactgaagtgtccaggtgggagctgtaccccaggattaaagaaaataggaagcctcaaagtgagctgtgaggagttcctgctgatgggccttcgttatcagcatctggatcccccttcacccaacattgattatatctccatccaactggacctcacagataccaggagcaaaattgtgtacaagtcagagagtgcgtggctgcctgtctatatcagagctggaattccgaatcagattccaaaggctgcattcatggccgtgtttattctggaagtggatcagttcatcctgacctccttgactacatcagttctggactgtgaagaagatgagacccctaaacccttgctggtgttcaacattactaaagccccgctccagggctatgtgactcacctgttggatcacaccagaccaatctcctcattcacctggaaagatctcagtgacatgcagatcgcctatcagccaccaaacagcagccattctgagaggagacatgatgaggaacaagatctagaacctgaaaaagtcaaatcaggttgtctaaatgagatgtgggaaccgcagaaatgtgaatccccgcagaaaactgaatccactgtgtgtgggtataacccagaattaatgctactttaccctgtaacgcttcagtgtgtggctcctttgcctctgtttgtttacaggtagaattggaggtatacgacttcttctttgaaaggagtgcacct

SEQ ID NO: 466332 - DNA, 1623 bp, Homo sapiens
aatactgctggcttttattttaaaaggtattgagatacaaaaattgtatcttatcttgtaaaaaatatttatttatcaatctttctggcactattaaaaatgtcccattttcactagacagaatcacaaaggtatacccactcaatcataacaatttgttttctatggagcaatattcacagatcctgtgaataaataggtgacaaactccaggtggccccctgtagggtctgttatatttaaagttttctggaacacacataattatgaggtttggctctcctacagtcttttgtttgccatttcccttgtctttgaaccaaaacacagctctttccaagcttggagcgtggagagggccctcttctcccattggtgaaggcaacaggttcaccaccgatccactcccagtggccagcatgcacttgacttcgttgggaacctcactccacaggtctttgactgccatttccttcccaacgaagtcaagtatgttcacaatggttgtccaattcttgatgaagacacagtgaagctcagactttacagatttactgaaagagataccttcatagaaacttttatcctgtgggtctatctcctggaaccagactgtaacatcatccatatgagtaacaatgtgctggaggtgcctgaattcaatggcttgtcccaagcgattgataaaaatctgctcagattcgattatgataggatggctagcctggaatgtaccgtcagcctggacactgcgagaactcggctgccagcccatggccagatggttctcggggagcctcgaccagaagaacctcgtggagatcagccacacagttttttcccagatgactctcttaatccagtgctgtacattctagaactgagagcaaaactgaagtgtccaggtgggagctgtaccccaggattaaagaaaataggaagcctcaaagtgagctgtgaggagttcctgctgatgggccttcgttatcagcatctggatcccccttcacccaacattgattatatctccatccaactggacctcacagataccaggagcaaaattgtgtacaagtcagagagtgcgtggctgcctgtctatatcagagctggaattccgaatcagattccaaaggctgcattcatggccgtgtttattctggaagtggatcagttcatcctgacctccttgactacatcagttctggactgtgaagaagatgagacccctaaacccttgctggtgttcaacattactaaagccccgctccagggctatgtgactcacctgttggatcacaccagaccaatctcctcattcacctggaaagatctcagtgacatgcagatcgcctatcagccaccaaacagcagccattctgagaggagacatgatgaggaacaagatctagaacctgaaaaagtcaaatcaggttgtctaaatgagatgtgggaaccgcagaaatgtgaatccccgcagaaaactgaatccactgtgtgtgggtataacccagaattaatgctactttaccctgtaacgcttcagtgtgtggctcctttgcctctgtttgtttacaggtagaattggaggtatacgacttcttctttgaaaggagtgcacct

SEQ ID NO: 466333 - DNA, 759 bp, Homo sapiens
tgtcatcttgtctccccacatcatcttgtctccccatgtcatcgtgtctcccagtgtccagtagggcagagggggaggcccagaggcaggatgaaaaaccacagtctgagagcttgtagagagtgcccgagaggcctggaggagacttgggacctgctttcacaactgcagaggagaattgggcggtcaggatgtggggtggtggaggggctgtggccctaacgcccactctgccctccaaacccacctgcttctggctgcagcttgtgcctcctggctcctgcagcctcctggggacacaccttgacaaaggtgactttggtcagctctctggtccagaacccccaggtgaggtgggcaaaagagcacctgatggagcctcccggtcctctcttgagcctatggaagatgctgctcccattatctacctgttagcttccccagatcctcgaatcaagcatcctcaggatctggcctccaccccatcaccaggcccaatgaccacctcagtctcctccctaagtgcctcccagccaccagaaccttcccttctcctagaacgcccctcacccaagccacctgcacttttcctcacccaccacacacccctgatcctctggcctgctctcctcctcctccaaaagacttcactgctcctcccctgtgggactccactctgataactccatttcactgtgactcagtggcacttccactgggcaccgtccctcaaagcttgtctccacatgaggatttggc

SEQ ID NO: 466334 - DNA, 872 bp, Homo sapiens
ggaagcaacataagcgcccatcaattaatcatttttctggaaaaccgatgtgggggcaatgactgctcacctgttcatgccccatccttgtgctggtttcagaacccaaggacccgggagtgacccagggtgtgggaggaaggatgccttaaaaagaggaaaagggaggaccaaggggaggctggaggctccaaagagaaagttacattataatcttgcctggactaacctgagatattatgtattcatcaccactccatttttattttatttgaaatttgaatgtttaaaaatattaattatatatttttcatatctgcttcagaaaaaaaaagtcaaagaaaaactaaggccttcctttcctatcacccatcaatgttggcagagatggaaaaaacaggtattcttaaatattcttggagggaatgtgaattaaaatagtagttttgggagatgttttaaaattttctataataagcatatttctaattagtatatattactttcacaatagaaaaaataaactggatcaaagctatactcaacttcaagatgactgttcactgagaaatgtgaaattaatatgaaatatgaaagaaaactcttactatgtaaatgaatcacagaatccaagaaagatgtgccggatgggaactagaggtcatctagattgcattctgtctaatcagatcatatgaaggagccaaagctgtcttcctgttagctccagagtaaaagtagcctgcagcccacaccctggggtctgatgaaaggactcacactccagtctgcattcctgctgcacctgccagaccctgctgacaaaatttctgtttctccattgaccaaataaaactgcagtgtggcccctt

SEQ ID NO: 466335 - DNA, 905 bp, Homo sapiens
aaaccattcatgaataatcatccccatgatccaatcacctcccaccaggccccacctccaacactggggattacaattcaacatgagattcaactcacaggatgcacaacaccaacggtgaacccaaatgtgaactatggacttggggcgataatgatgcatcagtgtaggttcatccattgtggagaatgcagcaatctggagctggctgcagcataccatgaatcctcacagcaacttaatgaggaaagttttgataactttggaacagacatctccatttctcttgatgggtacctaaatggagatttagatgagactgtcagcagccctctgggtcctcactgctcgcagtgtccacaggcagcagcagcagaatctgggagtttattagatatgtaggatggcagatccactgcaggcctcctgagtcagaatctgtcctttaagaagatccccagaccaataggaattaaatccaagaaggaaggctttgtaaaatatggtgcaggtcaaccacaaacatttcaaagggcaccaccattgagacaacatggaagtggaggaaacaattgaacaacattagagtcaagtgagagttgactgtgaagggcatggggagtttcacagtgactcctgggttttgagcttttgtgaagataacaaaagatgcctcttgattttaatttttctaatcagccttcccaaatttattatggaaaattactttaagtgtttatactttccacctcttctctgtatgatctgtataaaataaaattactttacatgacattgtaccctgtctgccttcctccttatttgtcccagtgcccttgtaaggagagaagcactggactgtagaaaaatgaaatatctgatggtaagcatcattctaaagacaa

SEQ ID NO: 466336 - DNA, 2329 bp, Homo sapiens
ggtcctcagtggactggacgatgccacactgggtcatatagtatgctggctgttgtgtctggcttctcctatggaacagtttacagagtccatccacgtgatagcttttcatggctgggagctgaggactacgaggcatcacaaaagtggccacgagaggcaggtaaaggcccccaaagtcttcaccatcgtccgcctcagaaaatcacttgtctgatgctcaggcggagcccagcaaacaccccgaccccctggaggtgccacgaggaaaggagtgtcctcagagagcttccggggaagccagccctatgaagccctccacgttcaccaggagttcatcgcagctgcggccaggctgggaaggagaggtggccacaggcaggcagcgtgtctgttccggatgcaaagcgcagccccagccccgcccgctggagccctctctggcgctgggtggacaaagctgcagtgcgccggccagggaaggccgaggagccgcccaggcgaggcccgagctgcctggtggcatctgtgtggaccccaggccatgtcactgcctcagcacactcgacctccaactcacattcctcacaggtggcccgggaaaggggaccacccactcggcaggagctccctgagccagctcagtggatggagcaaactgacttggaaatcaaagtgatgcccagacggagcaagagacagccccggaccagcccccgggccacacccgcgcaccagccaggaccaggccccgcggaggcttgctgggaagctggcgctgtgttgtttcccccgccagctgctcgcttcctcccgggctcactggagtgcaaactgctttcacttgtttgaaatggaaattttttcgtctctttatacttattgtcacttgtatttttctccccagaaatggggatttggacgtgaaggcggcttgtgtgtgcgtttccgtgtgcgtgaacagacacatctgtttccactttgggttgggggggttggcgcagggcgagggctgcagtctgagccaacagagtctacggaagcagagacagaagcctgtggagggggcagggcgtgggcagaagcagcccctgcgggtggggctgaggccagggttcctctccaccagccccttacggctgcgtcaggtgtgggggtcctggggacatctgctccttcccatggctttggaggctgccagagcctgccccagccaccccccgggtcctggctgtcactgagccctccgtctccctgcctttgcacccaagttcccccaacccctttatctgggtccctaggaacgcccttatccttccaggcccagctccagttggcttcacccctccagaagccaccctgccagtctttgctctagctcgggtgcctcggggtttactgcagacctggccatgtgtttggggtgagcacagacttcagagtccagcagcgtcaggccacctcgtgccctgcccttctccccgcgtgctacctccaaggcctggctcacacaggtgctttgtggggggagtggagatgaagacaaaggtaaccacaaggatagtcccccctccaggagccccagcctgcactgcaaggacaaggcggtggaacgacctgcagcagagaccagggcctgggactgccggggtggtgagggtgtgcttcccagaggtggctgggcctgagccgcagggactgaagggatcaggcagggctacctggaagaagttgcatccaaaaagagacaccaaggatgggaggagctatgcagatgacaagaaggaggaggaggaggaggaagagaggaaaagcaggcaggtggatgaagagagccggtcccttccaaaggggcagagcacagagtggtcagggtgggcagaggaggaactggggctctgtcctctgggcagcgacatctctgtgtgccaggcctgggtggagggagctctggagacgtcacgcagcccctacagcctgcagggtacagaccagggccatcttccagcagctctgaagagccagtgccgctgcccagagcctggtgttgaagaggatgctgaagtgcactccagctctgcaggaggcaccgctgagagacacggccacggtgggagtgtggagtggacacagcagaacatgcgtctctggtccacgggcaggggtttgaacatgaacagcgggttgccggcatgcataacttaattgcaataattaatgcatggatacctgctggatgacagggcacctgtggagtgccagcctgtatgctggcacctgatgtgcttatggaatttcattccatttctttttgagaccgagtcatgtg

SEQ ID NO: 466337 - DNA, 2290 bp, Homo sapiens
acaacggccatccctgtggctgggccgccggctacgcaatgctgtctctcttgctgatcctctcaggcctgggcgctgacctccgcgggcccacgccacttattccatcaaaattgaggggaaaccataccttcctgcttgaaaaacagtcatttttacacccacatttcctggtgtatttatacaacaaatcaggaacattgtatgcagattcttcattttcaaagggtcattgcttttaccaaggatatgctgcagacattccaaaatcagttgtggcactacgcacctgttctggactcagaggattactgcagttagataatatcagttatggtattgaaccattggaatcttcacctacatataagcatgtagtttatcgaattaaaaatgatgctattggtcattcctcctttcaagaaaattatcctgtggctcaatatatagatcagtcctacaggattcttgtcaaatcagacataaattcaggtgccatgctatcgaaaagaactctgaaaatacaaatcattatggataaagccatgtatgcttatatgggctccacggtggcagttgcagttgagaaagttttccaaatctttggtcttatcaacactatgttttcccagcttaatatgacagttatgctgtcttccttggagatctggtcagatcaaaataagatttcaacaagtggtcatgctgatgaaatactacagcgatttttgccttggaaagaaaaatttttgtttcaaaggtctcatgatatgacatacttattaatttataggaaccattctacttatgtgggagcaacatatcacggaatggcatgcgatccaaagtttgcaacaggaattgctctgtatccaaagaaaatcactgcagaggccttttcagttgttatggcacagttgcttggaattaatctgggattgacatatgatgatatctacaattgttactgtccaggaactacatgcataatgaatcctgatgcgatatgatcccatggtatgaagttttttagcagttgcagcatggatggatttaaacggatagttctgcagcctgaacttaaatgttttcaggataaaacagtttcaaaaatgacttaccgaaaatcttcaacttgtggcaatggaattttggaacctacagagcagtgtgattgtggctataaagaggcatgcactcataaaaaatgctgtaatcctgcagattgtactctagttagatctgcagaatgtggcactggatcatgctgtaacaataaaacttgtacgatccacgaaagaggccatgtctgcagaaaaagtgtagatatgtgtgattttccagaatattgcaatggaacatctgagttttgtgtacctgatgtgaaagctgctgatttagaatactgcagtaataagactagctattgctttaaaggagtatgcagagaaagggatagacagtgttcacagttatttggaaaatttgctaagtctgctaatcttctgtgcacagaagaagtgaattttcaaaatgacaaatttggaaactgtggttcccgttgtgatttttttgatatcctttgtggaaagattgtttgtcactggatacattcagaactagtaccaatgacagacttagacatacaatatacttaccttagaggtcacgtatgtttgtccgcacatgcaagaaatggttcaaaacaatcggagacctatacagaagatataactgcatgtggccaacacaaggtatgtcactcccgagaatgcagaaattttagtgaactaaatataacaaaatatactacaaattgtggacagaatgggatttgcaatgaacatttccattgtcaatgtgatcctggttatgctcctccagattgtgagccagcaatgtcatcaccaggaggaagtatcaatgatggattttggcttacagtagaaaaaagtgtacccttgcttccaaaacgacgtgctgctcctaaaaacaatggtcttttgatcagtttctacattttttcacctttgctcattttaattgctattgttagtcttaaatggaataaaatgaagagattttggagcaaagtgggaacagtaagcagcagatctatctcagaagacagcagtagtaacagcagccagtcacagagttaaagtaaccaagtgataaaatcaaagccatcggatgaagaaaggatattaccaagaaactcacgattaacttaaaactttcaacttcacagaaaaaaataaatcatatgactaaaagcataaaaaaaaaa

SEQ ID NO: 466338 - DNA, 2368 bp, Homo sapiens
  misc_feature (1191)..(1191): n is a, c, g, or t
  misc_feature (1268)..(1268): n is a, c, g, or t
acaacggccatccctgtggctgggccgccggctacgcaatgctgtctctcttgctgatcctctcaggcctgggcgctgacctccgcgggcccacgccacttattccatcaaaattgaggggaaaccataccttcctgcttgaaaaacagtcatttttacacccacatttcctggtgtatttatacaacaaatcaggaacattgtatgcagattcttcattttcaaagggtcattgcttttaccaaggatatgctgcagacattccaaaatcagttgtggcactacgcacctgttctggactcagaggattactgcagttagataatatcagttatggtattgaaccattggaatcttcacctacatataagcatgtagtttatcgaattaaaaatgatgctattggtcattcctcctttcaagaaaattatcctgtggctcaatatatagatcagtcctacaggattcttgtcaaatcagacataaattcaggtgccatgctatcgaaaagaactctgaaaatacaaatcattatggataaagccatgtatgcttatatgggctccacggtggcagttgcagttgagaaagttttccaaatctttggtcttatcaacactatgttttcccagcttaatatgacagttatgctgtcttccttggagatctggtcagatcaaaataagatttcaacaagtggtcatgctgatgaaatactacagcgatttttgccttggaaagaaaaatttttgtttcaaaggtctcatgatatgacatacttattaatttataggaaccattctacttatgtgggagcaacatatcacggaatggcatgcgatccaaagtttgcaacaggaattgctctgtatccaaagaaaatcactgcagaggccttttcagttgttatggcacagttgcttggaattaatctgggattgacatatgatgatatctacaattgttactgtccaggaactacatgcataatgaatcctgatgcgatatgatcccatggtatgaagttttttagcagttgcagcatggatggatttaaacggatagttctgcagcctgaacttaaatgttttcaggataaaacagtttcaaaaatgacttaccgaaaatcttcaacttgtggcaatggaattttggaacctacagagcagtgtgattgtggctataaagagngacaggatttcaccatgttggccaggctagtctcaaacttcggacctcaggttatccacctgcctcagcctctcaangcatgcactcataaaaaatgctgtaatcctgcagattgtactctagttagatctgcagaatgtggcactggatcatgctgtaacaataaaacttgtacgatccacgaaagaggccatgtctgcagaaaaagtgtagatatgtgtgattttccagaatattgcaatggaacatctgagttttgtgtacctgatgtgaaagctgctgatttagaatactgcagtaataagactagctattgctttaaaggagtatgcagagaaagggatagacagtgttcacagttatttggaaaatttgctaagtctgctaatcttctgtgcacagaagaagtgaattttcaaaatgacaaatttggaaactgtggttcccgttgtgatttttttgatatcctttgtggaaagattgtttgtcactggatacattcagaactagtaccaatgacagacttagacatacaatatacttaccttagaggtcacgtatgtttgtccgcacatgcaagaaatggttcaaaacaatcggagacctatacagaagatataactgcatgtggccaacacaaggtatgtcactcccgagaatgcagaaattttagtgaactaaatataacaaaatatactacaaattgtggacagaatgggatttgcaatgaacatttccattgtcaatgtgatcctggttatgctcctccagattgtgagccagcaatgtcatcaccaggaggaagtatcaatgatggattttggcttacagtagaaaaaagtgtacccttgcttccaaaacgacgtgctgctcctaaaaacaatggtcttttgatcagtttctacattttttcacctttgctcattttaattgctattgttagtcttaaatggaataaaatgaagagattttggagcaaagtgggaacagtaagcagcagatctatctcagaagacagcagtagtaacagcagccagtcacagagttaaagtaaccaagtgataaaatcaaagccatcggatgaagaaaggatattaccaagaaactcacgattaacttaaaactttcaacttcacagaaaaaaataaatcatatgactaaaagcataaaaaaaaaa

SEQ ID NO: 466339 - DNA, 1916 bp, Homo sapiens
  misc_feature (796)..(796): n is a, c, g, or t
  misc_feature (873)..(873): n is a, c, g, or t
acaacggccatccctgtggctgggccgccggctacgcaatgctgtctctcttgctgatcctctcaggcctgggcgctgacctccgcgggcccacgccacttattccatcaaaattgaggggaaaccataccttcctgcttgaaaaacaggtcattgcttttaccaaggatatgctgcagacattccaaaatcagttgtggcactacgcacctgttctggactcagatgttttcccagcttaatatgacagttatgctgtcttccttggagatctggtcagatcaaaataagatttcaacaagtggtcatgctgatgaaatactacagcgatttttgccttggaaagaaaaatttttgtttcaaaggtctcatgatatgacatacttattaatttataggaaccattctacttatgtgggagcaacatatcacggaatggcatgcgatccaaagtttgcaacaggaattgctctgtatccaaagaaaatcactgcagaggccttttcagttgttatggcacagttgcttggaattaatctgggattgacatatgatgatatctacaattgttactgtccaggaactacatgcataatgaatcctgatgcgatatgatcccatggtatgaagttttttagcagttgcagcatggatggatttaaacggatagttctgcagcctgaacttaaatgttttcaggataaaacagtttcaaaaatgacttaccgaaaatcttcaacttgtggcaatggaattttggaacctacagagcagtgtgattgtggctataaagagngacaggatttcaccatgttggccaggctagtctcaaacttcggacctcaggttatccacctgcctcagcctctcaanttcaaaatggggcataaagcagcggaaacagtcaacatcaacagtgcatttggcccaggaactgctaacaaacatacgcacagtggtggctcaagatttgcagaggacaggagaaacttgcagaggagcatagtggccaccattggaaatcaaattgccacatgcaaggaaaagtggattgtatgtgacaattggcaacaacctgctcagtgtctgatccactacaactttctgaatcccggcaaaaccattaaatctgagaagtatgctcagcaaatcgatgagctgcacaaaacctgcaacgcctgcagccggcgttggtcaacagaaagggcccgagtcttctccatgacaacaccaggccacacatcgcacaaccaacacttcaaaaaagaggccaagggacagcttgggctgttgcttcagagggtagaagccccaagccttggcagctgccacatggtgtggagcctgcaggtgcacagaagtcaagaattgaggtttgggagcctctgcaaagatttcagaagatgtatggaaatgcctggatgttcaggcagaagtttgttgcaggggcagggctctcatggagaacctcttcttgggcagtgtggaagggacatgtggggttggagcccccacagagtccctactgggacactgcttagtggagctgagagtagacagccacaatcctccagaccccagaatggtagatccaccaacggcttgcaccgtgtgactggaaaagctgcagacactcaacaccagccagtgaaagcagtcaggaagaaggctgtatcctgcaatgccacaggggtggagctgcccaagaccatgggaacctacctcttgcatcagcatgacacgagtttgatacatggagtcaaagaaaatcattttggatctttaagatttgactactctgctggattttggacttgcatggggcttgtatcccctttgttttggccaatttctcccattggaatgtctgtatttacccaatgcctgtacccccattgtatctagaaagtaactaa

SEQ ID NO: 466340 - DNA, 2635 bp, Homo sapiens
  misc_feature (1191)..(1191): n is a, c, g, or t
  misc_feature (1268)..(1268): n is a, c, g, or t
acaacggccatccctgtggctgggccgccggctacgcaatgctgtctctcttgctgatcctctcaggcctgggcgctgacctccgcgggcccacgccacttattccatcaaaattgaggggaaaccataccttcctgcttgaaaaacagtcatttttacacccacatttcctggtgtatttatacaacaaatcaggaacattgtatgcagattcttcattttcaaagggtcattgcttttaccaaggatatgctgcagacattccaaaatcagttgtggcactacgcacctgttctggactcagaggattactgcagttagataatatcagttatggtattgaaccattggaatcttcacctacatataagcatgtagtttatcgaattaaaaatgatgctattggtcattcctcctttcaagaaaattatcctgtggctcaatatatagatcagtcctacaggattcttgtcaaatcagacataaattcaggtgccatgctatcgaaaagaactctgaaaatacaaatcattatggataaagccatgtatgcttatatgggctccacggtggcagttgcagttgagaaagttttccaaatctttggtcttatcaacactatgttttcccagcttaatatgacagttatgctgtcttccttggagatctggtcagatcaaaataagatttcaacaagtggtcatgctgatgaaatactacagcgatttttgccttggaaagaaaaatttttgtttcaaaggtctcatgatatgacatacttattaatttataggaaccattctacttatgtgggagcaacatatcacggaatggcatgcgatccaaagtttgcaacaggaattgctctgtatccaaagaaaatcactgcagaggccttttcagttgttatggcacagttgcttggaattaatctgggattgacatatgatgatatctacaattgttactgtccaggaactacatgcataatgaatcctgatgcgatatgatcccatggtatgaagttttttagcagttgcagcatggatggatttaaacggatagttctgcagcctgaacttaaatgttttcaggataaaacagtttcaaaaatgacttaccgaaaatcttcaacttgtggcaatggaattttggaacctacagagcagtgtgattgtggctataaagagngacaggatttcaccatgttggccaggctagtctcaaacttcggacctcaggttatccacctgcctcagcctctcaangtgctgggattacaaacccacaaggagtcccttgcgggaagactgccaatatgtctgttaggggatactttaagaacctgtaaaatcaacacaagttatttacttaaaagcacagcatacacaaccccattttggaaaaggagaaatagacaagaagaaatgggtaacaggcctcaagcaagtctgaaacccaagagagccaatgatggacattcagactcctgaataatttcctttgatgacatgtcctgcatcttctataaacaggcatgcactcataaaaaatgctgtaatcctgcagattgtactctagttagatctgcagaatgtggcactggatcatgctgtaacaataaaacttgtacgatccacgaaagaggccatgtctgcagaaaaagtgtagatatgtgtgattttccagaatattgcaatggaacatctgagttttgtgtacctgatgtgaaagctgctgatttagaatactgcagtaataagactagctattgctttaaaggagtatgcagagaaagggatagacagtgttcacagttatttggaaaatttgctaagtctgctaatcttctgtgcacagaagaagtgaattttcaaaatgacaaatttggaaactgtggttcccgttgtgatttttttgatatcctttgtggaaagattgtttgtcactggatacattcagaactagtaccaatgacagacttagacatacaatatacttaccttagaggtcacgtatgtttgtccgcacatgcaagaaatggttcaaaacaatcggagacctatacagaagatataactgcatgtggccaacacaaggtatgtcactcccgagaatgcagaaattttagtgaactaaatataacaaaatatactacaaattgtggacagaatgggatttgcaatgaacatttccattgtcaatgtgatcctggttatgctcctccagattgtgagccagcaatgtcatcaccaggaggaagtatcaatgatggattttggcttacagtagaaaaaagtgtacccttgcttccaaaacgacgtgctgctcctaaaaacaatggtcttttgatcagtttctacattttttcacctttgctcattttaattgctattgttagtcttaaatggaataaaatgaagagattttggagcaaagtgggaacagtaagcagcagatctatctcagaagacagcagtagtaacagcagccagtcacagagttaaagtaaccaagtgataaaatcaaagccatcggatgaagaaaggatattaccaagaaactcacgattaacttaaaactttcaacttcacagaaaaaaataaatcatatgactaaaagcataaaaaaaaaa

SEQ ID NO: 466341 - DNA, 2905 bp, Homo sapiens
gttctcaagtttttcacccaagatgctgaacaggggcgtgaagggtgagtcccgcctcagtcactcagcaggggtccgcagcagcccctggcaggccttggcagggctcttttccacccagggggagactgggcaggtgtcccacgctgggcctggctgcctcttcccctcctccttcctgctctggacagtggatctcatcctcatcctgacagagctcagcccctggaggcaggggaggaggagctggggcattttcccagcccctccctcacctgtgggtcccagttcccaaggcttcccccaaccccaagacctaggggctctcaactttccccccagactatcccaaggacaaaacaaggtgatttgcgcacactgctggcacctccacttctctccaaagataccagctgagccctctgcctcctccctgacctgtctgggcctccagtatacattgagccaagccgggtggcctctcggagagctggtgctgaccaagacaccgcagccagcctgcgccgtggactggggggctccaggactttcagcctgctcacccccaatgtcctgatgatccttcttccttagcatcacctcagatggctttttctttaccaactgtacccattttacagatgagagactgaggtttagaatggagaaggagctgcctgaggcaacagagacagagagccagaactgaaacgaggcacccccacccgacccctgcgacccaacacccaccgtgtcctgttcctctgcaggcctctgaggttcctaaactacatgaccacatattttgagacctttgagtttttatgaacgctctccagagtttcccaatctctatgtttcattagctgtgctcacctgggcctgcctcctttctctgaatgctttgcgtggaggtggctgcacaccttcgcactggatgccaagcaagagcagttagcctgagagttcactctgcaaaaaagaaaacaaataatgagtctgtgctttgacgctgggtgttatcaaacatctttgtaattttttttatattctagatgcaaatctcttataagatatacgatttgcaaatattttatctcactttgtgtttttttttactttcttgatggtgtcttttgaagtgtaaaaagttttaattttgatgatgttcagtctattttttttctgctgcttgtgcttttgatgtcaatctaagaaactatttcccatttaagattctgaagatctacacctgtgttttcttctaagacatatagttttagcttttacatttaagtctttgatccattttgaggtaattttggtatatggtgtgaggtagggatactccttcattcttttgcatgtggatattcagttgtcctagtaccatttgctaagaagatttttcttcctccattgaatcatctggctaccctcatcataaatcaattgacgataaaagtgagagctcatttctggactcatagttctattccatttaaataaaggtctttcctatgccactgccaaaatgtcttgatcactattgctttgtagtaagttttgaaataggaaaagaatgactgttccaactttgttctttttccaagattattttgacaatttcaggtcctttgaatttctttataaattttagggtcagcttatcaatttccaaaaataaatcagctgaaattttgatagggattgcattgaatctgcacatcattttggataacattgcgttcgtgacaatagtaagtcttttgtccatgaatatgggatgaatatgggatgtttttccatttatttaggtcttctttaatttctttcaacaatattttgtagttttgaaagtaaaagttttgcacttcttttgttaaacttattcttaagtattttattcttgttcatgttattgtaaatgttgtttagaaatatatttgatttttatatatcgatcctatattctgcaactgtgttgaacttgtttattagttctaataatagtttttttagcgaattccttaggagtttatgtataaaagttcatttcttcttcaaatagagatcattttatttcttacttttcaatctagatacattttattttttttcttacttaatttcgctggttagaacctccagtaaaagttgaacggaagtggggtctgagagtttgaaatgaactaacccttggtgtgcatactggctcagccacttactagttcagtgactttgggtaagctgacttaatctctctgatctccagtttcttacaggcaaaataaagaggataatccttccctcataagacagctttgagaattgaatgaaattgctcctctagagtgccttctacaagtccatactatcatgtaagtgctcaaaaatgtttttttatttttgtcctccccactcagtgctacagtaacagaacctttggtccagagcctgggatgttgccttttgcccactggaattcccatcttggaagagtaagcgcaggggattgtccagacagccaggaggccagcgaagccaagtccttcagtacagcctgggagcctccaggaagctgttaggagttgccatgatgggtgcatttggactcacagaatctgccttccaatctcagtgctgcttctactcctttgctaccttaggtctttgaagacaggtccataccttgggtgtttgtatttggacaaccacagacattgccaagaaatgtatctgttctacttgcacaccttcaccacctggatgctgcttgaggacacagatctggtccatcagatttctctctgtactcctctctatatttcgccatatttgatatagacccatcaatggctccctagaataaaatctcaactcttcactgtgcccacagccccag

SEQ ID NO: 466342 - DNA, 1417 bp, Homo sapiens
tccacgggatagtcccccgattctaggaactggcagggggaagcaagcctaaagaaacatctagtgaagcttcagagagccgtgctgagaacaggagtccctgcgaggcccgggatgaagatcttctctctggatccggaagaatcataatatttgtcaactctgtaaactctcgggaaagcacttgtgctagcaaggtaacctggcctttgtgaattcatgcactagtctccatttctgggaagagcttcagcaccagcagcacataccactgtgagggcaagtgaaaaagtatcactttgggtagatggatataatcctcccgtaaagcttcatttgcaagaaaaccactatcacccttttccacctgtggaataaagatccttcttacatgtccaagatcacctgtcgccagcaggccctccccgcccgggcccccacagtcctgcgaagcctcccccctatgcccccagcactcgccagaaccagtagcccaggaagcaggctcgctggccaccaggagcccaagtaccctccccgcaccagtcacacagagacccgctgccaggccggtcagcgccagcagggccccagaagctcctcaggctccagctccaggggctgctgggctggcgggcaaggttccgctcacccccagaaaaggagacggagacccacaaggacctcagcttgtctggtgctggaggcctgggctgtcagaatgcctcgtcgttccggcagggggagcgcatcgccccctagtgccgcggccagaagctgtcacatcccgagtcgcaggcgcctcagcgcaaggggcgggctggaggtgccactcccattcatagaccaggaatcagagccctgggctggaagagtctgagcaggagaaaccctctgggcacccaggctggcatgtgcaaaggcgtagaggcaagctccccctgacacacggctggaggggaagctctaagtgctgcgcacaggctgttcacactgcatccttctccctggacttgctccccccacagcacctccatccttccagttagctatccaggccaccaccctcaccctctcacacccacatcctgtgggccccacatttgagagacaagaattcagttgcttctcaccctccatgggtgctcatcacctggtctgagtccccatcctctctctccccatacttggtctctgcttccatccttgactcctgacgtctaattgcaactcaatactaggtcagatcatgtcacacttctgctctggtgcaagaattatgtggttccttcagttcagtgtccaccaggatttgatattcccaaggcacatctctcactcctttgttctcattttaccttcacacaggaaaacactttttcttcttgaagtgtgctgttatgtagctactcttggc

SEQ ID NO: 466343 - DNA, 1540 bp, Homo sapiens
tgatttttctttgattttatgggggttccacagtgccaatgaacagaacttgtggacacccttttcaggcttgcaattgccccagtgggcctctgagacactctctcaaccttatctgaacccgtgagaggccagttcgaagtgtgagaacactgctccaccttggagttgcctttgtcttggttcctgccttctcagagagccgtgctgagaacaggagtccctgcgaggcccgggatgaagatcttctctctggatccggaagaatcataatatttgtcaactctgtaaactctcgggaaagcacttgtgctagcaaggtaacctggcctttgtgaattcatgcactagtctccatttctgggaagagcttcagcaccagcagcacataccactgtgagggcaagtgaaaaagtatcactttgggtagatggatataatcctcccgtaaagcttcatttgcaagaaaaccactatcacccttttccacctgtggaataaagatccttcttacatgtccaagatcacctgtcgccagcaggccctccccgcccgggcccccacagtcctgcgaagcctcccccctatgcccccagcactcgccagaaccagtagcccaggaagcaggctcgctggccaccaggagcccaagtaccctccccgcaccagtcacacagagacccgctgccaggccggtcagcgccagcagggccccagaagctcctcaggctccagctccaggggctgctgggctggcgggcaaggttccgctcacccccagaaaaggagacggagacccacaaggacctcagcttgtctggtgctggaggcctgggctgtcagaatgcctcgtcgttccggcagggggagcgcatcgccccctagtgccgcggccagaagctgtcacatcccgagtcgcaggcgcctcagcgcaaggggcgggctggaggtgccactcccattcatagaccaggaatcagagccctgggctggaagagtctgagcaggagaaaccctctgggcacccaggctggcatgtgcaaaggcgtagaggcaagctccccctgacacacggctggaggggaagctctaagtgctgcgcacaggctgttcacactgcatccttctccctggacttgctccccccacagcacctccatccttccagttagctatccaggccaccaccctcaccctctcacacccacatcctgtgggccccacatttgagagacaagaattcagttgcttctcaccctccatgggtgctcatcacctggtctgagtccccatcctctctctccccatacttggtctctgcttccatccttgactcctgacgtctaattgcaactcaatactaggtcagatcatgtcacacttctgctctggtgcaagaattatgtggttccttcagttcagtgtccaccaggatttgatattcccaaggcacatctctcactcctttgttctcattttaccttcacacaggaaaacactttttcttcttgaagtgtgctgttatgtagctactcttggc

SEQ ID NO: 466344 - DNA, 469 bp, Homo sapiens
tggctgggaacacaggcacgcaccaacatgtctggctaattttttttaattattattttttgcagagacaaggtctcactatatggcccaggctggtctcaaacgatcttcatgtcttggcctcccaaagtgctgagattacaggcatgagccaccatgcctggcccaggttattcttaatctcaccttttagaggtaggtaagtattttgaaatatttttattccagacattttcctatatatgtgtatttatataagtgccaaaataggattactctgtaatactgttctgtagcctgtttcatttggatataaatcaagcacattataaagatatatctgtacagcacagccattcgtaatggctgcatagcattccatgttttcgttggctcttcagatgatctctaaattatttttgtacaaataactttgtgatggcattctcatcatcaatctatatctttg

SEQ ID NO: 466345 - DNA, 2416 bp, Homo sapiens
cccggccgccccgcgggcccctcgcagaagttttgatcgtcttcgaaacaaatccctctgctccacccccttgaaaaattgatttgggagttggggagcgaaggctttcttttttctcctctgccttctttattattaatattttgtaaagctccagcgctacgaggagtggccccgagcgaggccagactgcgcggacggcagggagcgcggcggctccgccaggggacggcgccggccgggagtggccgcttgggaacccccgactgtcggccgagggttgtcgagaggctgaaacataagtgctcaccacaacacccagcacctaccaggcctctatacatatttgcctgtctggaaccgggagcttccccagctgaggaccacagtgagagcagagaagacccaggatcgtatttgaaaccataaaagccacatgaagacactaagaataacttgcagaaagacattttctatgaattgaacacagagtcccaaaacccagaaagttccttggtctctatctcatgggcccgtgtctggggaagggggcccgatgtgaggctggggccagtgcccatcctatttgatctttatcttaaatccacttcaaaatgctgtggcttggtggattgaaggttcgccccttcctgtaattatttggtgtctggtaaagtttttatgagtgtttgtgcaaatacatgcatttgatgtgcatttgttttggacacccactggattccgtttgccagggagcatttgtcttggtcactccagctgtcaacctttggctcctcccctggtcttcagcccatccccaaaaggaatcactgtatgtacactggggaactgcatccagaaccttctctcaccccacccctccatctgcatccaaggctgtgtttccagattcagggtttcatgttacacagagttattctttctggaatgtgtcccccaagcaaccccgctggaccctctgtggaaggaggggctcttctgaatgcaagattcgcatgtatgcaaaaaagcaaacatgccagccctgcgccttgctagtgtctgtccctgaaacagaaccagcaaccagcggacaaagcagtgcccaggagttgggccaggctgcaaacatcatcaacaacagtaatagtaataataataacctttattaataaagcctctgacctagaatgatctcatggaatcctagagtaaggctgggacgtagctgtcattacaattgtatgaataaagagacttgtgggtaggggggccttgtccaaggtcgctgagtggcagaaccaggcgggtggccgcagccctgacactgtcacctgtgggctgggcagcctcagaggggtggtgagtcaggcatattgttgagctctgtgggatctagacagccctgcaactgtccccagtgtgcagaaaagccagaaaattccatcttggcgtcctgacctccacctccgctccagctcacacaatctgcccagttgagttattctccctggaagagcttggtaatttgggcttttccaaactcaggaaaagcctccaagtctagaatcctccccgtggcctctccctggcctcatctcttcctccctccccttggctctccatgctacgctgagtgccgagcacattggcctgatttctgtttctcaagcagctcatactctgtcctgcctccaggctttgaatgggtcgttcccttcacctggaaagccctcttcactccctcttcctagcttattcctgttcatcctttctgtctcaatgtaaaggtcacctcctcctggaagccttcctttacctcccaggctagcttagagctacctcttacatgttctcagcaacccgtgattgtgattctccttcatggtgagatggggttgcatgtctttttcattcctcattctacgccctcgcagtctcagagagaaacccaggaacaatgagaaaggagtgatggggaggttgctcttcagtgtcaaggcggtggaaggggatctatgagatggagaagggacatatacccttgaatattacatagtccacgttgtgctggttctgtagctggggatatgcctttcccatgtagatcagccaaagactcaaggcaaaaaacaacaggccagcttcccactggggcccattgtgggggcaattgtaagaaagtggagagccccgccctgtgggctttaaatcttgttccacttcagacactttcacagctctgacatcatgaatactgtaatcacccagcacaggagggactgcgattcccagaactctgacatcaacagcctgtgaggacagcaagctggatgtggctcgctctgaacatctgcctctccactcaggagacctagctccttgcagagcctcattcttccacgtgtttcagggc

SEQ ID NO: 466346 - DNA, 648 bp, Homo sapiens
cccggccgccccgcgggcccctcgcagaagttttgatcgtcttcgaaacaaatccctctgctccacccccttgaaaaattgatttgggagttggggagcgaaggctttcttttttctcctctgccttctttattattaatattttgtaaagctccagcgctacgaggagtggccccgagcgaggccagactgcgcggacggcagggagcgcggcggctccgccaggggacggcgccggccgggagtggccgcttgggaacccccgactgtcggccgagagacaaggtctcactatatggcccaggctggtctcaaacgatcttcatgtcttggcctcccaaagtgctgagattacaggcatgagccaccatgcctggcccaggttattcttaatctcaccttttagaggtagaaagtggagagccccgccctgtgggctttaaatcttgttccacttcagacactttcacagctctgacatcatgaatactgtaatcacccagcacaggagggactgcgattcccagaactctgacatcaacagcctgtgaggacagcaagctggatgtggctcgctctgaacatctgcctctccactcaggagacctagctccttgcagagcctcattcttccacgtgtttcagggc

SEQ ID NO: 466347 - DNA, 2141 bp, Homo sapiens
gcggggccccgcggaggggcccggctttgtggaggattagaggctcccgccctaccctacctgcgtgtgtgtcgcctgtctggaaccgggagcttccccagctgaggaccacagtgagagcagagaagacccaggatcgtatttgaaaccataaaagccacatgaagacactaagaataacttgcagaaagacattttctatgaattgaacacagagtcccaaaacccagaaagttccttggtctctatctcatgggcccgtgtctggggaagggggcccgatgtgaggctggggccagtgcccatcctatttgatctttatcttaaatccacttcaaaatgctgtggcttggtggattgaaggttcgccccttcctgtaattatttggtgtctggtaaagtttttatgagtgtttgtgcaaatacatgcatttgatgtgcatttgttttggacacccactggattccgtttgccagggagcatttgtcttggtcactccagctgtcaacctttggctcctcccctggtcttcagcccatccccaaaaggaatcactgtatgtacactggggaactgcatccagaaccttctctcaccccacccctccatctgcatccaaggctgtgtttccagattcagggtttcatgttacacagagttattctttctggaatgtgtcccccaagcaaccccgctggaccctctgtggaaggaggggctcttctgaatgcaagattcgcatgtatgcaaaaaagcaaacatgccagccctgcgccttgctagtgtctgtccctgaaacagaaccagcaaccagcggacaaagcagtgcccaggagttgggccaggctgcaaacatcatcaacaacagtaatagtaataataataacctttattaataaagcctctgacctagaatgatctcatggaatcctagagtaaggctgggacgtagctgtcattacaattgtatgaataaagagacttgtgggtaggggggccttgtccaaggtcgctgagtggcagaaccaggcgggtggccgcagccctgacactgtcacctgtgggctgggcagcctcagaggggtggtgagtcaggcatattgttgagctctgtgggatctagacagccctgcaactgtccccagtgtgcagaaaagccagaaaattccatcttggcgtcctgacctccacctccgctccagctcacacaatctgcccagttgagttattctccctggaagagcttggtaatttgggcttttccaaactcaggaaaagcctccaagtctagaatcctccccgtggcctctccctggcctcatctcttcctccctccccttggctctccatgctacgctgagtgccgagcacattggcctgatttctgtttctcaagcagctcatactctgtcctgcctccaggctttgaatgggtcgttcccttcacctggaaagccctcttcactccctcttcctagcttattcctgttcatcctttctgtctcaatgtaaaggtcacctcctcctggaagccttcctttacctcccaggctagcttagagctacctcttacatgttctcagcaacccgtgattgtgattctccttcatggtgagatggggttgcatgtctttttcattcctcattctacgccctcgcagtctcagagagaaacccaggaacaatgagaaaggagtgatggggaggttgctcttcagtgtcaaggcggtggaaggggatctatgagatggagaagggacatatacccttgaatattacatagtccacgttgtgctggttctgtagctggggatatgcctttcccatgtagatcagccaaagactcaaggcaaaaaacaacaggccagcttcccactggggcccattgtgggggcaattgtaagaaagtggagagccccgccctgtgggctttaaatcttgttccacttcagacactttcacagctctgacatcatgaatactgtaatcacccagcacaggagggactgcgattcccagaactctgacatcaacagcctgtgaggacagcaagctggatgtggctcgctctgaacatctgcctctccactcaggagacctagctccttgcagagcctcattcttccacgtgtttcagggc

SEQ ID NO: 466348 - DNA, 856 bp, Homo sapiens
tactaaattcgcggccgcgtcgacgttcaactccattagttgaaagaccacatcacaaaaaagtttctcaggatgcttctgtgtagtttttatgtgaagatatttgattttccacagttggcctcaaagcgctccaaatttccactcacagattctgcaaaatgagagattcaaaactgctgaatcaaaagatagtttcaactctgtgacttcagtgtccacctcacaaagatgtttctcagaatgcttctgtgtggtttttatataaagatatctccttctccaaaatggatctcaaagttctccaaatattcacttccagattctatggaaagattgtctcaaaattgctcaatcaaaccaaaggttcaactctgtgcgatgaacgcacacatcacaaagaagtttctcagaatacttctgtgtagtttttatttgagtatagttccttttccaccacagaccacaaagggctccaaatatccattgcagatgatacaaaaagagagattcaaaactgctcaaacaaaagattgtacaaaaagagagattcaagactggtcactcaaaagagaggtccagctctgtgagttgaaggcaaacctcacaaagatgtttctcagaaggcttctgcatagtgtttatatgacgatatttgcttttccacaatatgcctccaatctccacaattatccacttgcagattctacaagaagagtgtttcaaaactgctcaatccaaataaactttcaactctgtgagatcaatgcacacatcacaaagaagtttctcagaatgcttctgtagagtgtttatctgaagttatttgcttttccacgataggcctcaaagcaca

SEQ ID NO: 466349 - DNA, 857 bp, Homo sapiens
agcagctggaaccacagtccatttcctcaaccctcacagaggaatgcttctcaaagatttctcaaatgcaggttcatggactagtgataattatgaaattaacaatttggacaaaatgagagacaaagaaacaagaggagaagcacctcaagaaactgacatccagatgggaatcaaaattcagacaggtcccttctacaaggtccttctgactcattcctggtcacgggcagagggggtggagcagaaagtgaattacagatttgctgaggtcagccctgctcagcttgctggctacacaaagataaagacatttacagggaagtggagtggaagctttcctccccgcattggtctagaggtagaagtgtgcggggaggaagatctttcctccatggatcaacatggggaatgcaggggggtgctgggagtcacaggaaacagccaatgaccagtaagcatcacaaagaagtcatgccaaagaaccagacaaatagctggaaggaagaggggaactcctttgtgacgccaaatgggccaaagggtcgctgggaaaactaagccttactgtccatcttgccttcaggataatgtgaaatatggcctaatttttgaagtttttttcttagaaattttactgaatccaaaataaaacaagaagatcatgagtccagaattctcttttctcaacactagatggcagtagagttaaagaaaaaaatcccagcagttctttgtacagggatttggtgatttttcccataaagctgcgatgaggatgaactcagagcaaaatctatgtaagtagaaagttaaattacaatagaggtgtgaaatgatgctttaacatgtcacac

SEQ ID NO: 466350 - DNA, 1028 bp, Homo sapiens
agcagctggaaccacagtccatttcctcaaccctcacagaggaatgcttctcaaagatttctcaaatgcaggttcatggactagtgataattatgaaattaacaatttggacaaaatgagagacaaagaaacaagaggagaagcacctcaagaaactgacatccagatgggaatcaaaattcagacaggtcccttctacaaggtccttctgactcattcctggtcacgggcagagggggtggagcagaaagtgaattacagatttgctgaggtcagccctgctcagcttgctggctacacaaagataaagacatttacagggaagtggagtggaagctttcctccccgcattggtctagaggtagaagtgtgcggggaggaagatctttcctccatggatcaacatggggaatgcaggggggtgctgggagtcacaggaaacagccaatgaccagtaagcatcacaaagaagtcatgccaaagaaccagacaaatagctggaaggaagaggggaactcctttgtgacgccaaatgggccaaagggtcgctgggaaaactaagccttactgtccatcttgccttcaggataatgtgaaatatggcctaatttttgaagtttttttcttagaaattttactgaatccaaaataaaacaagaagatcatgagtccagaattctcttttctcaacactagatggcagtagagttaaagaaaaaaatcccagcagttctttgtacagggatttggtgatttttcccataaagctgcgatgaggatgaactcagagcaaaatctataactcaggtggcagagaggagaagcagctggacatcggagactatggctggacattggagagaagtggtttgacttcagagggacagcttgacagtgaagaattcggccagagatagctggacttcaggggaagatgatctttccgcctcatccccctttcagctccccttcctgctgagagacactttaatcggcaataaaatcccccatgtttaccatccttcaaa

SEQ ID NO: 466351 - DNA, 1945 bp, Homo sapiens
tggagaactatggtctcggtggtgtccggacgcactgaggcatcctctctaccctcacccactcgcccgagctgtgctgggtccccaaaagccccagtgggacttccttgcccgcacctgcccttgcgcagctggaggcgagggaagccgcatgtgatccttacggatagctgcgctgtcttcagacgctcagagcatcccccactgaccttagctttctgcctttccagctcctttacagttgggatgttttttattgtcgaaactcacactggacagaaaccctatgaatgtaatgagtgtgaaagggcattctctctgggatcaaccattatgaagcatcaggggaatactactggctcgggtgcccgaattgaagttctctttggtctccaactgtctcttcgtcttccttggctagagtcttactgcaacaaacggaccccactatccttaaaagaaaaggctagcttgtgccaatgggccagagtggaacaggcatcccatggagtatacctggaagattcctgggtcttctgcatgagttgcccctaatgcccacagtgtttctaaacgagaaggcagcctgggcgacagagcaaaaccccatctctaaaaaataaaataccctatggctcttcccacaactgctcattctctgacatcttaatgctcccactgtcccactgaagacgggctgctttcctttccattctcgtaagtcctccctccgggcccgtgctcctcacctgcccgggtcgcacctggcctctcccctcactccgcttcacccccgcccgccgcccgttccgcaagcgcgtctcagcaccgagtggttggttctcgaactccagctccaccgcaataggtctgaaacctctctgcacctcggcttcctcatttaagcgatggcagcagccttctagagggggcgatgaggtcaaaagactacaggtgggaagtgctaggtgcacagcgggcgcgagctggattctgagcttgatcactacttggaggtgggggaaaagtcgcccgagagagggggacagtgcaccgcgagacgtcctaggtgaggaagggccgggtccagagcacggagaacaacccccggttgaggagcgtccgcaggaacgctcggtgtcggggtcccttccttcgcagccgcacgccgccggcggcacctctgcacctgcgccctctcgcccgcagactccgccaagggctggaagggacgtaaccgggaaggagcaggactgccggagcattgagtactatcagccgcctagagcggacccacgaaacctggaattcaattggttggtgagctgaagggcagggcggaagttcagattaggcatttccggcccagggggcttggctccccgcggcacgggatttagcgttcgcgctccttcccttcccgtggtcgagccgacaccagagcctggtccgctgttctcagctgtttgccgtctgcgcaggacctcataggtgggcctgggaaacgcagtccattgtctctcctggccaagtgcactgccacagtcctggctttcacatggtggcctcaggatgctgtcatcccaggggcctcaggaaggcctctcttgagacatggagaggtcctgacctgagggctgcatcaagatcttgtcattccacatcgtggtttcctttgaggatgtggctgtacccctctcccaggaggagtgggactgtctgatccctgctcagaggggcctctacaaggatgtgatgatggggacctatgggaacctactctcattagtaggtgaatggttaagcaaactgtggtacatccataccatgggatacgactcaacaatcaaaaggaactgcccagacttcaccacgatgcaatatatgcatgtaagaaatctgcacttataccccctaaatatataaaacatttttaaaaaaaaaa

SEQ ID NO: 466352 - DNA, 1758 bp, Homo sapiens
tggagaactatggtctcggtggtgtccggacgcactgaggcatcctctctaccctcacccactcgcccgagctgtgctgggtccccaaaagccccagtgggacttccttgcccgcacctgcccttgcgcagctggaggcgagggaagccgcatgtgatccttacggatagctgcgctgtcttcagacgctcagagcatcccccactgaccttagctttctgcctttccagctcctttacagttgggatgttttttattgtcgaaactcacactggacagaaaccctatgaatgtaatgagtgtgaaagggcattctctctgggatcaaccattatgaagcatcaggggaatactactggctcgggtgcccgaattgaagttctctttggtctccaactgtctcttcgtcttccttggctagagtcttactgcaacaaacggaccccactatccttaaaagaaaaggctagcttgtgccaatgggccagagtggaacaggcatcccatggagtatacctggaagattcctgggtcttctgcatgagttgcccctaatgcccacagtgtttctaaacgagaaggcagcctgggcgacagagcaaaaccccatctctaaaaaataaaataccctatggctcttcccacaactgctcattctctgacatcttaatgctcccactgtcccactgaagacgggctgctttcctttccattctcgtaagtcctccctccgggcccgtgctcctcacctgcccgggtcgcacctggcctctcccctcactccgcttcacccccgcccgccgcccgttccgcaagcgcgtctcagcaccgagtggttggttctcgaactccagctccaccgcaataggtctgaaacctctctgcacctcggcttcctcatttaagcgatggcagcagccttctagagggggcgatgaggtcaaaagactacaggtgggaagtgctaggtgcacagcgggcgcgagctggattctgagcttgatcactacttggaggtgggggaaaagtcgcccgagagagggggacagtgcaccgcgagacgtcctaggtgaggaagggccgggtccagagcacggagaacaacccccggttgaggagcgtccgcaggaacgctcggtgtcggggtcccttccttcgcagccgcacgccgccggcggcacctctgcacctgcgccctctcgcccgcagactccgccaagggctggaagggacgtaaccgggaaggagcaggactgccggagcattgagtactatcagccgcctagagcggacccacgaaacctggaattcaattggttggtgagctgaagggcagggcggaagttcagattaggcatttccggcccagggggcttggctccccgcggcacgggatttagcgttcgcgctccttcccttcccgtggtcgagccgagtcctgacctgagggctgcatcaagatcttgtcattccacatcgtggtttcctttgaggatgtggctgtacccctctcccaggaggagtgggactgtctgatccctgctcagaggggcctctacaaggatgtgatgatggggacctatgggaacctactctcattagtaggtgaatggttaagcaaactgtggtacatccataccatgggatacgactcaacaatcaaaaggaactgcccagacttcaccacgatgcaatatatgcatgtaagaaatctgcacttataccccctaaatatataaaacatttttaaaaaaaaaa

SEQ ID NO: 466353 - DNA, 3352 bp, Homo sapiens
  misc_feature (3348)..(3349): n is a, c, g, or t
tggagaactatggtctcggtggtgtccggacgcactgaggcatcctctctaccctcacccactcgcccgagctgtgctgggtccccaaaagccccagtgggacttccttgcccgcacctgcccttgcgcagctggaggcgagggaagccgcatgtgatccttacggatagctgcgctgtcttcagacgctcagagcatcccccactgaccttagctttctgcctttccagctcctttacagttgggatgttttttattgtcgaaactcacactggacagaaaccctatgaatgtaatgagtgtgaaagggcattctctctgggatcaaccattatgaagcatcaggggaatactactggctcgggtgcccgaattgaagttctctttggtctccaactgtctcttcgtcttccttggctagagtcttactgcaacaaacggaccccactatccttaaaagaaaaggctagcttgtgccaatgggccagagtggaacaggcatcccatggagtatacctggaagattcctgggtcttctgcatgagttgcccctaatgcccacagtgtttctaaacgagaaggcagcctgggcgacagagcaaaaccccatctctaaaaaataaaataccctatggctcttcccacaactgctcattctctgacatcttaatgctcccactgtcccactgaagacgggctgctttcctttccattctcgtaagtcctccctccgggcccgtgctcctcacctgcccgggtcgcacctggcctctcccctcactccgcttcacccccgcccgccgcccgttccgcaagcgcgtctcagcaccgagtggttggttctcgaactccagctccaccgcaataggtctgaaacctctctgcacctcggcttcctcatttaagcgatggcagcagccttctagagggggcgatgaggtcaaaagactacaggtgggaagtgctaggtgcacagcgggcgcgagctggattctgagcttgatcactacttggaggtgggggaaaagtcgcccgagagagggggacagtgcaccgcgagacgtcctaggtgaggaagggccgggtccagagcacggagaacaacccccggttgaggagcgtccgcaggaacgctcggtgtcggggtcccttccttcgcagccgcacgccgccggcggcacctctgcacctgcgccctctcgcccgcagactccgccaagggctggaagggacgtaaccgggaaggagcaggactgccggagcattgagtactatcagccgcctagagcggacccacgaaacctggaattcaattggttggtgagctgaagggcagggcggaagttcagattaggcatttccggcccagggggcttggctccccgcggcacgggatttagcgttcgcgctccttcccttcccgtggtcgagccgagtcctgacctgagggctgcatcaagatcttgtcattccacatcgtggtttcctttgaggatgtggctgtacccctctcccaggaggagtgggactgtctgatccctgctcagaggggcctctacaaggatgtgatgatggggacctatgggaacctactctcattaggtaagttccctccctggggctcagctcctgggcttcctgctccttaaccttgaggatcaagcttggggctcagaggctcctcaccccctgggcccaaagaccagacattttgaccatggtaccatgcaggtctggtttgcacagagagggggacaggtggtactgggaccctccttgatttttttttttaataggcaatgtctcactctgttgcccatcctggagtgcagtggtgagaccatagctcactgtaaccttgacgtctttggttgaagagatcctcctacctcagcctcccaagtacctgagactacaggcatgggccaccatgcctgtcttattttacttttttagagacagagcctctgtgttgcccaggttggtctcaaactcctagcctcaaggaatcctcccaccttggcctcccatgcctttccaaccctccctgatttatagaaggagaatattattcattgcacacctagtacctccctatcccctgaattaatctttctgcatcttgatgatcggtggtaggatacacagtttataaacgaacctgaggctaacaaatactgtcacttttcttaagtttacacagcctattggtggcagatctgggatatggatctgttcggtttcagagccctgctttcctttcactggaatgtgctcttcgctttagcccttttttttttttttttttggtttctgctagcctttatttgagaaaatttacacaaaaatccccaatgcaacatttacaagtgaatctgtataaatcccatatgcctctttcccaaactgaaaaatggctttatgacaggggtccatgacaatggtataaaaatacttacttaaactgcatcattctcatttatattatacagaccattttggataatatgctcaaaagtggaggaaagcacataacacccctgtttttaaagattatttgctcttgtatcagtcttttgtcaaaggcaaatacttttacttcttggataaaaccaaggtataatatcaattaacttttaaaccaaaagcacaaaatgtcctagttgatagttttggcatgagtaaagggaagggacatgagagaacatcagctcctacaaagcttaagtttagggtcacacttgggaacaaaagcatcaacaaaacaaaatattctcttctcctatcttcttgacattttgtcacatcagaagaacataactaacagagtagctttcattgctcctgaaaaggggaaaggcaccagtcagaaataggaaagaaaatcttgttaggttaatggtacatgatagaatttcacattaaaaagtttaatgatggaggatgggcgtagtggcttacacatgtaatcccagcactttgggaggctgaggtcagtggatcacttgaggtcaggagttcaagaccatcccggccaacacggtgaaactccatctctaccaaaaatacaaaaaccagccaggtgtggtggcatgcacctgcactcccagccactctggaggccgaggcggaagaactacccgaacccaggaggtgaaggttgcagcaagctgagatagcaccattgcacttcagcctgggcatcgcagcaagactctgtcccaaaaaaaaaaaaaaaaaaaaaaaaaagtttaagaatggaatccaagtagacttggatgtaccctctgtaacttagtatatgtaatactacatgtagactttctcaacatctgctgcctatggtgnntct

SEQ ID NO: 466354 - DNA, 901 bp, Homo sapiens
gcctccacgggcagtacttcccactctgctgcactgccttgctttcctcctggcggggaagaaagaaggaaggaaagaagacccagagctggaatcatacacatcatcgcaattcatccacaccgcagtcctgtaagggatagaaaggaggtcattcgaagagatgatggcacgggacccaggacctgaggaagctgcagtgggtgaaggggagaaacagaggagcaggggctggagaaagagtggggagtcatcaaccaccctcctttctcctggcgtctggttttcggggcccagaggtcttctctagggcctcagagaagcttccaagtctgttcatttctctttccccacccctgcttgtatcacaaataaagaaattattgacaactgaaaaaaaaaaaaaaaaacaaaaaacaaaaacacttggggggcgcggggccccacgaaaaagctctcacacaacactctgcgagtgggcgccgaggccccacaaggacaccgacaccgcgcgcacagaccgtgtccccaagggaacacccgggcaccacaccacatgggggccgggacctcccaagcataaaacaacgcccccgggggggacacaccgagacgggtctcccagcaccacatccccagaaacgggatacacgaagagaccaaacacggacgcctctcataaacaagcgggcgggacttccaccagagcgaagagcgccgccgaagacatcgaaaaatataagcccccgggccacggggtgggggacgaccccacggacgcacagcaacacggcgggacacacagaccacgaactgacacccgccgcaacacgtaggcaacaagaaccgaagaaccacacacctacagaaaggataacagaacatacgcaccaaaagcagt

SEQ ID NO: 466355 - DNA, 610 bp, Homo sapiens
gcctccacgggcagtacttcccactctgctgcactgccttgctttcctcctggcggggaagaaagaaggaaggaaagaagacccagagctggaatcatacacatcatcgcaattcatccacaccgcagtcctgtaaggtatgtgccattgtactcagaaaactgaggctcaaagagattgagcaacttatctaagacctcacaggtcctgagagcagagtctggatttcaaacacctgggagactctgaaatccatgttagctcttctatacatgggcccaaaatgcagctgtacaccagcaagactgaattcctcttgtggcttatcactagctctgaatacaagaatcttcaaaatgctttataaacaatagtagcgtcatgggaataagttgacaagttcccagaattactgttttagatgcacttgaactttttctccatgtatagagtcaggaataaggaaaaaggatccaaaggagaaggagaaaaataaaacgggactgagccttatacttcttgaccagaacagataatgttgggattttccttactttttttccagacaaatccaataaagacatctgtttctgttacctaaaaccaactt

SEQ ID NO: 466356 - DNA, 963 bp, Homo sapiens
gcctccacgggcagtacttcccactctgctgcactgccttgctttcctcctggcggggaagaaagaaggaaggaaagaagacccagagctggaatcatacacatcatcgcaattcatccacaccgcagtcctgtaagggatagaaaggaggtcattcgaagagatgatggcacgggacccaggacctgaggaagctgcagtgggtgaaggggagaaacagaggagcaggggctggagaaagagtggggagtcatcaaccaccctcctttctcctggcgtctggttttcggggcccagaggtcttctctagggcctcagagaagcttccaagtctgttcatttctctttccccacccctgcttgtatcacaaataaagaaattattgacaactgagttcctgactaggtggcaggattttagggacccttcacctcgtctgaaactcatgaaggtagtgggaatcccatggatgtctgcacgaaattagacattagtacagtgacctcctgggataagggactaccaggttgcctaaggaggggcaaaccggcctgggttggagacaaagcagggcacaactcccagtttgaccagcagggggtcatgcctgtggacagccacgcagcagggagatcctgcccatggacagccccgcagcagggagatcgtgcctgtaaacagccccgcagcagggggtcatgcctgtggacagtccctcaccaggggttcgtgcctgtggacagccccgcagcagggaggttgtgcctgtggatggccccgcagcaggggattgtgcctgtggacagccccgcagcagggggtcgtgcctgtggacagctccccagcagggggatcatgcctataaacagcccctgcactccaggctgggaaacagaatgagaccctatttattaaaaaaaaaaggggggggatggggtggggagagaacacaggtgcacaag

SEQ ID NO: 466357 - DNA, 1013 bp, Homo sapiens
acagctgcaatgaaaaatgaatgcagagtcttcacctttcctgtacacactcgaggacaagaataaaaagtgagaaaaacaaaaatactaaacgtattcattccatccccgaagtattaattatgaaaccatatttcacagctgttgctaaaccatctctgctttcccataagtggctccctttagaaaaaccagaaaatccttgctgttattcctcagatcacagaacagcagtccccaaactgctcctttatcgacggagcaccaggagaaaaacagagctcactaacaaggaactcacttcggcacacttcactggagacttacccaggcgagctgtgtgggttttaggagacagaacagcaccacacgacttgccctggccaacggatgcagatgaagtaagagtgtgctactacagagcagaggcctttaatgacctccccagaaaacctaagccatagcctaaagccaaaccattccagccaccctgcagatctaccgaggaggaaaactaatgtttgttgttgtaagaagtaaaaatttagactacctcatttccatcctgggccctcgcgttccttcccctggctgccgttgtcagctcacctcatgcaccattctgagatgatcgatcaccagctggagtgtaaattatcacttcctagaggagagatttggaaatgagactgagccaggaatgaccattggagaagggtgttgcgaagactgcaattatatatttactattgctgacacaagaattatgacagattcattggtatgacccaacgctataactgtatgtagttattcagccatccttgtagtgagagaagattccagtacagttcacatggggccaccatttcggccaagtgaggtgcacggtactcattctctgtccttaagatctgaggggaggatgttgacagcattcaggtagacagtgaggggaaccatggccagtccacacctgtgcccagggcaagtaccccagccccttctctcct

SEQ ID NO: 466358 - DNA, 1213 bp, Homo sapiens
gcagtgcccgtgtcacaggtggtgatggctcctggaggtggtgcacacaagctcgtggcatggcatctggtgcacagaaagagccggccgtgggatgtggtcctcgtggggaccctgagagaactgcatcgagggacaagcctgaagggtgggacccatgtccttgctcactccacaggtgcagagagttccagcaaggtgatagacgctgacaaggccttccctggcttcctcctttcattggagaacaggcagacgctcaccagggccggcccggagccgagccgccgcgcagccgggcgggaggctgcgtatcagagctcctggcaggctcgcaaaaagctgtccccggcccgccgccgctctatcagcccacggagggagggcggcgggggagggagggaaaaagtatttgcttcagcccttaatcacggaatttgaaatcccagcgagtcggtgccatttattttcagaggctgtcaaggctggtttcagcatttaaaagaaaggaggataaaacgcatttgcatttctcccccactctcgctgcgcgctcgccggcgctccccctcgttccctgcgcagctcgcggggcactaactgagactcggttccctcactggtaaaatgagaaaactcacttatggtcaggggtccccgagttaatgccagtgaattccttggcagagcatcaagcacttggagaagcccccacccccggtcattgtgatgatggtttgtttgtttgtttgtttgttttgagacggagtctcgctctgtcgcccaggctggagtgcagtggcgcgatctcggctcactgcaagctctgcctcccgggttcacgccattcaggggagtggcgccgagacaccgtgtagcgcccatgccaaggaggaagcgagacagcaggagcggaggaaagaaccccgggctgtgttgaggaagcctcctacttttgcctgaagtgaggttgttgttgttgttgttgttgttttttccacgtgccttattcatccacgtaacctcagcctctagtgcagcgtcctattttttggcttgtattattatttttaattggcacataataattgtacatatttatgggatgcagtgtaatattttagtacacatatacaatgtgtagtggtcaaatcagggtaattagcacattcagggttggagtttttctgtcaatacagatacttatagaaac

SEQ ID NO: 466359 - DNA, 2955 bp, Homo sapiens
tgcaaagctgcctgcagcccagcagaaggtgtctgcgtcggttccacccctcacgtggctgccgcatttctccctccagaaccctacacctgcggcgcctgtgggatccagttccagttctacaacaacctgttggagcacatgcagtcccatgcagctgacaatgaaaacaacattgcctccaaccagtcccgatcgccacctgctgttgtagaagagaagtggaaacctcaggcccagaggaacagtgccaataacaccactaccagtggtttaacacccaacagcatgatccccgaaaaggagcggcagaacatcgcagagcggctgttgagggtcatgtgtgccgacctgggtgcactgagcgtggtcagcgggaaggagttcctgaagttggcccagaccttagtagacagtggtgcccgctatggggccttctcggtcactgaaatcctgggcaacttcaacacgctggcgctgaagcacctgccacgcatgtacaaccaggtgaaggtgaaagtgacctgtgccttgggcagcaatgcctgcctaggcatcggtgtcacctgccactcccagagtgttggccctgactcctgctacatcctcacagcctaccaggccgagggcaaccacatcaagagctatgtgcttggtgtgaagggtgcggacattcgcgacagcggtgaccttgtgcaccactgggtgcagaacgtgctgtcggagttcgtgatgtcggagatcaggacagtgtacgtgacggattgccgggtgagcacgtccgccttctccaaggccggcatgtgccttcgctgctcagcctgtgccttgaactcggtggtgcagagcgtgctgagcaagcggacactgcaggcccgcagcatgcacgaggtcatcgagctgctcaacgtgtgcgaggacctggcgggctccacgggcctggccaaggagaccttcgggtcgctggaggagacgtctccaccaccctgctggaactcggtgacggactcactgttgctggtgcatgagcgctatgagcagatctgcgagttctacagccgggccaagaagatgaacctcatccagagcctcaacaagcacctgctcagcaacctggcggccatcctgacgccggtgaagcaggcagtcatcgagctgagcaacgagagccagcccaccctgcagctggtgctgcccacctacgtcaggctggagaagctgttcacggccaaggccaacgacgcaggcactgtcagcaagctctgccacctcttcctggaggcgctcaaggagaacttcaaggtgcacccggcccacaaggtggccatgatcctggacccgcagcagaagctgcggcctgtgccaccctaccagcacgaggagatcatcggcaaggtctgtgagctcatcaacgaggtgaaggagtcctgggccgaggaggccgacttcgagcccgctgccaagaagccccgctctgctgccgtcgagaaccccgcagctcaggaagatgatcggctaggcaaaaatgaagtgtacgattacctgcaggagcccctcttccaggctacccctgatctcttccagtactggtcgtgcgttacccaaaagcacacaaaactcgccaagctcgccttctggctcctggcggttccggccgtgggcgccagaagcgggtgtgtaaatatgtgtgaacaagcgcttctaatcaaacggaggcggctgctcagtccagaagatatgaataaactcatgtttctgaaatccaacatgctttaagacttgacttcgggggaaaaaaaaagaaaaagagaagataacattagaaaaaaaccacacaacactgtcacaaagaaaaggaatttaagttctaaacactgtggacctcattataaatgccccctggaaacttaagtgctttttttatatgtgtgtgtgtgcgtgtatgtacacagccacacccctcctaccctcctgatcccattgtgcacccccccacacactcggctgctctgctgtggactctccacactgcatcagatggacggtttctgcactggactttgtttcttgttcaccttcagggcattgagctgctgcctttgagataccccttggggagtcacattgcatgggggttgagttgacggttcttgtgatatgtaaacccccgagaccaaacttgagggtttatttagggttttctgtttgtcctttgggtttttgtttcactttgttttggtgccgtttctccatttacagccaaatcagtttcatgatgttcaaaacatttactgatgtcaaatggaggaaaggaacagaaaaaaagatttttacaaagtaataaaatttaaaactgagctgtttaatgttgctgtttttacctgtctgttcttgtccaaaagtggaacattcccagggagaagaggaaggttccactcggttctttaagtcgccaaaagccccagcccgggattcagtacctcccctgccccccgaattcttgcagcactatttcccagttggttgatgccaaggcaaaaagataacttttaacagttagagaggatcagttgcttaaatgatttcatgtcagtgttgtatttatggttttacaataaaacaacctttaggaagatgcagcgtatggtgttttttttcttgggtttgaggatgggccatactgtccagttaggagcagagcacctgcagggcccaggtgagtggagatgggccagagacagggcacctggggtgacagcacacatccatcccagcgggacactgtgtgatgctggcatcgttgacttaactgtggtgatggtggtatcagtgacttacctgtgagctcgcagctcatctcttgcaccagacctggctcagccagtgtttgataaatgagggagggacatggtcgaggaagatgtgaccctcctgggcttgtggagcattgtccca

SEQ ID NO: 466360 - DNA, 1383 bp, Homo sapiens
ggctcctgccataacccaggtgccagccggtctccgcctaggaccttccctcccgcccagccagggtgggcggcatcctacgcggtgaaacgagctcatggactgacccggggctgggcctcgccagccaggagagagcgagggccgcacggcagggctggcccaggcagctcgtccagggccattcagatcccaagcatcaggaaatcattttgtacaaccacccgaagcagagatattttttaagaagcgtaaattattttcagttgttttctgatcctgcctttttcttttccccacaacttcacgccagtgattcgttcacatcaggtaaatcttgagaaagccttggtgccctcctccccaccccccactcagtaaccacgtgcgtgcacccccgcatcctttctcagtagttaagacgttctaggcaataccatagacacatctgactgtgtctctctctttgagtgcaagaaactcaagtcatcttaaaaaaaaaaaaaatacaaaaaaaatttacaaaaaaacaaacacaaaaaaaatatcttttttaggccagagttttctacaggtattaatgaatatttttcttaatccttataagttttatgtgtttaatatttcttaataccggtagcattaatttatacttttgtagcaacacaatatttttataaacagccggtgcttggctcaagtcttcacgaggggtttaggcagggccatcttggggaccctgtgtaccatgtactgtatttaaaaaaaaaaaaagttacctattgtcacacttgctgtgttaattaacaaaagatgttgtgtgcggtctcctgtatcggtgtggatccaacagctctccagggagtcacattgcatgggggttgagttgacggttcttgtgatatgtaaacccccgagaccaaacttgagggtttatttagggttttctgtttgtcctttgggtttttgtttcactttgttttggtgccgtttctccatttacagccaaatcagtttcatgatgttcaaaacatttactgatgtcaaatggaggaaaggaacagaaaaaaagatttttacaaagtaataaaatttaaaactgagctgtttaatgttgctgtttttacctgtctgttcttgtccaaaagtggaacattcccagggagaagaggaaggttccactcggttctttaagtcgccaaaagccccagcccgggattcagtacctcccctgccccccgaattcttgcagcactatttcccagttggttgatgccaaggcaaaaagataacttttaacagttagagaggatcagttgcttaaatgatttcatgtcagtgttgtatttatggttttacaataaaacaacctttaggaagatg

SEQ ID NO: 466361 - DNA, 2109 bp, Homo sapiens
  misc_feature (2109)..(2109): n is a, c, g, or t
ggctcctgccataacccaggtgccagccggtctccgcctaggaccttccctcccgcccagccagggtgggcggcatcctacgcggtgaaacgagctcatggactgacccggggctgggcctcgccagccaggagagagcgagggccgcacggcagggctggcccaggcagctcgtccagggccattcagatcccaagcatcaggaaatcattttgtacaaccacccgaagcagagatattttttaagaagcgtaaattattttcagttgttttctgatcctgcctttttcttttccccacaacttcacgccagtgattcgttcacatcaggtaaatcttgagaaagccttggtgccctcctccccaccccccactcagtaaccacgtgcgtgcacccccgcatcctttctcagtagttaagacgttctaggcaataccatagacacatctgactgtgtctctctctttgagtgcaagaaactcaagtcatcttaaaaaaaaaaaaaatacaaaaaaaatttacaaaaaaacaaacacaaaaaaaatatcttttttaggccagagttttctacaggtattaatgaatatttttcttaatccttataagttttatgtgtttaatatttcttaataccggtagcattaatttatacttttgtagcaacacaatatttttataaacagccggtgcttggctcaagtcttcacgaggggtttaggcagggccatcttggggaccctgtgtaccatgtactgtatttaaaaaaaaaaaaagttacctattgtcacacttgctgtgttaattaacaaaagatgttgtgtgcggtctcctgtatcggtgtggatccaacagctctccagggagtcacattgcatgggggttgagttgacggttcttgtgatatgtaaacccccgagaccaaacttgagggtttatttagggttttctgtttgtcctttgggtttttgtttcactttgttttggtgccgtttctccatttacagccaaatcagtttcatgatgttcaaaacatttactgatgtcaaatggaggaaaggaacagaaaaaaagatttttacaaagtaataaaatttaaaactgagctgtttaatgttgctgtttttacctgtctgttcttgtccaaaagtggaacattcccagggagaagaggaaggttccactcggttctttaagtcgccaaaagccccagcccgggattcagtacctcccctgccccccgaattcttgcagcactatttcccagttggttgatgccaaggcaaaaagataacttttaacagttagagaggatcagttgcttaaatgatttcatgtcagtgttgtatttatggttttacaataaaacaacctttaggaagatggcaaaaaaaaaaaaaaaaaaaaaaaaaaaaaaaaaaaaaaaaaaaaaaaaaaaaaagggggggggggaaaaaaaataccccgggggggcccaaatgggcaccgtttttgttgaaaggggggccccaaaaagggggggaaaaaaagaggggggggggcgggtaaaaacggggggggggggaacacagcctgcacccggggcgacccctgtgtggggaggagaccccacaacgtcgcggccgccggggaccacatcggtgcggacaacccccccaaggagaaattaagacgagcccagaggcaacaaataaacctgcgcgagcgtcactggtgggtaaccccccaccagctaatagtcggcgccacggaaaaaatgcgcccccggactactcttttcgaacacactttacgacgccgacacacaatacgcaaaagacactaacccccgaagcacacagacagagaggagagacacacgacgagcaaatcgacagaccacaaaagcaggtagaccacgaagaaacgacaacaacacaaggaaaaaacaaaaacacaacacgagaaagcagcgaaaccaagagcgcacaaagacagcaagagaaagcaaataaagagcacgaacaacaagaaacagacgagacagaaacgcaaacaaacgacggagcagaacaaagcagcagaacaagcacgaccgagcaacacaaagaaaaccagcaacaaacacgccn

SEQ ID NO: 466362 - DNA, 1701 bp, Homo sapiens
ggctcctgccataacccaggtgccagccggtctccgcctaggaccttccctcccgcccagccagggtgggcggcatcctacgcggtgaaacgagctcatggactgacccggggctgggcctcgccagccaggagagagcgagggccgcacggcagggctggcccaggcagctcgtccagggccattcagatcccaagcatcaggaaatcattttgtacaaccacccgaagcagagatattttttaagaagcgtaaattattttcagttgttttctgatcctgcctttttcttttccccacaacttcacgccagtgattcgttcacatcaggtaaatcttgagaaagccttggtgccctcctccccaccccccactcagtaaccacgtgcgtgcacccccgcatcctttctcagtagttaagacgttctaggcaataccatagacacatctgactgtgtctctctctttgagtgcaagaaactcaagtcatcttaaaaaaaaaaaaaatacaaaaaaaatttacaaaaaaacaaacacaaaaaaaatatcttttttaggccagagttttctacaggtattaatgaatatttttcttaatccttataagttttatgtgtttaatatttcttaataccggtagcattaatttatacttttgtagcaacacaatatttttataaacagccggtgcttggctcaagtcttcacgaggggtttaggcagggccatcttggggaccctgtgtaccatgtactgtatttaaaaaaaaaaaaagttacctattgtcacacttgctgtgttaattaacaaaagatgttgtgtgcggtctcctgtatcggtgtggatccaacagctctccagggagtcacattgcatgggggttgagttgacggttcttgtgatatgtaaacccccgagaccaaacttgagggtttatttagggttttctgtttgtcctttgggtttttgtttcactttgttttggtgccgtttctccatttacagccaaatcagtttcatgatgttcaaaacatttactgatgtcaaatggaggaaaggaacagaaaaaaagatttttacaaagtaataaaatttaaaactgagctgtttaatgttgctgtttttacctgtctgttcttgtccaaaagtggaacattcccagggagaagaggaaggttccactcggttctttaagtcgccaaaagccccagcccgggattcagtacctcccctgccccccgaattcttgcagcactatttcccagttggttgatgccaaggcaaaaagataacttttaacagttagagaggatcagttgcttaaatgatttcatgtcagtgttgtatttatggttttacaataaaacaacctttaggaagatgcagcgtatggtgttttttttcttgggtttgaggatgggccatactgtccagttaggagcagagcacctgcagggcccaggtgagtggagatgggccagagacagggcacctggggtgacagcacacatccatcccagcgggacactgtgtgatgctggcatcgttgacttaactgtggtgatggtggtatcagtgacttacctgtgagctcgcagctcatctcttgcaccagacctggctcagccagtgtttgataaatgagggagggacatggtcgaggaagatgtgaccctcctgggcttgtggagcattgtccca

SEQ ID NO: 466363 - DNA, 902 bp, Homo sapiens
ggctcctgccataacccaggtgccagccggtctccgcctaggaccttccctcccgcccagccagggtgggcggcatcctacgcggtgaaacgagctcatggactgacccggggctgggcctcgccagccaggagagagcgagggccgcacggcagggctggcccaggcagctcgtccagggccattcagatcccaagcatcaggaaatcattttgtacaaccacccgaagcagagatattttttaagaagcgtaaattattttcagttgttttctgatcctgcctttttcttttccccacaacttcacacttgctgtgttaattaacaaaagatgttgtgtgcggtctcctgtatcggtgtggatccaacagctctccagggagtcacattgcatgggggttgagttgacggttcttgtgatatgtaaacccccgagaccaaacttgagggtttatttagggttttctgtttgtcctttgggtttttgtttcactttgttttggtgccgtttctccatttacagccaaatcagtttcatgatgttcaaaacatttactgatgtcaaatggaggaaaggaacagaaaaaaagatttttacaaagtaataaaatttaaaactgagctgtttaatgttgctgtttttacctgtctgttcttgtccaaaagtggaacattcccagggagaagaggaaggttccactcggttctttaagtcgccaaaagccccagcccgggattcagtacctcccctgccccccgaattcttgcagcactatttcccagttggttgatgccaaggcaaaaagataacttttaacagttagagaggatcagttgcttaaatgatttcatgtcagtgttgtatttatggttttacaataaaacaacctttaggaagatg

SEQ ID NO: 466364 - DNA, 1219 bp, Homo sapiens
  misc_feature (1219)..(1219): n is a, c, g, or t
gttactcttagcatgaactgaggttgtggtgctgtgagggaacactgtggttacagttgagcctgggctgctgctgtagacggtggtagattcctcactgaggcctggcgtggtggtgctggcaggtgacactgttgagtgagtagaacctgcttggctacgggaggtggtggattcttcaccgacgcccaggcttgtcatgctggcagttgagctgtttaatgttgctgtttttacctgtctgttcttgtccaaaagtggaacattcccagggagaagaggaaggttccactcggttctttaagtcgccaaaagccccagcccgggattcagtacctcccctgccccccgaattcttgcagcactatttcccagttggttgatgccaaggcaaaaagataacttttaacagttagagaggatcagttgcttaaatgatttcatgtcagtgttgtatttatggttttacaataaaacaacctttaggaagatggcaaaaaaaaaaaaaaaaaaaaaaaaaaaaaaaaaaaaaaaaaaaaaaaaaaaaaagggggggggggaaaaaaaataccccgggggggcccaaatgggcaccgtttttgttgaaaggggggccccaaaaagggggggaaaaaaagaggggggggggcgggtaaaaacggggggggggggaacacagcctgcacccggggcgacccctgtgtggggaggagaccccacaacgtcgcggccgccggggaccacatcggtgcggacaacccccccaaggagaaattaagacgagcccagaggcaacaaataaacctgcgcgagcgtcactggtgggtaaccccccaccagctaatagtcggcgccacggaaaaaatgcgcccccggactactcttttcgaacacactttacgacgccgacacacaatacgcaaaagacactaacccccgaagcacacagacagagaggagagacacacgacgagcaaatcgacagaccacaaaagcaggtagaccacgaagaaacgacaacaacacaaggaaaaaacaaaaacacaacacgagaaagcagcgaaaccaagagcgcacaaagacagcaagagaaagcaaataaagagcacgaacaacaagaaacagacgagacagaaacgcaaacaaacgacggagcagaacaaagcagcagaacaagcacgaccgagcaacacaaagaaaaccagcaacaaacacgccn

SEQ ID NO: 466365 - DNA, 784 bp, Homo sapiens
agcttttctgaaactgttcctcatagaaaatcctttcttaaatggatgtatgtctttcacctttccaaaaagaattggaagtggctgaaaacaaagaaatcgttgcatgtattttagacagttatttccttttaaaacttctccttccttgccctctttgtaggaatgatccagagaaactagacgccttcatcatggacaaagcccttctggattatgaagtgtcaatagatgctgactgcaaacttctcactgtggggaagccatttgccatagaaggatacggcattggcctcccacccaactctccattgaccgccaacatatccgagctaatcagtcaatacaagtcacatgggtttatggatatgctccatgacaagtggtacagggtggttccctgtggcaagagaagttttgctgtcacggagctcagtgtctgagtgggaaaaagtgaagatgctttatacaaaccattagactgcacttaaaacagatctttacggaaacaatggatcaaatacttcttgaagaaagaaaaaagtcttcctctattgttcccagcaagaagtaatttctcaattctctgagttcttatagttcttttcccttacctctctgatgacatgttttgttgtccatcttgtattattaattataattctttaatgcctcaattcactcactgatcagcaagctttctgagcaaagaccatctctgaatgtcccaatgctttacatgttaaaacatgattgaataaatgatgccctataaagaataatt

SEQ ID NO: 466366 - DNA, 885 bp, Homo sapiens
cagagaatggatttatgcatctgcaagtcaggaaggccaaagatgaccacaaaccaccaggagctaggaagaggcaagcaagggttgccctacaggtttcaaagggagcatgaccctgccaactccttgatttcagacttctagcctcccgaactaggggacaataaatgtctgttgtttaagccaccccgtttgtgctgcttcattacaacagctcttgcaaaataattaatacactccacattttacttctagtgcctcttgcatcccagctcaggctcttctagacaagcatttgtagatgtcattgtttcctagctgctctcccagatactggtctcttgtcctattcaatctacccataatgccagattaatctctccaaaatataattgtgattaagttgttcttttgataaaacgtgtgctttccctactgggtagagactaaatgtcttagccaaacattcaaaaccctgcttcatctggttctgtctagctcatcttctgctactttgctcaagtacttcagccattataagcaacttgctaatatctacacctgtactctttcccacttctgtgattatggtacttgttcccttttctccctcaggatcaaatacttcttgaagaaagaaaaaagtcttcctctattgttcccagcaagaagtaatttctcaattctctgagttcttatagttcttttcccttacctctctgatgacatgttttgttgtccatcttgtattattaattataattctttaatgcctcaattcactcactgatcagcaagctttctgagcaaagaccatctctgaatgtcccaatgctttacatgttaaaacatgattgaataaatgatgccctataaagaataatt

SEQ ID NO: 466367 - DNA, 1251 bp, Homo sapiens
cggggtcctgcttaaagaagcagtctggccacgttttggtaaagcagccatgctgtgctggggggaacctacctcactgcgaccatttggactcttcaaagccctctggctggaatgtcttgagttgactgaaaaggggatggtggcccacccctccctgctggggttctgtcctgtgtcaggcagaccgcatcttgttgccagtggctggctagaattccaagccagtgagttctatcttgtgaggtgctgtggaagtggggcccgcggaccaacactgcttaggcccctgggttcagctcccttcttaggggtatatatggacctcccaccttgtctgagctgcagacatcttttccgggggtcctggggctggaatgtaaaactcctgagtctctgtgcatgcctgagaagctgctctgctgagattccacacagctgtgtatgtcagacccaaggcactggtggtgtgggcccacaggtggacctcctgatctgcgggttgcaaagatcaatgggagaagcatgaacttctgggaattctatcctatgacgatcatggcatggaaagtaaaaatgactgtatgtgtcagtgtcagagaggcctaaggaactttcaccaagtctcctacagaacagagaagagaggctatgatttccttatgttcctgagaaaggcaaagcatttgtctgaaagcgaaagccaggagatcaaagtaacttccctgtcacaagaggaaacatgagagcagaattcagcatgagttttgtatatggcaatcaagtatattcatggctatctaaatgaatgtccacgtagaagtcaggcagcacaaagaacaagatataacagctgaacgtcccactgaaaaccagctaagtgttgatcacaaccatcaaaaaaattcttgtctttacttacagtgtgactgtaactttcagaaagtaacacatcagtaaaatgcaggtatatcattctgccttcaaaaaggaagaggagcaagtattttcaagggcaggcactgcttttttattctggaaccctagagattcagaccaggaaacctgttaggatgagggcttttaaggaggcaggaagagagaagctgtgacttgaaaacagatgaatccagaagtcacacacacaactgttcatcacctaagctggatataagataattttttatagtatttcattcttcttttcattacattgtagtgtccttaagtaaatccattagcttgtttggg

SEQ ID NO: 466368 - DNA, 1264 bp, Homo sapiens
cggggtcctgcttaaagaagcagtctggccacgttttggtaaagcagccatgctgtgctggggggaacctacctcactgcgaccatttggactcttcaaagccctctggctggaatgtcttgagttgactgaaaaggggatggtggcccacccctccctgctggggttctgtcctgtgtcaggcagaccgcatcttgttgccagtggctggctagaattccaagccagtgagttctatcttgtgaggtgctgtggaagtggggcccgcggaccaacactgcttaggcccctgggttcagctcccttcttaggggtatatatggacctcccaccttgtctgagctgcagacatcttttccgggggtcctggggctggaatgtaaaactcctgagtctctgtgcatgcctgagaagctgctctgctgagattccacacagctgtgtatgtcagacccaaggcactggtggtgtgggcccacaggtggacctcctgatctgcgggttgcaaagatcaatgggagaagcatgaacttctgggaattctatcctatgacgatcatggcatggaaagtaaaaatgactgtatgtgtcagtgtcagagaggcctaaggaactttcaccaagtctcctacagaacagagaagagaggctatgatttccttatgttcctgagaaaggcaaagcatttgtctgaaagcgaaagccaggagatcaaagtaacttccctgtcacaagaggaaacatgagagcagaattcagcatgagttttgtatatggcaatcaagtatattcatggctatctaaatgaatgtccacgtagaagtcaggcagcacaaagaacaagatataacagctgaacgtcccactgaaaaccagctaagtgttgatcacaaccatcaaaaaaattcttgtctttacttacagtgtgactgtaactttcagaaagtaacacatcagtaaaatgcagctactttgactcgaagataacagccatactgttcacagtgaggtccacagaccagcagcttcatcattgtcatgtgaggatgtgtcagaaatgcagaacctcaggctccacctcagacctactatggaatcagaatcttcaccttattaagatccccaggggactgggtgcagtggctcatacctgtaatcccagcactttgggaagccaaggcaagtggatcacttcaggtcaggagttcgagatgagcctggccaacatggtgaaaccccatctctactaaaaatacaaaaatta

SEQ ID NO: 466369 - DNA, 5138 bp, Homo sapiens
  misc_feature (2)..(2): n is a, c, g, or t
  misc_feature (4)..(4): n is a, c, g, or t
  misc_feature (8)..(9): n is a, c, g, or t
  misc_feature (11)..(11): n is a, c, g, or t
anantaanntnttttcgactaccatggctgcaggagtcttgcctcagaatgaacaaccatattctaccttggtgaataacagcgagtgtgttgcaaacatgaaagtgagtggggctgactcttcctgcctccggctcttgcctcccagtgccatgcaggtgcaggatgcaaccaggcggccctcagccgtgcgcttcctcagctcctttctccagggccgccggcactccacctcagacccagtactgcggctgcagcaggcccggcggggctctggcttgggctccggctctgccacgaagctgctgtcctcgtcctctctccaggtgatggtggctgtttcctcagtcagccatgcagagggaaacccaactttccccgaaagaaaaagaaatttagaacgtccaacaccaaagtacacaaaagtaggggagcgtttacggcatgtcattcctggacacatggcatgttccatggcgtgtggcggtagagcttgcaagtatgagaacccagcccgctggagtgagcaggagcaagccattaagggggtttactcatcctgggtcactgataatatactggccatggcccgcccatcctctgagctcctggagaagtaccacatcattgatcagttcctcagccatggcataaaaacaataatcaacctccagcgccctggtgagcatgctagctgtgggaaccctctggaacaagaaagtggcttcacataccttcctgaggctttcatggaggctggcatttacttctacaatttcggatggaaggattatggtgtagcgtctcttactactatcctagatatggtgaaggtgatgacatttgccttacaggaaggaaaagtagctatccattgtcatgcagggcttggtcgaacaggtgttttaatagcctgttacttagtttttgcaacgagaatgactgctgaccaagcaattatatttgtgcgggcaaagcgacccaattccatacaaaccagaggacagctcctctgtgtaagggaatttactcagtttctaactcctctccgcaatatattctcttgctgtgatcccaaagcacatgctgtcaccttacctcaatatctaattcgccagcgtcatctgcttcatggttatgaggcacgacttctgaaacacgtgccaaaaattatccacctagtttgcaaattgctgctggacttagcggagaacaggccagtgatgatgaaggatgtgtccgaaggacctggtctctctgctgaaatagaaaagacaatgtctgagatggtcaccatgcagctggataaagagttactgaggcatgacagtgatgtgtccaacccgcctaaccccactgcagtggcagcagattttgacaatcgaggcatgattttctccaatgagcaacagtttgaccctctttggaaaaggcggaatgttgagtgccttcaacccctgactcatctgaaaaggcggctcagctacagtgactcagatttaaagagggccgagaacctcctggagcaaggggagactccacagacagtgcctgcccagatcttggttggccacaagcccaggcagcagaagctcataagccattgttacatcccacagtctccagaaccagacttacacaaggaagccttggttcgcagcacactttctttctggagtcagtcaaagtttggaggcctggaaggactcaaagataatgggtcaccaattttccatggaaggatcattccaaaggaagcacagcagagtggagctttctctgcagatgtttcaggctcacacagccctggggagccagtttcacccagctttgcaaatgtccataaggatccaaaccctgctcaccagcaagtgtctcactgtcagtgtaaaactcatggtgttgggagccctggctctgtcaggcagaacagcaggacaccccgaagccctctggactgtggctccagtcccaaagcacagttcttggttgaacatgaaacccaggacagtaaagatctgtctgaagcagcttcacactctgcattacagtctgaattgagtgctgaggcaagaagaatactggcggccaaagccctagcaaatttaaatgaatctgtagaaaaggaggaactaaaaaggaaggtagaaatgtggcaggcatttggagtattagaaaaactttccagttatcttccctatgtcaaatttcaggactcggggcttattgttaaatcctacataggatgctaaaaagatatttcaaagaagtacatatgccccatttaccagctttcaagcacctttattttatttttgcagacttcgaagctcaaagcttttccttttccttagaccccaggttaatgtataaatgttcccttatttctactttctcatctaccatctactttattgcaaaaaaatagttctgttttgttcaccagaaggctgaaaaggaagactcttgtgaactgtttctgtggtttctgaataaagtagagaacttggattaactaagccctttccctgtgctataagctttaaccgaccttatctcagtcaatcagcccaacagcttgtgaagcaggggatgagtttcatagagagaaactggggcttacagaattcagtgtcttagtccagtgtccagcctggaagtggagaggctgggaggggtcccagttctgcactctggagcctgagtctttcactcttgtgggcagcgcaagaatcatgcagtgtcaaatggtgcacctccctctcctctccctgtctctgtctctgtctgtctgtctctttctcttcctttttagaaagagcttaattcccgagatggagcttgggaaagaatatgtggcgagagggaccctttcatcctatgcagcttgatgtggtcttgggtggagcaactgaaggagcctgtaatcaccaaagaggatgtggacatgttggttgacaggcgagcagatgccgcagaagcactttttttattagagaagggacagcaccagactattctctgcgtgttgcactgcatagtgaacctgcagacaattcccgtggatgtggaggaagctttccttgcccatgccattaaggcattcactaaggttaattttgattctgaaaatggaccaacagtttacaacaccctgaagaaaatatttaagcacacgctggaagaaaaaagaaaaatgacaaaagatggccctaagcctggcctctagctttcactcgtggtgaatatttcagacctaaagatccagatagtatctctgttcatatgtgaataagttgaagattgtggggctactttttctcatagcactttattttgaatgttgttagtttgtgctgagaatggtcgtccgtatttgaaccaattatttattttaaaatatatttaagctacatttttgttttgaaaaattgccataaatttggtgccactttcttttatttatttgactgagttaatattattgtattaacattttaagtatatggtgtttacattcttatttcttttgacattttggaaataatcataacttgtctttccaaaataaccattttcttgatggaactcttcctagagtttttaccaaatagctaactttagtagtaaaacctcattgtgtatccattcccccacagatgaactaagaaagtcaccaagtgtcttaagctgttttatatttgttacgaagaaggctattgctacaatatttttaaaggtttcttttttaactttgaaattttttgtttttccttttctttttataaatgtaacagagggtttcaaagcatattatttttcagagagatttagttttactttaatggagtgactgtgaagtggttgggattttttgcttgtagaaagtagacttgctctttgtcagatttccaaacaaccttgccagccttggctgtcaaaaggaggcaggagcagttctcaacacaccaagccttattcccactcccttgggttgctgctgagccaaatagcatctttacagaggaagtgggatcagaggcaggaagtgtggaaagttgctaagaagcagggcttgcctctgtcctcccggggactccacagggatattcgtgcagggcaggggctctgtgccagccctgctctctcagatgccacagccactctgcagaggtgactcttggagctggaggaagtcaaaactgggccactgtttgtactgatggtgtattagcatgagcagcgtggccctggccccacactcccaaatctgccactccatagacccacttgcctcaaggctttatatttggctgctttcttacaatgagaattaagatttttaaactgaagttgaccatacaggttgcattagccctaactggcttcatgtaagaagggtgactgcctaaactagttccttgtaagctgaaccatcaattatcagttgaagccatacttttatttaaattaatatacgtagataccagaggccaagccacagagaggataatagttcttcccaataaaggtgatattaatcagactaatttcgaactaaagaagttactgcttaaagacggaatttcaggggaagcaagactcatttagaacaaatgaaatttctccagtcctacatttctgaattgacttctagcacatcaaaaatatttcagtcattatcagtctcattaactgaaatgccaaatgctaaatgcagtgttctttcacactgttttaattttcttgggaaattgagtccagtggatgttaatggagtgggttgcccatccctgaaatgtcttattttcaagtgcctggcctgggaaagaaggggaagaaacaattgcattatatccaaagatacactataaaaatagagtttttaccaaaaaaagatgtttgttctcatctcagtaggcctcatttgggcaagtgacccacaggtcttttggcgagtttgctatttgcctgttgaaatacttgtttcaacttagagaacagttatgatgtgaccatagcatggcacaactaaaaatctaagcctgaaacctgaaaaaagagatatgacaagggaaattaatcaggctatacataagtattgtatttatttgaataaaaataaaaagagcaaccca

SEQ ID NO: 466370 - DNA, 4482 bp, Homo sapiens
  misc_feature (2)..(2): n is a, c, g, or t
  misc_feature (4)..(4): n is a, c, g, or t
  misc_feature (8)..(9): n is a, c, g, or t
  misc_feature (11)..(11): n is a, c, g, or t
anantaanntnttttcgactaccatggctgcaggagtcttgcctcagaatgaacaaccatattctaccttggtgaataacagcgagtgtgttgcaaacatgaaagtgagtggggctgactcttcctgcctccggctcttgcctcccagtgccatgcaggtgcaggatgcaaccaggcggccctcagccgtgcgcttcctcagctcctttctccagggccgccggcactccacctcagacccagtactgcggctgcagcaggcccggcggggctctggcttgggctccggctctgccacgaagctgctgtcctcgtcctctctccaggtgatggtggctgtttcctcagtcagccatgcagagggaaacccaactttccccgaaagaaaaagaaatttagaacgtccaacaccaaagtacacaaaagtaggggagcgtttacggcatgtcattcctggacacatggcatgttccatggcgtgtggcggtagagcttgcaagtatgagaacccagcccgctggagtgagcaggagcaagccattaagggggtttactcatcctgggtcactgataatatactggccatggcccgcccatcctctgagctcctggagaagtaccacatcattgatcagttcctcagccatggcataaaaacaataatcaacctccagcgccctggtgagcatgctagctgtgggaaccctctggaacaagaaagtggcttcacataccttcctgaggctttcatggaggctggcatttacttctacaatttcggatggaaggattatggtgtagcgtctcttactactatcctagatatggtgaaggtgatgacatttgccttacaggaaggaaaagtagctatccattgtcatgcagggcttggtcgaacaggtgttttaatagcctgttacttagtttttgcaacgagaatgactgctgaccaagcaattatatttgtgcgggcaaagcgacccaattccatacaaaccagaggacagctcctctgtgtaagggaatttactcagtttctaactcctctccgcaatatattctcttgctgtgatcccaaagcacatgctgtcaccttacctcaatatctaattcgccagcgtcatctgcttcatggttatgaggcacgacttctgaaacacgtgccaaaaattatccacctagtttgcaaattgctgctggacttagcggagaacaggccagtgatgatgaaggatgtgtccgaaggacctggtctctctgctgaaatagaaaagacaatgtctgagatggtcaccatgcagctggataaagagttactgaggcatgacagtgatgtgtccaacccgcctaaccccactgcagtggcagcagattttgacaatcgaggcatgattttctccaatgagcaacagtttgaccctctttggaaaaggcggaatgttgagtgccttcaacccctgactcatctgaaaaggcggctcagctacagtgactcagatttaaagagggccgagaacctcctggagcaaggggagactccacagacagtgcctgcccagatcttggttggccacaagcccaggcagcagaagctcataagccattgttacatcccacagtctccagaaccagacttacacaaggaagccttggttcgcagcacactttctttctggagtcagtcaaagtttggaggcctggaaggactcaaagataatgggtcaccaattttccatggaaggatcattccaaaggaagcacagcagagtggagctttctctgcagatgtttcaggctcacacagccctggggagccagtttcacccagctttgcaaatgtccataaggatccaaaccctgctcaccagcaagtgtctcactgtcagtgtaaaactcatggtgttgggagccctggctctgtcaggcagaacagcaggacaccccgaagccctctggactgtggctccagtcccaaagcacagttcttggttgaacatgaaacccaggacagtaaagatctgtctgaagcagcttcacactctgcattacagtctgaattgagtgctgaggcaagaagaatactggcggccaaagccctagcaaatttaaatgaatctgtagaaaaggaggaactaaaaaggaaggtagaaatgtggcagaaagagcttaattcccgagatggagcttgggaaagaatatgtggcgagagggaccctttcatcctatgcagcttgatgtggtcttgggtggagcaactgaaggagcctgtaatcaccaaagaggatgtggacatgttggttgacaggcgagcagatgccgcagaagcactttttttattagagaagggacagcaccagactattctctgcgtgttgcactgcatagtgaacctgcagacaattcccgtggatgtggaggaagctttccttgcccatgccattaaggcattcactaaggttaattttgattctgaaaatggaccaacagtttacaacaccctgaagaaaatatttaagcacacgctggaagaaaaaagaaaaatgacaaaagatggccctaagcctggcctctagctttcactcgtggtgaatatttcagacctaaagatccagatagtatctctgttcatatgtgaataagttgaagattgtggggctactttttctcatagcactttattttgaatgttgttagtttgtgctgagaatggtcgtccgtatttgaaccaattatttattttaaaatatatttaagctacatttttgttttgaaaaattgccataaatttggtgccactttcttttatttatttgactgagttaatattattgtattaacattttaagtatatggtgtttacattcttatttcttttgacattttggaaataatcataacttgtctttccaaaataaccattttcttgatggaactcttcctagagtttttaccaaatagctaactttagtagtaaaacctcattgtgtatccattcccccacagatgaactaagaaagtcaccaagtgtcttaagctgttttatatttgttacgaagaaggctattgctacaatatttttaaaggtttcttttttaactttgaaattttttgtttttccttttctttttataaatgtaacagagggtttcaaagcatattatttttcagagagatttagttttactttaatggagtgactgtgaagtggttgggattttttgcttgtagaaagtagacttgctctttgtcagatttccaaacaaccttgccagccttggctgtcaaaaggaggcaggagcagttctcaacacaccaagccttattcccactcccttgggttgctgctgagccaaatagcatctttacagaggaagtgggatcagaggcaggaagtgtggaaagttgctaagaagcagggcttgcctctgtcctcccggggactccacagggatattcgtgcagggcaggggctctgtgccagccctgctctctcagatgccacagccactctgcagaggtgactcttggagctggaggaagtcaaaactgggccactgtttgtactgatggtgtattagcatgagcagcgtggccctggccccacactcccaaatctgccactccatagacccacttgcctcaaggctttatatttggctgctttcttacaatgagaattaagatttttaaactgaagttgaccatacaggttgcattagccctaactggcttcatgtaagaagggtgactgcctaaactagttccttgtaagctgaaccatcaattatcagttgaagccatacttttatttaaattaatatacgtagataccagaggccaagccacagagaggataatagttcttcccaataaaggtgatattaatcagactaatttcgaactaaagaagttactgcttaaagacggaatttcaggggaagcaagactcatttagaacaaatgaaatttctccagtcctacatttctgaattgacttctagcacatcaaaaatatttcagtcattatcagtctcattaactgaaatgccaaatgctaaatgcagtgttctttcacactgttttaattttcttgggaaattgagtccagtggatgttaatggagtgggttgcccatccctgaaatgtcttattttcaagtgcctggcctgggaaagaaggggaagaaacaattgcattatatccaaagatacactataaaaatagagtttttaccaaaaaaagatgtttgttctcatctcagtaggcctcatttgggcaagtgacccacaggtcttttggcgagtttgctatttgcctgttgaaatacttgtttcaacttagagaacagttatgatgtgaccatagcatggcacaactaaaaatctaagcctgaaacctgaaaaaagagatatgacaagggaaattaatcaggctatacataagtattgtatttatttgaataaaaataaaaagagcaaccca

SEQ ID NO: 466371 - DNA, 462 bp, Homo sapiens
tgacaggcgagcagatgccgcagaagcactttttttattagagaaggtaaagtggctgtaggaccagttaatgactgtaactgaggcccttagtttttcacgcagaaaaaaaaaatccattataaaaaaagagaattcacacagaatcccaaatctagatctaatttaatagtttttccaagagaagagaagaaactgatacccagtgtaaacacttagaaaatacaaaaataaaaacgagaactatccatagtcctgggagaggcactgcaaacattttcaaacattttaaacttaccaatatgtatattaacttgttaaaaatcattttaacatacaagtttatatttcatttttgcttaaagttataacatagctattttcctgtgaataatgtaagcttttcataaatattgactcttaacggatatgatgctgtaacacgagactgtgccataatta

SEQ ID NO: 466372 - DNA, 5336 bp, Homo sapiens
  misc_feature (2)..(2): n is a, c, g, or t
  misc_feature (4)..(4): n is a, c, g, or t
  misc_feature (8)..(9): n is a, c, g, or t
  misc_feature (11)..(11): n is a, c, g, or t
anantaanntnttttcgactaccatggctgcaggagtcttgcctcagaatgaacaaccatattctaccttggtgaataacagcgagtgtgttgcaaacatgaaagtgagtggggctgactcttcctgcctccggctcttgcctcccagtgccatgcaggtgcaggatgcaaccaggcggccctcagccgtgcgcttcctcagctcctttctccagggccgccggcactccacctcagacccagtactgcggctgcagcaggcccggcggggctctggcttgggctccggctctgccacgaagctgctgtcctcgtcctctctccaggtgatggtggctgtttcctcagtcagccatgcagagggaaacccaactttccccgaaagaaaaagaaatttagaacgtccaacaccaaagtacacaaaagtaggggagcgtttacggcatgtcattcctggacacatggcatgttccatggcgtgtggcggtagagcttgcaagtatgagaacccagcccgctggagtgagcaggagcaagccattaagggggtttactcatcctgggtcactgataatatactggccatggcccgcccatcctctgagctcctggagaagtaccacatcattgatcagttcctcagccatggcataaaaacaataatcaacctccagcgccctggtgagcatgctagctgtgggaaccctctggaacaagaaagtggcttcacataccttcctgaggctttcatggaggctggcatttacttctacaatttcggatggaaggattatggtgtagcgtctcttactactatcctagatatggtgaaggtgatgacatttgccttacaggaaggaaaagtagctatccattgtcatgcagggcttggtcgaacaggtgttttaatagcctgttacttagtttttgcaacgagaatgactgctgaccaagcaattatatttgtgcgggcaaagcgacccaattccatacaaaccagaggacagctcctctgtgtaagggaatttactcagtttctaactcctctccgcaatatattctcttgctgtgatcccaaagcacatgctgtcaccttacctcaatatctaattcgccagcgtcatctgcttcatggttatgaggcacgacttctgaaacacgtgccaaaaattatccacctagtttgcaaattgctgctggacttagcggagaacaggccagtgatgatgaaggatgtgtccgaaggacctggtctctctgctgaaatagaaaagacaatgtctgagatggtcaccatgcagctggataaagagttactgaggcatgacagtgatgtgtccaacccgcctaaccccactgcagtggcagcagattttgacaatcgaggcatgattttctccaatgagcaacagtttgaccctctttggaaaaggcggaatgttgagtgccttcaacccctgactcatctgaaaaggcggctcagctacagtgactcagatttaaagagggccgagaacctcctggagcaaggggagactccacagacagtgcctgcccagatcttggttggccacaagcccaggcagcagaagctcataagccattgttacatcccacagtctccagaaccagacttacacaaggaagccttggttcgcagcacactttctttctggagtcagtcaaagtttggaggcctggaaggactcaaagataatgggtcaccaattttccatggaaggatcattccaaaggaagcacagcagagtggagctttctctgcagatgtttcaggctcacacagccctggggagccagtttcacccagctttgcaaatgtccataaggatccaaaccctgctcaccagcaagtgtctcactgtcagtgtaaaactcatggtgttgggagccctggctctgtcaggcagaacagcaggacaccccgaagccctctggactgtggctccagtcccaaagcacagttcttggttgaacatgaaacccaggacagtaaagatctgtctgaagcagcttcacactctgcattacagtctgaattgagtgctgaggcaagaagaatactggcggccaaagccctagcaaatttaaatgaatctgtagaaaaggaggaactaaaaaggaaggtagaaatgtggcaggcatttggagtattagaaaaactttccagttatcttccctatgtcaaatttcaggactcggggcttattgttaaatcctacataggatgctaaaaagatatttcaaagaagtacatatgccccatttaccagctttcaagcacctttattttatttttgcagacttcgaagctcaaagcttttccttttccttagaccccaggttaatgtataaatgttcccttatttctactttctcatctaccatctactttattgcaaaaaaatagttctgttttgttcaccagaaggctgaaaaggaagactcttgtgaactgtttctgtggtttctgaataaagtagagaacttggattaactaagccctttccctgtgctataagctttaaccgaccttatctcagtcaatcagcccaacagcttgtgaagcaggggatgagtttcatagagagaaactggggcttacagaattcagtgtcttagtccagtgtccagcctggaagtggagaggctgggaggggtcccagttctgcactctggagcctgagtctttcactcttgtgggcagcgcaagaatcatgcagtgtcaaatggtgcacctccctctcctctccctgtctctgtctctgtctgtctgtctctttctcttcctttttagaaagagcttaattcccgagatggagcttgggaaagaatatgtggcgagagggaccctttcatcctatgcagcttgatgtggtcttgggtggagcaactgaaggagcctgtaatcaccaaagaggatgtggacatgttggttgacaggcgagcagatgccgcagaagcactttttttattagagaagggacagcaccagactattctctgcgtgttgcactgcatagtgaacctgcagacaattcccgtggatgtggaggaagctttccttgcccatgccattaaggcattcactaaggttaattttgattctgaaaatggaccaacagtttacaacaccctgaagaaaatatttaagcacacgctggaagaaaaaagaaaaatgacaaaagatggccctaagcctggcctctagctttcactcgtggtgaatatttcagacctaaagatccagatagtatctctgttcatatgtgaataagttgaagattgtggggctactttttctcatagcactttattttgaatgttgttagtttgtgctgagaatggtcgtccgtatttgaaccaattatttattttaaaatatatttaagctacatttttgttttgaaaaattgccataaatttggtgccactttcttttatttatttgactgagttaatattattgtattaacattttaagtatatggtgtttacattcttatttcttttgacattttggaaataatcataacttgtctttccaaaataaccattttcttgatggaactcttcctagagtttttaccaaatagctaactttagtagtaaaacctcattgtgtatccattcccccacagatgaactaagaaagtcaccaagtgtcttaagctgttttatatttgttacgaagaaggctattgctacaatatttttaaaggtttcttttttaactttgaaattttttgtttttccttttctttttataaatgtaacagagggtttcaaagcatattatttttcagagagatttagttttactttaatggagtgactgtgaagtggttgggattttttgcttgtagaaagtagacttgctctttgtcagatttccaaacaaccttgccagccttggctgtcaaaaggaggcaggagcagttctcaacacaccaagccttattcccactcccttgggttgctgctgagccaaatagcatctttacagaggaagtgggatcagaggcaggaagtgtggaaagttgctaagaagcagggcttgcctctgtcctcccggggactccacagggatattcgtgcagggcaggggctctgtgccagccctgctctctcagatgccacagccactctgcagaggtgactcttggagctggaggaagtcaaaactgggccactgtttgtactgatggtgtattagcatgagcagcgtggccctggccccacactcccaaatctgccactccatagacccacttgcctcaaggctttatatttggctgctttcttacaatgagaattaagatttttaaactgaagttgaccatacaggttgcattagccctaactggcttcatgtaagaagggtgactgcctaaactagttccttgtaagctgaaccatcaattatcagttgaagccatacttttatttaaattaatatacgtagataccagaggccaagccacagagaggataatagttcttcccaataaaggtgatattaatcagactaatttcgaactaaagaagttactgcttaaagacggaatttcaggggaagcaagactcatttagaacaaatgaaatttctccagtcctacatttctgaattgacttctagcacatcaaaaatatttcagtcattatcagtctcattaactgaaatgccaaatgctaaatgcagtgttctttcacactgttttaattttcttgggaaattgagtccagtggatgttaatggagtgggttgcccatccctgaaatgtcttattttcaagtgcctggcctgggaaagaaggggaagaaacaattgcattatatccaaagatacactataaaaatagagtttttaccaaaaaaagatgtttgttctcatctcagtaggcctcatttgggcaagtgacccacaggtcttttggcgagtttgctatttgcctgttgaaatacttgtttcaacttagagaacagttatgatgtgaccatagcatggcacaactaaaaatctaagcctgaaacctgaaaaaagagatatgacaagggaaattaatcaggctatacataagtattgtatttatttgaataaaaataaaaagagcaacccataatcctagtcctgtacttctttaccttgatgctctaggacatctgatgataaagacaaggttttgtcttagattatcctaataggcagattgagttgtcggctgattcagtgagccaagctctagttagtgcagactccttccatcagttcagcatgaccaaacactggggggttgggataggtgagttctaagagg

SEQ ID NO: 466373 - DNA, 5083 bp, Homo sapiens
  misc_feature (2)..(2): n is a, c, g, or t
  misc_feature (4)..(4): n is a, c, g, or t
  misc_feature (8)..(9): n is a, c, g, or t
  misc_feature (11)..(11): n is a, c, g, or t
anantaanntnttttcgactaccatggctgcaggagtcttgcctcagaatgaacaaccatattctaccttggtgaataacagcgagtgtgttgcaaacatgaaagtgagtggggctgactcttcctgcctccggctcttgcctcccagtgccatgcaggtgcaggatgcaaccaggcggccctcagccgtgcgcttcctcagctcctttctccagggccgccggcactccacctcagacccagtactgcggctgcagcaggcccggcggggctctggcttgggctccggctctgccacgaagctgctgtcctcgtcctctctccaggtgatggtggctgtttcctcagtcagccatgcagagggaaacccaactttccccgaaagaaaaagaaatttagaacgtccaacaccaaagtacacaaaagtaggggagcgtttacggcatgtcattcctggacacatggcatgttccatggcgtgtggcggtagagcttgcaagtatgagaacccagcccgctggagtgagcaggagcaagccattaagggggtttactcatcctgggtcactgataatatactggccatggcccgcccatcctctgagctcctggagaagtaccacatcattgatcagttcctcagccatggcataaaaacaataatcaacctccagcgccctggtgagcatgctagctgtgggaaccctctggaacaagaaagtggcttcacataccttcctgaggctttcatggaggctggcatttacttctacaatttcggatggaaggattatggtgtagcgtctcttactactatcctagatatggtgaaggtgatgacatttgccttacaggaaggaaaagtagctatccattgtcatgcagggcttggtcgaacaggtgttttaatagcctgttacttagtttttgcaacgagaatgactgctgaccaagcaattatatttgtgcgggcaaagcgacccaattccatacaaaccagaggacagctcctctgtgtaagggaatttactcagtttctaactcctctccgcaatatattctcttgctgtgatcccaaagcacatgctgtcaccttacctcaatatctaattcgccagcgtcatctgcttcatggttatgaggcacgacttctgaaacacgtgccaaaaattatccacctagtttgcaaattgctgctggacttagcggagaacaggccagtgatgatgaaggatgtgtccgaaggacctggtctctctgctgaaatagaaaagacaatgtctgagatggtcaccatgcagctggataaagagttactgaggcatgacagtgatgtgtccaacccgcctaaccccactgcagtggcagcagattttgacaatcgaggcatgattttctccaatgagcaacagtttgaccctctttggaaaaggcggaatgttgagtgccttcaacccctgactcatctgaaaaggcggctcagctacagtgactcagatttaaagagggccgagaacctcctggagcaaggggagactccacagacagtgcctgcccagatcttggttggccacaagcccaggcagcagaagctcataagccattgttacatcccacagtctccagaaccagacttacacaaggaagccttggttcgcagcacactttctttctggagtcagtcaaagtttggaggcctggaaggactcaaagataatgggtcaccaattttccatggaaggatcattccaaaggaagcacagcagagtggagctttctctgcagatgtttcaggctcacacagccctggggagccagtttcacccagctttgcaaatgtccataaggatccaaaccctgctcaccagcaagtgtctcactgtcagtgtaaaactcatggtgttgggagccctggctctgtcaggcagaacagcaggacaccccgaagccctctggactgtggctccagtcccaaagcacagttcttggttgaacatgaaacccaggacagtaaagatctgtctgaagcagcttcacactctgcattacagtctgaattgagtgctgaggcaagaagaatactggcggccaaagccctagcaaatttaaatgaatctgtagaaaaggaggaactaaaaaggaaggtagaaatgtggcaggcatttggagtattagaaaaactttccagttatcttccctatgtcaaatttcaggactcggggcttattgttaaatcctacataggatgctaaaaagatatttcaaagaagtacatatgccccatttaccagctttcaagcacctttattttatttttgcagacttcgaagctcaaagcttttccttttccttagaccccaggttaatgtataaatgttcccttatttctactttctcatctaccatctactttattgcaaaaaaatagttctgttttgttcaccagaaggctgaaaaggaagactcttgtgaactgtttctgtggtttctgaataaagtagagaacttggattaactaagccctttccctgtgctataagctttaaccgaccttatctcagtcaatcagcccaacagcttgtgaagcaggggatgagtttcatagagagaaactggggcttacagaattcagtgtcttagtccagtgtccagcctggaagtggagaggctgggaggggtcccagttctgcactctggagcctgagtctttcactcttgtgggcagcgcaagaatcatgcagtgtcaaatggtgcacctccctctcctctccctgtctctgtctctgtctgtctgtctctttctcttcctttttagaaagagcttaattcccgagatggagcttgggaaagaatatgtggcgagagggaccctttcatcctatgcagcttgatgtggtcttgggtggagcaactgaaggagcctgtaatcaccaaagaggatgtggacatgttggttgacaggcgagcagatgccgcagaagcactttttttattagagaagggacagcaccagactattctctgcgtgttgcactgcatagtgaacctgcagacaattcccgtggatgtggaggaagctttccttgcccatgccattaaggcattcactaaggttaattttgattctgaaaatggaccaacagtttacaacaccctgaagaaaatatttaagcacacgctggaagaaaaaagaaaaatgacaaaagatggccctaagcctggcctctagctttcactcgtggtgaatatttcagacctaaagatccagatagtatctctgttcatatgtgaataagttgaagattgtggggctactttttctcatagcactttattttgaatgttgttagtttgtgctgagaatggtcgtccgtatttgaaccaattatttattttaaaatatatttaagctacatttttgttttgaaaaattgccataaatttggtgccactttcttttatttatttgactgagttaatattattgtattaacattttaagtatatggtgtttacattcttatttcttttgacattttggaaataatcataacttgtctttccaaaataaccattttcttgatggaactcttcctagagtttttaccaaatagctaactttagtatgtcttaagctgttttatatttgttacgaagaaggctattgctacaatatttttaaaggtttcttttttaactttgaaattttttgtttttccttttctttttataaatgtaacagagggtttcaaagcatattatttttcagagagatttagttttactttaatggagtgactgtgaagtggttgggattttttgcttgtagaaagtagacttgctctttgtcagatttccaaacaaccttgccagccttggctgtcaaaaggaggcaggagcagttctcaacacaccaagccttattcccactcccttgggttgctgctgagccaaatagcatctttacagaggaagtgggatcagaggcaggaagtgtggaaagttgctaagaagcagggcttgcctctgtcctcccggggactccacagggatattcgtgcagggcaggggctctgtgccagccctgctctctcagatgccacagccactctgcagaggtgactcttggagctggaggaagtcaaaactgggccactgtttgtactgatggtgtattagcatgagcagcgtggccctggccccacactcccaaatctgccactccatagacccacttgcctcaaggctttatatttggctgctttcttacaatgagaattaagatttttaaactgaagttgaccatacaggttgcattagccctaactggcttcatgtaagaagggtgactgcctaaactagttccttgtaagctgaaccatcaattatcagttgaagccatacttttatttaaattaatatacgtagataccagaggccaagccacagagaggataatagttcttcccaataaaggtgatattaatcagactaatttcgaactaaagaagttactgcttaaagacggaatttcaggggaagcaagactcatttagaacaaatgaaatttctccagtcctacatttctgaattgacttctagcacatcaaaaatatttcagtcattatcagtctcattaactgaaatgccaaatgctaaatgcagtgttctttcacactgttttaattttcttgggaaattgagtccagtggatgttaatggagtgggttgcccatccctgaaatgtcttattttcaagtgcctggcctgggaaagaaggggaagaaacaattgcattatatccaaagatacactataaaaatagagtttttaccaaaaaaagatgtttgttctcatctcagtaggcctcatttgggcaagtgacccacaggtcttttggcgagtttgctatttgcctgttgaaatacttgtttcaacttagagaacagttatgatgtgaccatagcatggcacaactaaaaatctaagcctgaaacctgaaaaaagagatatgacaagggaaattaatcaggctatacataagtattgtatttatttgaataaaaataaaaagagcaaccca

SEQ ID NO: 466374 - DNA, 896 bp, Homo sapiens
ccccagcatctattctactccagatgatacgccaatcatgggaaccccttccttctgctgtgcttgcagaaggaattcaaattgttaaatcccttattacaggctcctattcttcatcatccatccttcaggttctcatgtcccatctcaacttccttctgcaattctccttgatttatagctcagctgaagctccaaagccagccatgcccacagtaggacacttcctgccaacccttacatcattgacatttggccttttctgcctaaacaagttgtggtattatggccacaatttcgagggctgcagagtattgacggagaaaagagagaacaggttgaacattaataaggaggagctttggcactggtccaagaaacaggataagctaaatctctgcatctattctggacaccagaatggcgcggggaccatttagaggtgagatgggcagatgaggagctgaagtttcagagaggttaagcaatttgcctaggttcacacagcaaagatgatgaaacttacaaccacaaggtgagcccttcttactagaagttctcttcgtgtctcctggtgttcacatattggaagacttaatccttcagtgaccgggaaaagacctcctaggacctaccaatccagccttatcagacacctggcagagaaagtgatttctgaagcaggagaaaacccaggaagattgctcagttcctgtgcaagctgcttcccagctggagatgacagttaatcttgaaaatcaattcagtgcctgctctcactgcagacactcctcagggcaggccacggctcctctcaccaccgttaaacagaataaaaagtggggaattgagcagcataagacatgcagtggctgccagtgggaagcggtcaggag

SEQ ID NO: 466375 - DNA, 2587 bp, Homo sapiens
gacagacagagggacagacgtggctctgcaggtccactcggtccctggcaccggccgcaggggtggcagaacgggagtgtgaggctgatgctcaccatggggcgcctgcaactggttgtgttgggcctcacctgctgctgggcagtggcgagtgccgcgaagctgggcgccgtgtacacagaaggtgggttcgtggaaggcgtcaataagaagctcggcctcctgggtgactctgtggacatcttcaagggcatccccttcgcagctcccaccaaggccctggaaaatcctcagccacatcctggctggcaagggaccctgaaggccaagaacttcaagaagagatgcctgcaggccaccatcacccaggacagcacctacggggatgaagactgcctgtacctcaacatttgggtgccccagggcaggaagcaaggcacctgctgcacagggacaggggaccggctggagacagggccaggcggggcgtctggggtcaccagccgctcccccatctcagtctcccgggacctgcccgttatgatctggatctatggaggcgccttcctcatggggtccggccatggggccaacttcctcaacaactacctgtatgacggcgaggagatcgccacacgcggaaacgtcatcgtggtcaccttcaactaccgtgtcggcccccttgggttcctcagcactggggacgccaatctgccaggtaactatggccttcgggatcagcacatggccattgcttgggtgaagaggaatatcgcggccttcgggggggaccccaacaacatcacgctcttcggggagtctgctggaggtgccagcgtctctctgcagaccctctccccctacaacaagggcctcatccggcgagccatcagccagagcggcgtggccctgagtccctgggtcatccagaaaaacccactcttctgggccaaaaaggtggctgagaaggtgggttgccctgtgggtgatgccgccaggatggcccagtgtctgaaggttactgatccccgagccctgacgctggcctataaggtgccgctggcaggcctggagtaccccatgctgcactatgtgggcttcgtccctgtcattgatggagacttcatccccgctgacccgatcaacctgtacgccaacgccgccgacatcgactatatagcaggcaccaacaacatggacggccacatcttcgccagcatcgacatgcctgccatcaacaagggcaacaagaaagtcacggaggaggacttctacaagctggtcagtgagttcacaatcaccaaggggctcagaggcgccaagacgacctttgatgtctacaccgagtcctgggcccaggacccatcccaggagaataagaagaagactgtggtggactttgagaccgatgtcctcttcctggtgcccaccgagattgccctagcccagcacagagccaatgccaagagtgccaagacctacgcctacctgttttcccatccctctcggatgcccgtctaccccaaatgggtgggggccgaccatgcagatgacattcagtacgttttcgggaagcccttcgccacccccacgggctaccggccccaagacaggacagtctctaaggccatgatcgcctactggaccaactttgccaaaacaggggaccccaacatgggcgactcggctgtgcccacacactgggaaccctacactacggaaaacagcggctacctggagatcaccaagaagatgggcagcagctccatgaagcggagcctgagaaccaacttcctgcgctactggaccctcacctatctggcgctgcccacagtgaccgaccaggaggccacccctgtgccccccacaggggactccgaggccactcccgtgccccccacgggtgactccgagaccgcccccgtgccgcccacgggtgactccggggccccccccgtgccgcccacgggtgactccggggccccccccgtgccgcccacgggtgactccggggccccccccgtgccgcccacgggtgactccggggccccccccgtgccgcccacgggtgactccggggccccccccgtgccgcccacgggtgactccggggccccccccgtgccgcccacgggtgactccggggccccccccgtgccgcccacgggtgactccggcgccccccccgtgccgcccacgggtgacgccgggcccccccccgtgccgcccacgggtgactccggcgccccccccgtgccgcccacgggtgactccggggccccccccgtgacccccacgggtgactccgagaccgcccccgtgccgcccacgggtgactccggggccccccctgtgccccccacgggtgactctgaggctgcccctgtgccccccacagatgactccaaggaagctcagatgcctgcagtcattaggttttagcgtcccatgagccttggtatcaagaggccacaagagtgggaccccaggggctcccctcccatcttgagctcttcctgaataaagcctcatacccctgtcggtgtctttctttgctcccaaggctaagctgcaggatctgcctggc

SEQ ID NO: 466376 - DNA, 1380 bp, Homo sapiens
  misc_feature (54)..(54): n is a, c, g, or t
  misc_feature (57)..(57): n is a, c, g, or t
  misc_feature (100)..(100): n is a, c, g, or t
  misc_feature (104)..(104): n is a, c, g, or t
ccccgcaagacggggggcgcaccgtgtcgctcgccgggcggcgggaggggaganacntacggtaagaaaggagtttgtgaaagcgtcttgcgggggctgnccgnagcccccgcaagacgacctttgatgtctacaccgagtcctgggcccaggacccatcccaggagaataagaagaagactgtggtggactttgagaccgatgtcctcttcctggtgcccaccgagattgccctagcccagcacagagccaatgccaagagtgccaagacctacgcctacctgttttcccatccctctcggatgcccgtctaccccaaatgggtgggggccgaccatgcagatgacattcagtacgttttcgggaagcccttcgccacccccacgggctaccggccccaagacaggacagtctctaaggccatgatcgcctactggaccaactttgccaaaacaggggaccccaacatgggcgactcggctgtgcccacacactgggaaccctacactacggaaaacagcggctacctggagatcaccaagaagatgggcagcagctccatgaagcggagcctgagaaccaacttcctgcgctactggaccctcacctatctggcgctgcccacagtgaccgaccaggaggccacccctgtgccccccacaggggactccgaggccactcccgtgccccccacgggtgactccgagaccgcccccgtgccgcccacgggtgactccggggccccccccgtgccgcccacgggtgactccggggccccccccgtgccgcccacgggtgactccggggccccccccgtgccgcccacgggtgactccggggccccccccgtgccgcccacgggtgactccggggccccccccgtgccgcccacgggtgactccggggccccccccgtgccgcccacgggtgactccggggccccccccgtgccgcccacgggtgactccggcgccccccccgtgccgcccacgggtgacgccgggcccccccccgtgccgcccacgggtgactccggcgccccccccgtgccgcccacgggtgactccggggccccccccgtgacccccacgggtgactccgagaccgcccccgtgccgcccacgggtgactccggggccccccctgtgccccccacgggtgactctgaggctgcccctgtgccccccacagatgactccaaggaagctcagatgcctgcagtcattaggttttagcgtcccatgagccttggtatcaagaggccacaagagtgggaccccaggggctcccctcccatcttgagctcttcctgaataaagcctcatacccctgtcggtgtctttctttgctcccaaggctaagctgcaggatctgcctggc

SEQ ID NO: 466377 - DNA, 810 bp, Homo sapiens
ttttgaacctaaatattctcattgcaaaatgggagtaatcatactccacccacagagttgctacaagatgagaaatgaaggactccttattcggggcaaactcactcccactgtcagctggcgggtcccagaccacctgtatctgagcagtgtgaagaagaagaggcaagaacaacccctggaccgaccaaagccctgtgcccttgcatcccatacccagcacccacatcctgctgccattgtcaccaccatgcccaagagaaagggtgaaggggatgctaaaggagataaatccaaagttaaggacgaaccacagagaaaatccacgaagttgtctgctaaacctgctcctccaaagccagagcccaagcttaaaaaggcccctgcaaagaagggagagaagacgtccttcacttccaggatccagtccaaactcctgggcttggcacatgaaccctccatcatctggcacctggcagcccacatgctggagcctcacggatttgctcatcgccctctgaacacctgtggccttctcactcctctgtgtctttgcacatcctttccccaacctcatgccaggccattgcattgtgatccaggctcagtcttcgttctgcttcgtggcatcacagtcccttatttgaaactgaaccaggactgcagtcttcgactttgacatcaaatttgacacctcagtggcccaagctttcagaaacttggaattgcagacattatggatttggacctgccctcagaaggttactatgaggactaaatacattcaaagtacatgcaagtactttttag

SEQ ID NO: 466378 - DNA, 1300 bp, Homo sapiens
ttttgaacctaaatattctcattgcaaaatgggagtaatcatactccacccacagagttgctacaagatgagaaatgaaggactccttattcggggcaaactcactcccactgtcagctggcgggtcccagaccacctgtatctgagcagtgtgaagaagaagaggcaagaacaacccctggaccgaccaaagccctgtgcccttgcatcccatacccagcacccacatcctgctgccattgtcaccaccatgcccaagagaaagggtgaaggggatgctaaaggagataaatccaaagttaaggacgaaccacagagaaaatccacgaagttgtctgctaaacctgctcctccaaagccagagcccaagcttaaaaaggcccctgcaaagaagggagagaagacgtccttcacttccaggatccagtccaaactcctgggcttggcacatgaaccctccatcatctggcacctggcagcccacatgctggagcctcacggatttgctcatcgccctctgaacacctgtggccttctcactcctctgtgtctttgcacatcctttccccaacctcatgccaggccattgcattgtgatccaggctcagtcttcgttctgcttcgtggcatcacagtcccttatttgaaactgaaccaggactgcagtcttcgactttgacatcaaatttgacacctcagtggcccaagctttcagaaacttggaattgcagacattatggatttggacctgccctcagaagagctacctactgaaatatttacaagtgaaatgatgtgagatgtgggatttgattcaaaatgatcctttatgtatgaagagtggggcgtggagaatgcatgaagatacagataaaataaacgtgtctatgggttaatacatgctgtagctgggtacatggtggtttattatgctattctttctagttttgtgtgcatctgaaattttccataataaatactttttagaaaactcatgaaccgttctgattcctggagatgccttggtgcgcatgaccatataatccttctttgaagggtgacttcggaatcaatcaacttaggtttgccacctggctgtcacttggtagctgtgtagctctaccctgactgacctcagttatcccatttgtaaaattgcaaaagtgcctcatacgagcacttagcacagggtgagacactggacttgtaaatgatagctcaattttcttggtccagaacataactttatgaaaacagcagtatttgtttagtaggctgtttctgcttctataacatgtgt

SEQ ID NO: 466379 - DNA, 3252 bp, Homo sapiens
gagaaatctggaatccagatacggcagaatcctgctgccttcaacttctaatgtgaccacagactcctggaggcccagtgagaaggagcccggtctgtcctagtcctcacatccttcagctcctgccagcccaatcagattagtatctggttcctctaagtcctcgtgtttgtccctgtcctaaattttcctggtgcatgacgacaaaccccgggcctcctgaattgctggcaccggctgtggtcgacagacagagggacagacgtggctctgcaggtccactcggtccctggcaccggccgcaggggtggcagaacgggagtgtggttggtgtgggaagcacaggccccagtgtctcctgggggactgttgggtgggaaggctctggctgccctcaccctgttcccatcactgcagagggctgtgcggtggctggagctgccaccgagcgtctcggatgcatcaggctggatggtgacatctccccacccttgaatgagacggctttgtgctgctctgggacccgcacccagcttggactgcttgctccatggccccaggaaaagctcgtacagataagtgacaccaagccctgtgaacaaaccagaaggcagggcactgtgcaccctgcccggccccaccatcccccttaccacccgccaccttgccacctgcctctgctcccagatctggaaacttcgggccaggctgagaaagagcccagcacagccccgcagcagatcccgggcactcacgctcatttctatggggacaggcccagcaaagagagagaggagagggaggggctgccgctgaagaggacagatctggccctagacagtggctctcagcctggggacgtgtggcagggcctggagacatctgtgattgtcacagctggggagggggtgctcctggcacctcaccccatgctgcactatgtgggcttcgtccctgtcattgatggagacttcatccccgctgacccgatcaacctgtacgccaacgccgccgacatcgactatatagcaggcaccaacaacatggacggccacatcttcgccagcatcgacatgcctgccatcaacaagggcaacaagaaagtcacggaggaggacttctacaagctggtcagtgagttcacaatcaccaaggggctcagaggcgccaagacgacctttgatgtctacaccgagtcctgggcccaggacccatcccaggagaataagaagaagactgtggtggactttgagaccgatgtcctcttcctggtgcccaccgagattgccctagcccagcacagagccaatgccaagagtgccaagacctacgcctacctgttttcccatccctctcggatgcccgtctaccccaaatgggtgggggccgaccatagagatgagatccagtacatctttggggagccctttgccaccccactccgggctaccggccccaagacaggacaggaccccaacatgggccactcggctgtgcccacacactgggaaccctacactacggaaaacagcggctacctggagatcaccaagaagatgggcagcagctccatgaagcggagcctgagaaccaacttcctgcgctactggaccctcacctatctggcgctgcccacagtgaccgaccaggaggccagtgactctgaggctcccccgtaccccctacgggtgactctgaggcccgtgcccaccttgggtgacactgaggctgcccctgtgtcccccacagatgactccgaggaagctcagatgctgcagtcattagtttctagtgctaagctgcaggaaggagtggacctcagttacccttacagcaccaggtgggaggataaggctcagggccgacaagtcctgtggcctcatgcagcagagctgagccgggacgaaccctgtcccctggagaagcaggggacaccctggctggctgtgaccactttggccaccctgggcttcctggggggctgcgagctctaaaggctcagggcccagctacccctttaggatgggtcagtaacaacacgactgactctgtaaattggtgatcacctgagactggacctcagcaccacacggacctgtgcttcaccttggccatcgggggagagtatggaggtcttttgctggcaggaatcagcacccttatcctggcaatcagcactcactggccattcatgaggctccagcaggacgagtggccacagtgtgcagggcacaggggatggggctttccaaggtgtttctggatgacatcaatcacacaaggagttgtaggaatgctggcatcctggttcacgggtagacgccagaggatgccaagggtgctgggtagaaagcagaggatgccaagggtgctgggtggtgggccccttgggggtgcccaatggctctggcagagttgttggggcagagtcgggaccacccccacctcttccgggtccaagcccaggcactgcactgagcacttgatgagcctgacctcaccatggccttgtgacgtgggcactgtgggcaggaatgcttatggaatgaggcccactgtaaccctaacacagcatcacaagtctttccccagagagaaaacgcacaggcaatggaaatctatggttaggaacaaagattcccgtctaagaaaaagggtggaccacgggcctctagaagggactgagggggcaaagtcctgcccgtgcactggctaacactcttcctttagcttttcccccccactttccatattgtacattttatctgtttataatttttcttagtgctgactaaattccagagttagaccttgaaatccacaagttcctaattggtggtcaacagaaacctcagcaagacaagcagaaaatgctcctcttcccctaaagctgtagaaaggcagccaccaacctgggctaggaaatggtccttacagatactattttttttttaactgtggtaaaacctatataacaaaactgatgctaatttaactgtttttaagagtagaattgagtgacattagttcgattcactgttgggcaaccatcaccactctctatttccataattttttcatcaccccaaatagaagctctatatccattagctaactcctcatttcccctccctctaacccctggtagcctctatcctttctgtctccatgaatttgccttttggagatatttctcataagtggaattgtaatgttttcaaagttcatccatgttgtagcatgtgtgggcat

SEQ ID NO: 466380 - DNA, 878 bp, Homo sapiens
cagttaggcacataactgtgactgtcctgctggagagggaggccacaagcaggggacctggaagatgaggggccacatggagagtgaggcctcagagaggagtgcggaggttctggacatgtgaatgaaggtgccaccttggacgttccagacccgtcgaggctccaaggacaccagacccatccatcgtgtgataagagccaacaagagcccccagcagaacagcatggcgtccctccaccccagggctcacactggggagggcctgctggatgggagtgaggttagcaggacagggataagacagatgaagaaaagaaagggcccagacacaagtgaggaggggacaaagggagagcattttgaacgtgtgtccggagtgtgggatggagagaagaaaggagaggggaaaagggaaaagggaggggagaagagaggaggagggatagggcttcatgagagccagattgcagtgactgttattgcccttctgggtctagccacctaccagggctactgggctccaggctggtgctggggaatgtcagcagagtcctgtgatgtgattcatcttcaagtctttcagtcatggataccagcacctgttctggtggaggtggcaggggagtgaagtggactctgtggaagtccttggttgtagttttgtttagcacacaggttttctcaaatactggttatgctagcagtgaagttgtcacatggacagactcaggacctctggttagccagggtgttgcaggcagagaaattagctgttgttttctccttctttgtaacagcgttgttctgttatgagttgctgtaatctcaaactttttatgtgaaatggttgtaccattttatattctcattagcag

SEQ ID NO: 466381 - DNA, 1227 bp, Homo sapiens
tagctgggagtgctgcagccgctgccgccgattccggatctcattgccacgcgcccccgacgaccgcccgacgtgcattcccgattccttttggttccaagtccaatatggcaactctaaaggatcagctgatttataatcttctaaaggaagaacagaccccccagaataagattacagttgttggggttggtgctgttggcatggcctgtgccatcagtatcttaatgaaggacttggcagatgaacttgctcttgttgatgtcatcgaagacaaattgaagggagagatgatggatctccaacatggcagccttttccttagaacaccaaagattgtctctggcaaagactataatgtaactgcaaactccaagctggtcattatcacggctggggcacgtcagcaagagggagaaagccgtcttaatttggtccagcgtaacgtgaacatctttaaattcatcattcctaatgttgtaaaatacagcccgaactgcaagttgcttattgtttcaaatccagtggatatcttgacctacgtggcttggaagataagtggttttcccaaaaaccgtgttattggaagtggttgcaatctggattcagcccgattccgttacctgatgggggaaaggctgggagttcacccattaagctgtcatgggtgggtccttggggaacatggagattccagtgtgcctgtatggagtggaatgaatgttgctggtgtctctctgaagactctgcacccagatttagggactgataaagataaggaacagtggaaagaggttcacaagcaggtggttgagagtgcttatgaggtgatcaaactcaaaggctacacatcctgggctattggactctctgtagcagatttggcagagagtataatgaagaatcttaggcgggtgcacccagtttccaccatgattaagggtctttacggaataaaggatgatgtcttccttagtgttccttgcattttgggacagaatggaatctcagaccttgtgaaggtgactctgacttctgaggaagaggccgtttgaagaagagtgcagatacactttgggggatccaaaaggagctgcaattaaaagcctcagagtgtattcactatggggaggacacacagagcaagacagggggagcaggtatgcccataccacacggagaaccaactttcagagagggaaaaacacccgcggacaaaaggagcgc

SEQ ID NO: 466382 - DNA, 1261 bp, Homo sapiens
tagctgggagtgctgcagccgctgccgccgattccggatctcattgccacgcgcccccgacgaccgcccgacgtgcattcccgattccttttggttccaagtccaatatggcaactctaaaggatcagctgatttataatcttctaaaggaagaacagaccccccagaataagattacagttgttggggttggtgctgttggcatggcctgtgccatcagtatcttaatgaaggacttggcagatgaacttgctcttgttgatgtcatcgaagacaaattgaagggagagatgatggatctccaacatggcagccttttccttagaacaccaaagattgtctctggcaaagactataatgtaactgcaaactccaagctggtcattatcacggctggggcacgtcagcaagagggagaaagccgtcttaatttggtccagcgtaacgtgaacatctttaaattcatcattcctaatgttgtaaaatacagcccgaactgcaagttgcttattgtttcaaatccagtggatatcttgacctacgtggcttggaagataagtggttttcccaaaaaccgtgttattggaagtggttgcaatctggattcagcccgattccgttacctgatgggggaaaggctgggagttcacccattaagctgtcatgggtgggtccttggggaacatggagattccagtgtgcctgtatggagtggaatgaatgttgctggtgtctctctgaagactctgcacccagatttagggactgataaagataaggaacagtggaaagaggttcacaagcaggtggttgagagtgcttatgaggtgatcaaactcaaaggctacacatcctgggctattggactctctgtagcagatttggcagagagtataatgaagaatcttaggcgggtgcacccagtttccaccatgattaagggtctttacggaataaaggatgatgtcttccttagtgttccttgcattttgggacagaatggaatctcagaccttgtgaaggtgactctgacttctgaggaagaggccgtttgaagacgaagccgaaaccctgggggattccaaaggaagggcacattaaagagctccgaggcacatcaatgcagggcgtagcgaaaccagcaatactacgggaagctggcacgtttgtcccctaatcagagcgggagaaaacgaggaatttgcgatggcggggaacaacacagccgagtagaaaaaaagggaggacacacgagaacgaa

SEQ ID NO: 466383 - DNA, 1217 bp, Homo sapiens
aaaaaaatcggctagtcgaggcggcgtgtaatcggcagaggcgcccccgacgaccgcccgacgtgcattcccgattccttttggttccaagtccaatatggcaactctaaaggatcagctgatttataatcttctaaaggaagaacagaccccccagaataagattacagttgttggggttggtgctgttggcatggcctgtgccatcagtatcttaatgaaggacttggcagatgaacttgctcttgttgatgtcatcgaagacaaattgaagggagagatgatggatctccaacatggcagccttttccttagaacaccaaagattgtctctggcaaagactataatgtaactgcaaactccaagctggtcattatcacggctggggcacgtcagcaagagggagaaagccgtcttaatttggtccagcgtaacgtgaacatctttaaattcatcattcctaatgttgtaaaatacagcccgaactgcaagttgcttattgtttcaaatccagtggatatcttgacctacgtggcttggaagataagtggttttcccaaaaaccgtgttattggaagtggttgcaatctggattcagcccgattccgttacctgatgggggaaaggctgggagttcacccattaagctgtcatgggtgggtccttggggaacatggagattccagtgtgcctgtatggagtggaatgaatgttgctggtgtctctctgaagactctgcacccagatttagggactgataaagataaggaacagtggaaagaggttcacaagcaggtggttgagagtgcttatgaggtgatcaaactcaaaggctacacatcctgggctattggactctctgtagcagatttggcagagagtataatgaagaatcttaggcgggtgcacccagtttccaccatgattaagggtctttacggaataaaggatgatgtcttccttagtgttccttgcattttgggacagaatggaatctcagaccttgtgaaggtgactctgacttctgaggaagaggccgtttgaagaagagtgcagatacactttgggggatccaaaaggagctgcaattaaaagcctcagagtgtattcactatggggaggacacacagagcaagacagggggagcaggtatgcccataccacacggagaaccaactttcagagagggaaaaacacccgcggacaaaaggagcgc

SEQ ID NO: 466384 - DNA, 1226 bp, Homo sapiens
gattaaccccaagtggggctaataaacgcggatgggtgaaccctcaggaggctatacttacacccaaacgtcgatattccttttccacgctaattccaagtccaatatggcaactctaaaggatcagctgatttataatcttctaaaggaagaacagaccccccagaataagattacagttgttggggttggtgctgttggcatggcctgtgccatcagtatcttaatgaaggacttggcagatgaacttgctcttgttgatgtcatcgaagacaaattgaagggagagatgatggatctccaacatggcagccttttccttagaacaccaaagattgtctctggcaaagactataatgtaactgcaaactccaagctggtcattatcacggctggggcacgtcagcaagagggagaaagccgtcttaatttggtccagcgtaacgtgaacatctttaaattcatcattcctaatgttgtaaaatacagcccgaactgcaagttgcttattgtttcaaatccagtggatatcttgacctacgtggcttggaagataagtggttttcccaaaaaccgtgttattggaagtggttgcaatctggattcagcccgattccgttacctgatgggggaaaggctgggagttcacccattaagctgtcatgggtgggtccttggggaacatggagattccagtgtgcctgtatggagtggaatgaatgttgctggtgtctctctgaagactctgcacccagatttagggactgataaagataaggaacagtggaaagaggttcacaagcaggtggttgagagtgcttatgaggtgatcaaactcaaaggctacacatcctgggctattggactctctgtagcagatttggcagagagtataatgaagaatcttaggcgggtgcacccagtttccaccatgattaagggtctttacggaataaaggatgatgtcttccttagtgttccttgcattttgggacagaatggaatctcagaccttgtgaaggtgactctgacttctgaggaagaggccgtttgaagaagagtgcagatacactttgggggatccaaaaggagctgcaattaaaagcctcagagtgtattcactatggggaggacacacagagcaagacagggggagcaggtatgcccataccacacggagaaccaactttcagagagggaaaaacacccgcggacaaaaggagcgc

SEQ ID NO: 466385 - DNA, 1364 bp, Homo sapiens
aaaaaaatcggctagtcgaggcggcgtgtaatcggcagaggcgcccccgacgaccgcccgacgtgcattcccgattccttttggttccaagtccaatatggcaactctaaaggatcagctgatttataatcttctaaaggaagaacagaccccccagaataagattacagttgttggggttggtgctgttggcatggcctgtgccatcagtatcttaatgaagactataatgtaactgcaaactccaagctggtcattatcacggctggggcacgtcagcaagagggagaaagccgtcttaatttggtccagcgtaacgtgaacatctttaaattcatcattcctaatgttgtaaaatacagcccgaactgcaagttgcttattgtttcaaatccagtggatatcttgacctacgtggcttggaagataagtggttttcccaaaaaccgtgttattggaagtggttgcaatctggattcagcccgattccgttacctgatgggggaaaggctgggagttcacccattaagctgtcatgggtgggtccttggggaacatggagattccagtgtgcctgtatggagtggaatgaatgttgctggtgtctctctgaagactctgcacccagatttagggactgataaagataaggaacagtggaaagaggttcacaagcaggtggttgagagtgcttatgaggtgatcaaactcaaaggctacacatcctgggctattggactctctgtagcagatttggcagagagtataatgaagaatcttaggcgggtgcacccagtttccaccatgattaagggtctttacggaataaaggatgatgtcttccttagtgttccttgcattttgggacagaatggaatctcagaccttgtgaaggtgactctgacttctgaggaagaggccgtttgaagaagagtgcagatacactttgggggatccaaaaggagctgcaattttaaagtcttctgatgtcatatcattttactgtctaggctacaacaggattctagttggaggttgtacatgctgtcctttttatctgatctgtgattaaagcagtaatattttaagatggactgggaaaaacatcaactcctcaagttagaaataggaatgatttgtaaaatccacagctatatcctgatgctggatggtattaatcttgtgtagtcctaaactggtaagatattcacaacctgggcaattttgaaaatcagttggggaataaaattgtctattatgctgtgtttcttaactgtcattattaaggctttatttcttgccttttcaggattaatatatgactcacacattgtcactatatttatttaataataactgtgttt

SEQ ID NO: 466386 - DNA, 1438 bp, Homo sapiens
gattaaccccaagtggggctaataaacgcggatgggtgaaccctcaggaggctatacttacacccaaacgtcgatattccttttccacgctaattccaagtccaatatggcaactctaaaggatcagctgatttataatcttctaaaggaagaacagaccccccagaataagattacagttgttggggttggtgctgttggcatggcctgtgccatcagtatcttaatgaaggacttggcagatgaacttgctcttgttgatgtcatcgaagacaaattgaagggagagatgatggatctccaacatggcagccttttccttagaacaccaaagattgtctctggcaaagactataatgtaactgcaaactccaagctggtcattatcacggctggggcacgtcagcaagagggagaaagccgtcttaatttggtccagcgtaacgtgaacatctttaaattcatcattcctaatgttgtaaaatacagcccgaactgcaagttgcttattgtttcaaatccagtggatatcttgacctacgtggcttggaagataagtggttttcccactgatgggggaaaggctgggagttcacccattaagctgtcatgggtgggtccttggggaacatggagattccagtgtgcctgtatggagtggaatgaatgttgctggtgtctctctgaagactctgcacccagatttagggactgataaagataaggaacagtggaaagaggttcacaagcaggtggttgagagtgcttatgaggtgatcaaactcaaaggctacacatcctgggctattggactctctgtagcagatttggcagagagtataatgaagaatcttaggcgggtgcacccagtttccaccatgattaagggtctttacggaataaaggatgatgtcttccttagtgttccttgcattttgggacagaatggaatctcagaccttgtgaaggtgactctgacttctgaggaagaggccgtttgaagaagagtgcagatacactttgggggatccaaaaggagctgcaattttaaagtcttctgatgtcatatcattttactgtctaggctacaacaggattctagttggaggttgtacatgctgtcctttttatctgatctgtgattaaagcagtaatattttaagatggactgggaaaaacatcaactcctcaagttagaaataggaatgatttgtaaaatccacagctatatcctgatgctggatggtattaatcttgtgtagtcctaaactggtaagatattcacaacctgggcaattttgaaaatcagttggggaataaaattgtctattatgctgtgtttcttaactgtcattattaaggctttatttcttgccttttcaggattaatatatgactcacacattgtcactatatttatttaataataactgtgttt

SEQ ID NO: 466387 - DNA, 1367 bp, Homo sapiens
tagctgggagtgctgcagccgctgccgccgattccggatctcattgccacgcgcccccgacgaccgcccgacgtgcattcccgattccttttggttccaagtccaatatggcaactctaaaggatcagctgatttataatcttctaaaggaagaacagaccccccagaataagattacagttgttggggttggtgctgttggcatggcctgtgccatcagtatcttaatgaaggacttggcagatgaacttgctcttgttgatgtcatcgaagacaaattgaagggagagatgatggatctccaacatggcagccttttccttagaacaccaaagattgtctctggcaaagactataatgtaactgcaaactccaagctggtcattatcacggctggggcacgtcagcaagagggagaaagccgtcttaatttggtccagcgtaacgtgaacatctttaaattcatcattcctaatgttgtaaaatacagcccgaactgcaagttgcttattgtttcaaatccagtggatatcttgacctacgtggcttggaagataagtggttttcccaaaaaccgtgttattggaagtggttgcaatctggattcagcccgattccgttacctgatgggggaaaggctgggagttcacccattaagctgtcatgggtgggtccttggggaacatggagattccagtgtgcctgtatggagtggaatgaatgttgctggtgtctctctgaagactctgcacccagatttagggactgataaagataaggaacagtggaaagaggttcacaagcaggtggttgagaggtctttacggaataaaggatgatgtcttccttagtgttccttgcattttgggacagaatggaatctcagaccttgtgaaggtgactctgacttctgaggaagaggccgtttgaagaagagtgcagatacactttgggggatccaaaaggagctgcaattttaaagtcttctgatgtcatatcattttactgtctaggctacaacaggattctagttggaggttgtacatgctgtcctttttatctgatctgtgattaaagcagtaatattttaagatggactgggaaaaacatcaactcctcaagttagaaataggaatgatttgtaaaatccacagctatatcctgatgctggatggtattaatcttgtgtagtcctaaactggtaagatattcacaacctgggcaattttgaaaatcagttggggaataaaattgtctattatgctgtgtttcttaactgtcattattaaggctttatttcttgccttttcaggattaatatatgactcacacattgtcactatatttatttaataataactgtgttt

SEQ ID NO: 466388 - DNA, 1243 bp, Homo sapiens
ttcggctagtacgagcgcgggttgatcggcagagggcgtgccgccgattccggatctcattgccacgcgcccccgacgaccgcccgacgtgcattcccgattccttttggttccaagtccaatatggcaactctaaaggatcagctgatttataatcttctaaaggaagaacagaccccccagaataagattacagttgttggggttggtgctgttggcatggcctgtgccatcagtatcttaatgaaggacttggcagatgaacttgctcttgttgatgtcatcgaagacaaattgaagggagagatgatggatctccaacatggcagccttttccttagaacaccaaagattgtctctggcaaagactataatgtaactgcaaactccaagctggtcattatcacggctggggcacgtcagcaagagggagaaagccgtcttaatttggtccagcgtaacgtgaacatctttaaattcatcattcctaatgttgtaaaatacagcccgaactgcaagttgcttattgtttcaaatccagtggatatcttgacctacgtggcttggaagataagtggttttcccaaaaaccgtgttattggaagtggttgcaatctggattcagcccgattccgttacctgatgggggaaaggctgggagttcacccattaagctgtcatgggtgggtccttggggaacatggagattccagtgtgcctgtatggagtggaatgaatgttgctggtgtctctctgaagactctgcacccagatttagggactgataaagataaggaacagtggaaagaggttcacaagcaggtggttgagagtgcttatgaggtgatcaaactcaaaggctacacatcctgggctattggactctctgtagcagatttggcagagagtataatgaagaatcttaggcgggtgcacccagtttccaccatgattaagggtctttacggaataaaggatgatgtcttccttagtgttccttgcattttgggacagaatggaatctcagaccttgtgaaggtgactctgacttctgaggaagaggccgtttgaagaagagtgcagatacactttgggggatccaaaaggagctgcaattaaaagcctcagagtgtattcactatggggaggacacacagagcaagacagggggagcaggtatgcccataccacacggagaaccaactttcagagagggaaaaacacccgcggacaaaaggagcgc

SEQ ID NO: 466389 - DNA, 1159 bp, Homo sapiens
ggacgcgtgggtcgacccacgcgtcgttccaagtccaatatggcaactctaaaggatcagctgatttataatcttctaaaggaagaacagaccccccagaataagattacagttgttggggttggtgctgttggcatggcctgtgccatcagtatcttaatgaaggacttggcagatgaacttgctcttgttgatgtcatcgaagacaaattgaagggagagatgatggatctccaacatggcagccttttccttagaacaccaaagattgtctctggcaaagactataatgtaactgcaaactccaagctggtcattatcacggctggggcacgtcagcaagagggagaaagccgtcttaatttggtccagcgtaacgtgaacatctttaaattcatcattcctaatgttgtaaaatacagcccgaactgcaagttgcttattgtttcaaatccagtggatatcttgacctacgtggcttggaagataagtggttttcccaaaaaccgtgttattggaagtggttgcaatctggattcagcccgattccgttacctgatgggggaaaggctgggagttcacccattaagctgtcatgggtgggtccttggggaacatggagattccagtgtgcctgtatggagtggaatgaatgttgctggtgtctctctgaagactctgcacccagatttagggactgataaagataaggaacagtggaaagaggttcacaagcaggtggttgagagtgcttatgaggtgatcaaactcaaaggctacacatcctgggctattggactctctgtagcagatttggcagagagtataatgaagaatcttaggcgggtgcacccagtttccaccatgattaagggtctttacggaataaaggatgatgtcttccttagtgttccttgcattttgggacagaatggaatctcagaccttgtgaaggtgactctgacttctgaggaagaggccgtttgaagaagagtgcagatacactttgggggatccaaaaggagctgcaattaaaagcctcagagtgtattcactatggggaggacacacagagcaagacagggggagcaggtatgcccataccacacggagaaccaactttcagagagggaaaaacacccgcggacaaaaggagcgc

SEQ ID NO: 466390 - DNA, 1192 bp, Homo sapiens
tagctgggagtgctgcagccgctgccgccgattccggatctcattgccacgcgcccccgacgaccgcccgacgtgcattcccgattccttttggttccaagtccaatatggcaactctaaaggatcagctgatttataatcttctaaaggaagaacagaccccccagaataagattacagttgttggggttggtgctgttggcatggcctgtgccatcagtatcttaatgaaggacttggcagatgaacttgctcttgttgatgtcatcgaagacaaattgaagggagagatgatggatctccaacatggcagccttttccttagaacaccaaagattgtctctggcaaagactataatgtaactgcaaactccaagctggtcattatcacggctggggcacgtcagcaagagggagaaagccgtcttaatttggtccagcgtaacgtgaacatctttaaattcatcattcctaatgttgtaaaatacagcccgaactgcaagttgcttattgtttcaaatccagtggatatcttgacctacgtggcttggaagataagtggttttcccaaaaaccgtgttattggaagtggttgcaatctggattcagcccgattccgttacctgatgggggaaaggctgggagttcacccattaagctgtcatgggtgggtccttggggaacatggagattccagtgtgcctgtatggagtggaatgaatgttgctggtgtctctctgaagaaggccgtttgaagaagagtgcagatacactttgggggatccaaaaggagctgcaattttaaagtcttctgatgtcatatcattttactgtctaggctacaacaggattctagttggaggttgtacatgctgtcctttttatctgatctgtgattaaagcagtaatattttaagatggactgggaaaaacatcaactcctcaagttagaaataggaatgatttgtaaaatccacagctatatcctgatgctggatggtattaatcttgtgtagtcctaaactggtaagatattcacaacctgggcaattttgaaaatcagttggggaataaaattgtctattatgctgtgtttcttaactgtcattattaaggctttatttcttgccttttcaggattaatatatgactcacacattgtcactatatttatttaataataactgtgttt

SEQ ID NO: 466391 - DNA, 1131 bp, Homo sapiens
tctgtgcgctcgaacttggctccgccaagaagctgggcaaggatccgggctcctgatggaactggcaagttggaaaagtggcaaaggaaaagccaacatgagcgctttcggcttgcgcgggcagaaaggagagtcactgagtgaccaaagcagttgggaaacagaggcagaggactgcccccactctgtccgcagcaggggtatgggaggcagctcgggacactccagggaccaagcgggcagtgggcgccgtccccgaggaacacccagcccagcgcccctggttctgggctggttggcttatcgaggccggttggccaaagcatcaggaaagggaacattctcggccgggtgttggataccaaattataaacgccagagcaccttgtgtaaagatgaatatcgttttgttactgcgggagggaatacacctactgctttgaaaggagtttaaaatattcagcagacagcaccgcattgaaattagtgcattgagctgcagaccaaactaatttctagaacagtctaaaaagtaaaaacaaagtttggcaaaaatgacaactttgcttgagaacagctctggaaaagcgaatccactgagagccgtgggaattctccgccagctgtgcttccccaaccgaggaagaatccaacccggaatatcgtttctggaccccaccgcggagaccccagctggaccctctcctgaaaactgcccggggaggggggtgcggtctcagcgccctccactgcggggtccaaggcgcagtagcggggcgcgaccccagcgctccaagcccagcattcttggcagctctccaggccccagtcagaggcacattgaccttgaagttgcacttgactcgcccactcggggctgcctggtggcgcctgggtcagcttgaaacccacgcagctgagggagctaggtgtggggttcaccatactgcgcccccgccggatttgggagcgcgggatctactcggaggcagagagattagccccagaggtcaagcctttcggcgtcgttttgtcatctgtattttctcgtccccttcgccgccgagtcctacaaagctcacttcagagagactgggtccacatgtgtgggctcatgaggaggaggacagc

SEQ ID NO: 466392 - DNA, 8423 bp, Homo sapiens
  misc_feature (2)..(2): n is a, c, g, or t
  misc_feature (9)..(9): n is a, c, g, or t
  misc_feature (11)..(11): n is a, c, g, or t
  misc_feature (13)..(13): n is a, c, g, or t
  misc_feature (15)..(15): n is a, c, g, or t
tnctgcttntncnanaggttcctaatgtgagaggctagacccagatcatggaggtgcttcagtgtgatggctgtgatttccgagccccgtcttatgaagatctcaaggcacacattcaggatgtccacacggcatttctgcagccaactgatgttgctgaggacaatgtgaatgagctacgatgtgggtccgtgaatgccagtaatcagacagaggtggagttttcttctataaaggatgaatttgccattgcagaagatttatcaggtcaaaatgcaacttcattggggaccggaggttactatggccacagtccaggatattatggtcagcatattgccgctaatcccaaaccaacaaacaagttttttcaatgcaagttctgtgtacgctacttcaggtcaaaaaacctcctcatagaacacactagaaaggtccatggagctcaagctgaagggagttcatcaggaccccctgtcccgggatccttaaattataatatcatgatgcacgagggatttggaaaggtcttctcttgccagttttgcacatacaagtcaccaagaagggcaagaataattaagcatcagaagatgtatcacaaaaacaatttgaaggagaccactgctcccccacctgctcctgctccaatgccagaccctgtggttccgcccgtatcactgcaggacccctgcaaggaactgccagcagaggttgtggagcgcagcatcttagagtctatggtcaagcctttgaccaaatctcgaggcaacttttgttgtgagtggtgcagctaccagaccccccgccgagaacgctggtgtgaccacatgatgaagaaacaccgcagtatggtcaagatcctttccagtctcagacagcaacaagaaggaactaatctacctgatgtgccgaacaagagtgcccccagccccacttccaactccacctatctgaccatgaatgctgcaagccgggagatacccaatactaccgtctccaacttcaggggctccatgggcaactccatcatgagacccaattcttcagcttccaagttttcgcccatgtcttaccctcagatgaagccgaagtcacctcacaattctggtctagttaacttgacagagagatcccgttatggaatgactgacatgaccaattcttctgctgacctggaaactaacagcatgctaaatgactctagttctgatgaagagttaaatgaaatagacagtgagaatggtttaagtgctatggatcaccagacatcaggcctgtctgcagagcagctgatgggctcagatggcaacaaattattggagaccaaggggattccatttagaagattcatgaataggttccagtgccccttttgtcctttcctcaccatgcatcgacgtagcatctctcgtcacatagaaaacatccacttatctggaaagacagctgtctacaaatgtgacgaatgtccgtttacttgcaagagctcgttgaaacttggggctcacaaacagtgtcacacgggtacaacgtcagattgggatgctgtgaattcccagagtgaaagcatttcttcctcactgaatgaaggtgtggtgtcttatgagagctcaagcatcaatggtagaaagtcaggagtcatgttggatcccttgcagcagcaacagccaccgcagccaccaccaccgccgccgccaccaccaccatcacagccacagccactgcagcagccacagccaccacagctgcagccaccacatcaggtgccaccccagccacaaacacagccaccaccaacgcagcagccacagccacccacacaagccgcacctctgcacccatacaaatgcaccatgtgtaattactccaccacaactctgaaagggctaagagtccatcagcagcataaacattcattctgtgacaacttgccaaaattcgaggggcagccctcaagcctaccattggaaaatgagacagacagccacccctcttccagcaacactgtgaagaaaagtcagacctcaattcttgggttgtcctccaagaacaattttgtagctaaagcctctaggaagctcgccaatgactttcctctagatttgtcacccgtgaagaagagaaccaggattgacgagatagcaagcaaccttcagagcaaaattaaccaaaccaaacagcaggaagatgcagtgatcaatgttgaggatgatgaagaggaagaggaagacaacgaagtcgagatagaggttgagttggacagggaggaagaaccgacagaacccatcatagaggttcccacttccttttctgcccaacagatatggcacaatagtgaaaacacagactttggtgactctggaaggctttactattgtaaacactgtgactttaacaacaaatctgcccggagtgttagcacccactaccaacgaatgcacccatacattaaattcagctttaggtacatcttggaccccaatgatcacagtgcagtgtacaggtgcctggaatgctacatcgattacaccaacttcgaagatctccagcagcattatggcgagcaccacccagaagccatgaatgtactcaactttgatcactcggacctgatctaccggtgtcggttttgttcatacacgagcccgaatgttagaagcctgatgccacattaccaaagaatgcatcccacggtgaagatcaacaacgcgatgatattttcaagctatgtcgtggagcagcaggaagggctgaatacagaatcccagaccctgagggagattctgaattcggctcccaagaacatggcgacttccacacctgtggctcgtggtggtggtttgccagctacgttcaacaaaaacactcctaagacctttactcctgaatgtgaaaatcagaaggaccctttggtcaacactgttgttgtttatgattgtgatgtttgttcgtttgcaagccccaacatgcattctgtcttggttcattatcagaagaaacaccccgaagaaaaggcttcctactttaggatccagaaaactatgcgaatggtgtctgtggacaggggctctgccctttctcaattatcatttgaggtgggtgctccaatgtctcccaaaatgtccaacatgggttccccaccccccccacaacccccgccaccagacctcagtactgagctttactactgcaaacactgttcctacagcaatcggtcagttgtgggagtgcttgtccactaccagaaaagacacccagaaataaaggttactgccaaatatatcagacaggctcctcccacagctgcaatgatgagaggggtcgaagggccccaaggctccccccggccacccgcccccatacaacagctgaaccgaagcagctctgagagagatggccctcctgtggagaatgagatgttcttttgccagcactgtgattatgggaaccggacggtcaaaggggtactcattcattatcagaagaagcaccgagacttcaaggccaatgcagatgtgatccggcagcatacggccaccattcgaagcctctgcgaccgaaatcagaagaagcctgccagctgcgtgcttgtctccccctctaatctggagcgggacaaaacgaaactccgagcactcaaatgtaggcagtgctcatatacctccccctacttctatgcactgaggaagcatatcaagaaagaccaccccgccctgaaagccacagtcacgtccatcatgcgatgggcatttctagatggcttgatagaagctggctaccactgcgagtggtgcatctactcccatacggagcccaacggtttgctcctgcattaccaacggaggcatccagaacactatgttgattacacctacatggctactaaactgtgggctgggccagacccatcccctccctctctcacaatgccagccgaagccaaaacctacagatgcagggactgtgttttcgaagctgtttccatctgggacatcactaatcactaccaagcattccacccctgggccatgaatggtgatgagtcagtgctactggacatcatcaaggagaaagatgctgtggagaagcccattctttcatccgaagagttggcaggccctgtgaattgtgaaaacagtatacccacccctttcccggagcaggaagctgaatgtccagaggatgcaagactgtcccctgagaaaagcctgcagctagcttcagccaaccccgccatatcctccaccccataccagtgcacggtatgccaatctgagtataacaacttgcacggccttctcactcattatgggaagaagcaccctggcatgaaagtgaaggctgctgactttgcccaggacattgacatcaacccaggtgccgtctacaaatgcaggcattgcccatacatcaacacccgcatccacggcgtactgacccactaccagaagcgacacccgtccatcaaggtgaccgctgaggactttgtgcacgacgtagagcagtctgctgacatatcccagaatgacgtggaggagacgagcaggatcttcaagcaagggtatggcgcctaccggtgcaaactgtgtccgtacacacacggcactttggagaaactaaaaatccactacgagaagtatcacaatcagcctgaatttgatgtcttttcccagtcgcccccgaagctgccagtccccctcgagcccgagatgaccactgaagtgagcccttcccaagtctccatcactgaggaggaggtgggagaggagcccgtgtccacttctcacttctctacctcccacctggtctcccacactgtgttccggtgccagctctgcaagtacttctgctccacgaggaaggggatcgccaggcactaccgcatcaagcacaataatgtccgagcccagccagaaggcaagaacaacctcttcaagtgtgccctgtgtgcctacaccaaccccatccgcaaaggtctggcagcccactaccagaagcgccacgacattgatgcgtattacactcactgcttggcagcctccaggaccatcagcgacaagcccaacaaagtgatcatcccatccccgcccaaggacgactcccctcagctgagcgaggaactccggcgggcagtggagaagaaaaagtgctccttgtgctctttccagtcgttcagcaagaagggcatcgtgtcccattacatgaaacgccacccaggggtgttcccaaagaagcagcacgccagcaagttggggggctacttcacggccgtctatgcagatgagcatgagaagcccacactgatggaagaagaggagagaggcaactttgagaaagccgaggtggagggtgaagctcaggaaatcgagtggctcccattccgctgcatcaaatgcttcaagctgtcctttagcactgcagagctgctgtgcatgcattacactgaccaccacagtcgggacctaaagagggacttcatcattctgggcaacggcccccgcttgcagaactccacctaccagtgtaagcactgtgatagcaaactgcaaagcacagccgagctgacctcacacttgaacattcacaatgaggaattccagaagcgtgccaaacgtcaggagaggaggaaacagcttttgagcaagcagaaatatgcagatggtgcttttgcagatttcaaacaagagaggccttttggtcacttagaagaggtgccaaagatcaaggagaggaaagtggtgggctacaaatgtaaattctgtgtggaagtgcacccaacgctccgagccatctgcaatcacctccgaaagcacgtccagtatggcaatgtcccagctgtgtcagctgctgtgaagggaggcggatgaccctgcccacttgttcctggatggattggaagcagccaaagacgccagtggcgccctggtgggccgggtggatggtgaacactgcttgcttgatggaatgttggaggatgaaacccggccggggggataccattgcagtcaatgtgacagagtcctgatgtccatgcaggggctgcgttctcatgagaggagccacctggccctggccatgtttacccgcgaggacaagtacagctgccagtattgctcgtttgtttctgctttcaggcacaatttggatcgccatatgcaaacccaccacggacaccataaaccattccgatgcaaactctgctccttcaagtcctcctataacagccggctgaaaacacatatactcaaagctcatgctggtgagcatgcctacaagtgttcttggtgctcattctccaccatgacaatcagccagctgaaggaacactccctcaaggtccacggaaaagccctgaccctccccaggccacggatcgtcagtctcctctcctcacactcccaccactcctcccaaaaagctaccccggctgaagaagtggaagactccaatgactcatcatattcagagcccccagatgttcagcagcagttgaaccactatcagtcagctgccctggcaaggaacaacagccgtgttagccctgtgcctctttctggggctgctgctggcactgagcagaaaactgaagccgtgcttcactgcgaattctgtgaattctcctccggctacatccagagcatcaggcgtcattaccgggacaagcatggtgggaagaagcttttcaagtgcaaagactgctccttttacacaggctttaaatctgcttttactatgcacgtggaagctgggcactcagcagttcccgaggagggccccaaagatcttcgctgtcctctctgcctctatcacaccaaatacaagcgcaacatgattgaccacatcgtgctgcaccgagaagagcgtgttgtccccattgaagtttgccggtccaaactgtccaaatacttgcagggagtagttttccgctgtgataagtgtaccttcacctgctccagtgatgagagcctccagcaacatatagaaaagcacaatgaactgaaaccttacaaatgccagctctgctactatgagaccaagcacacggaggaactggacagccaccttcgggatgagcataaggtaagccgtaactttgagctggttggacgggttaacttggatcagctggaacagatgaaggagaaaatggagagctccagcagcgatgatgaggacaaggaagaagaaatgaacagcaaggctgaagacagagagctgatgagattttctgaccacggggctgctcttaacactgagaagcgttttccatgtgaattttgtggacgggcgttttcacagggctctgagtgggaaagacatgtgctgagacacggcatggcattgaatgacaccaagcaggtgagcagagaagaaatccacccaaaagagatcatggagaacagtgttaaaatgccctccatagaggaaaaggaagatgacgaggccattgggatagacttttccctaaagaatgaaacagtagccatctgtgtagtaactgccgacaaatctctcctggagaatgcagaggccaaaaaagaatgagcgtttggtgaaattcttaatcaaaccttacttgaacagtgatgaaaaagtgggagggctggcttgggctgagaagggagggacagaaaagagaagacagaacaaagctgctttttaggactgaacaatctattttcaaagcactggtacctgtgtgagtgagtatgtaaattaaagttatttaaatggttggaatatgtggctccttttccatcactacatcttttcttccggatcttcatcatggaagtttcatttgttgcggaatatggaagcacctcccaatggtacggtgcaccctgtggtggtcttggacagtatgtggaaacagaagctccatgacggtagaagacttctcattggggagcaactttttgacgcacaacttttggtgcgtttttctagttttaataccttaagctttttcaagacctaactgcagccgctttgggaaaaaaaaacaaaaaacaaaaaacagaaaacaaaaaaaaaaaaactgctttgcataaaacagtcacctgtttcctagtacctcaaacttaaccaagggaactctctgcatttgtcagtactacctgtcgtcgttgtggttaaatgtagagagaactgctgggcaagatggtgaatggagaaaaaaaaagagttttaaagaaaggaacacaaattgtgcttaaaatccccatgtgggttttatttcttaaaatactgtgatttttttaattattttagtaaaaaacaaaacaaaaaaaagaaacagactttaattattagataactgtttgtgaattgtcatcctttattccaggtaagctgtttattagtgttcaactataatttagaatttggtagattcatgtgagctaattttaaggtga

SEQ ID NO: 466393 - DNA, 2976 bp, Homo sapiens
attgtatttaagtaaaagcaatagggtttcagaccacagtagaaaagattaggaggtctctaagcaatgcagaaagaattagagaaagaagctcaggatagtagggttttgacagtaccgactggaaaatgttaagaacgaatgctggttggaaggaatgaaccatgtaatttagtagtagcaaaacaaggagaataataaggaatttaagcagatggtgcttttgcagatttcaaacaagagaggccttttggtcacttagaagaggtgccaaagatcaaggagaggaaagtggtgggctacaaatgtaaattctgtgtggaagtgcacccaacgctccgagccatctgcaatcacctccgaaagcacgtccagtatggcaatgtcccagctgtgtcagctgctgtgaagggaggcggatgaccctgcccacttgttcctggatggattggaagcagccaaagacgccagtggcgccctggtgggccgggtggatggtgaacactgcttgcttgatggaatgttggaggatgaaacccggccggggggataccattgcagtcaatgtgacagagtcctgatgtccatgcaggggctgcgttctcatgagaggagccacctggccctggccatgtttacccgcgaggacaagtacagctgccagtattgctcgtttgtttctgctttcaggcacaatttggatcgccatatgcaaacccaccacggacaccataaaccattccgatgcaaactctgctccttcaagtcctcctataacagccggctgaaaacacatatactcaaagctcatgctggtgagcatgcctacaagtgttcttggtgctcattctccaccatgacaatcagccagctgaaggaacactccctcaaggtccacggaaaagccctgaccctccccaggccacggatcgtcagtctcctctcctcacactcccaccactcctcccaaaaagctaccccggctgaagaagtggaagactccaatgactcatcatattcagagcccccagatgttcagcagcagttgaaccactatcagtcagctgccctggcaaggaacaacagccgtgttagccctgtgcctctttctggggctgctgctggcactgagcagaaaactgaagccgtgcttcactgcgaattctgtgaattctcctccggctacatccagagcatcaggcgtcattaccgggacaagcatggtgggaagaagcttttcaagtgcaaagactgctccttttacacaggctttaaatctgcttttactatgcacgtggaagctgggcactcagcagttcccgaggagggccccaaagatcttcgctgtcctctctgcctctatcacaccaaatacaagcgcaacatgattgaccacatcgtgctgcaccgagaagagcgtgttgtccccattgaagtttgccggtccaaactgtccaaatacttgcagggagtagttttccgctgtgataagtgtaccttcacctgctccagtgatgagagcctccagcaacatatagaaaagcacaatgaactgaaaccttacaaatgccagctctgctactatgagaccaagcacacggaggaactggacagccaccttcgggatgagcataaggtaagccgtaactttgagctggttggacgggttaacttggatcagctggaacagatgaaggagaaaatggagagctccagcagcgatgatgaggacaaggaagaagaaatgaacagcaaggctgaagacagagagctgatgagattttctgaccacggggctgctcttaacactgagaagcgttttccatgtgaattttgtggacgggcgttttcacagggctctgagtgggaaagacatgtgctgagacacggcatggcattgaatgacaccaagcaggtgagcagagaagaaatccacccaaaagagatcatggagaacagtgttaaaatgccctccatagaggaaaaggaagatgacgaggccattgggatagacttttccctaaagaatgaaacagtagccatctgtgtagtaactgccgacaaatctctcctggagaatgcagaggccaaaaaagaatgagcgtttggtgaaattcttaatcaaaccttacttgaacagtgatgaaaaagtgggagggctggcttgggctgagaagggagggacagaaaagagaagacagaacaaagctgctttttaggactgaacaatctattttcaaagcactggtacctgtgtgagtgagtatgtaaattaaagttatttaaatggttggaatatgtggctccttttccatcactacatcttttcttccggatcttcatcatggaagtttcatttgttgcggaatatggaagcacctcccaatggtacggtgcaccctgtggtggtcttggacagtatgtggaaacagaagctccatgacggtagaagacttctcattggggagcaactttttgacgcacaacttttggtgcgtttttctagttttaataccttaagctttttcaagacctaactgcagccgctttgggaaaaaaaaacaaaaaacaaaaaacagaaaacaaaaaaaaaaaaactgctttgcataaaacagtcacctgtttcctagtacctcaaacttaaccaagggaactctctgcatttgtcagtactacctgtcgtcgttgtggttaaatgtagagagaactgctgggcaagatggtgaatggagaaaaaaaaagagttttaaagaaaggaacacaaattgtgcttaaaatccccatgtgggttttatttcttaaaatactgtgatttttttaattattttagtaaaaaacaaaacaaaaaaaagaaacagactttaattattagataactgtttgtgaattgtcatcctttattccaggtaagctgtttattagtgttcaactataatttagaatttggtagattcatgtgagctaattttaaggtga

SEQ ID NO: 466394 - DNA, 2482 bp, Homo sapiens
aggcactaagctaaagcagaagcttggatgagtaagaaggccccactcatggttcacacctgctgctatgttacctggagcctcagtcaccttttctgtaaaatggggctgagaacaggagattgatcggatggcgttagatttggcaaatgcaggcattttaaaaatgagaattggaggaattgctatgatttacccaaagtttggatcgccatatgcaaacccaccacggacaccataaaccattccgatgcaaactctgctccttcaagtcctcctataacagccggctgaaaacacatatactcaaagctcatgctggtgagcatgcctacaagtgttcttggtgctcattctccaccatgacaatcagccagctgaaggaacactccctcaaggtccacggaaaagccctgaccctccccaggccacggatcgtcagtctcctctcctcacactcccaccactcctcccaaaaagctaccccggctgaagaagtggaagactccaatgactcatcatattcagagcccccagatgttcagcagcagttgaaccactatcagtcagctgccctggcaaggaacaacagccgtgttagccctgtgcctctttctggggctgctgctggcactgagcagaaaactgaagccgtgcttcactgcgaattctgtgaattctcctccggctacatccagagcatcaggcgtcattaccgggacaagcatggtgggaagaagcttttcaagtgcaaagactgctccttttacacaggctttaaatctgcttttactatgcacgtggaagctgggcactcagcagttcccgaggagggccccaaagatcttcgctgtcctctctgcctctatcacaccaaatacaagcgcaacatgattgaccacatcgtgctgcaccgagaagagcgtgttgtccccattgaagtttgccggtccaaactgtccaaatacttgcagggagtagttttccgctgtgataagtgtaccttcacctgctccagtgatgagagcctccagcaacatatagaaaagcacaatgaactgaaaccttacaaatgccagctctgctactatgagaccaagcacacggaggaactggacagccaccttcgggatgagcataaggtaagccgtaactttgagctggttggacgggttaacttggatcagctggaacagatgaaggagaaaatggagagctccagcagcgatgatgaggacaaggaagaagaaatgaacagcaaggctgaagacagagagctgatgagattttctgaccacggggctgctcttaacactgagaagcgttttccatgtgaattttgtggacgggcgttttcacagggctctgagtgggaaagacatgtgctgagacacggcatggcattgaatgacaccaagcaggtgagcagagaagaaatccacccaaaagagatcatggagaacagtgttaaaatgccctccatagaggaaaaggaagatgacgaggccattgggatagacttttccctaaagaatgaaacagtagccatctgtgtagtaactgccgacaaatctctcctggagaatgcagaggccaaaaaagaatgagcgtttggtgaaattcttaatcaaaccttacttgaacagtgatgaaaaagtgggagggctggcttgggctgagaagggagggacagaaaagagaagacagaacaaagctgctttttaggactgaacaatctattttcaaagcactggtacctgtgtgagtgagtatgtaaattaaagttatttaaatggttggaatatgtggctccttttccatcactacatcttttcttccggatcttcatcatggaagtttcatttgttgcggaatatggaagcacctcccaatggtacggtgcaccctgtggtggtcttggacagtatgtggaaacagaagctccatgacggtagaagacttctcattggggagcaactttttgacgcacaacttttggtgcgtttttctagttttaataccttaagctttttcaagacctaactgcagccgctttgggaaaaaaaaacaaaaaacaaaaaacagaaaacaaaaaaaaaaaaactgctttgcataaaacagtcacctgtttcctagtacctcaaacttaaccaagggaactctctgcatttgtcagtactacctgtcgtcgttgtggttaaatgtagagagaactgctgggcaagatggtgaatggagaaaaaaaaagagttttaaagaaaggaacacaaattgtgcttaaaatccccatgtgggttttatttcttaaaatactgtgatttttttaattattttagtaaaaaacaaaacaaaaaaaagaaacagactttaattattagataactgtttgtgaattgtcatcctttattccaggtaagctgtttattagtgttcaactataatttagaatttggtagattcatgtgagctaattttaaggtga

SEQ ID NO: 466395 - DNA, 2148 bp, Homo sapiens
caccggcaggttgtactccaccggcaggttgtactccaccggcaggttgtactccaccggcaggttgtactccaccggcaggttgtactccaccggcaggttgtactccaccggcaggttgtactcccaccactcctcccaaaaagctaccccggctgaagaagtggaagactccaatgactcatcatattcagagcccccagatgttcagcagcagttgaaccactatcagtcagctgccctggcaaggaacaacagccgtgttagccctgtgcctctttctggggctgctgctggcactgagcagaaaactgaagccgtgcttcactgcgaattctgtgaattctcctccggctacatccagagcatcaggcgtcattaccgggacaagcatggtgggaagaagcttttcaagtgcaaagactgctccttttacacaggctttaaatctgcttttactatgcacgtggaagctgggcactcagcagttcccgaggagggccccaaagatcttcgctgtcctctctgcctctatcacaccaaatacaagcgcaacatgattgaccacatcgtgctgcaccgagaagagcgtgttgtccccattgaagtttgccggtccaaactgtccaaatacttgcagggagtagttttccgctgtgataagtgtaccttcacctgctccagtgatgagagcctccagcaacatatagaaaagcacaatgaactgaaaccttacaaatgccagctctgctactatgagaccaagcacacggaggaactggacagccaccttcgggatgagcataaggtaagccgtaactttgagctggttggacgggttaacttggatcagctggaacagatgaaggagaaaatggagagctccagcagcgatgatgaggacaaggaagaagaaatgaacagcaaggctgaagacagagagctgatgagattttctgaccacggggctgctcttaacactgagaagcgttttccatgtgaattttgtggacgggcgttttcacagggctctgagtgggaaagacatgtgctgagacacggcatggcattgaatgacaccaagcaggtgagcagagaagaaatccacccaaaagagatcatggagaacagtgttaaaatgccctccatagaggaaaaggaagatgacgaggccattgggatagacttttccctaaagaatgaaacagtagccatctgtgtagtaactgccgacaaatctctcctggagaatgcagaggccaaaaaagaatgagcgtttggtgaaattcttaatcaaaccttacttgaacagtgatgaaaaagtgggagggctggcttgggctgagaagggagggacagaaaagagaagacagaacaaagctgctttttaggactgaacaatctattttcaaagcactggtacctgtgtgagtgagtatgtaaattaaagttatttaaatggttggaatatgtggctccttttccatcactacatcttttcttccggatcttcatcatggaagtttcatttgttgcggaatatggaagcacctcccaatggtacggtgcaccctgtggtggtcttggacagtatgtggaaacagaagctccatgacggtagaagacttctcattggggagcaactttttgacgcacaacttttggtgcgtttttctagttttaataccttaagctttttcaagacctaactgcagccgctttgggaaaaaaaaacaaaaaacaaaaaacagaaaacaaaaaaaaaaaaactgctttgcataaaacagtcacctgtttcctagtacctcaaacttaaccaagggaactctctgcatttgtcagtactacctgtcgtcgttgtggttaaatgtagagagaactgctgggcaagatggtgaatggagaaaaaaaaagagttttaaagaaaggaacacaaattgtgcttaaaatccccatgtgggttttatttcttaaaatactgtgatttttttaattattttagtaaaaaacaaaacaaaaaaaagaaacagactttaattattagataactgtttgtgaattgtcatcctttattccaggtaagctgtttattagtgttcaactataatttagaatttggtagattcatgtgagctaattttaaggtga

SEQ ID NO: 466396 - DNA, 1692 bp, Homo sapiens
ggtgacttagaggatcccgctggactcgtcagttcccgaggagggccccaaagatcttcgctgtcctctctgcctctatcacaccaaatacaagcgcaacatgattgaccacatcgtgctgcaccgagaagagcgtgttgtccccattgaagtttgccggtccaaactgtccaaatacttgcagggagtagttttccgctgtgataagtgtaccttcacctgctccagtgatgagagcctccagcaacatatagaaaagcacaatgaactgaaaccttacaaatgccagctctgctactatgagaccaagcacacggaggaactggacagccaccttcgggatgagcataaggtaagccgtaactttgagctggttggacgggttaacttggatcagctggaacagatgaaggagaaaatggagagctccagcagcgatgatgaggacaaggaagaagaaatgaacagcaaggctgaagacagagagctgatgagattttctgaccacggggctgctcttaacactgagaagcgttttccatgtgaattttgtggacgggcgttttcacagggctctgagtgggaaagacatgtgctgagacacggcatggcattgaatgacaccaagcaggtgagcagagaagaaatccacccaaaagagatcatggagaacagtgttaaaatgccctccatagaggaaaaggaagatgacgaggccattgggatagacttttccctaaagaatgaaacagtagccatctgtgtagtaactgccgacaaatctctcctggagaatgcagaggccaaaaaagaatgagcgtttggtgaaattcttaatcaaaccttacttgaacagtgatgaaaaagtgggagggctggcttgggctgagaagggagggacagaaaagagaagacagaacaaagctgctttttaggactgaacaatctattttcaaagcactggtacctgtgtgagtgagtatgtaaattaaagttatttaaatggttggaatatgtggctccttttccatcactacatcttttcttccggatcttcatcatggaagtttcatttgttgcggaatatggaagcacctcccaatggtacggtgcaccctgtggtggtcttggacagtatgtggaaacagaagctccatgacggtagaagacttctcattggggagcaactttttgacgcacaacttttggtgcgtttttctagttttaataccttaagctttttcaagacctaactgcagccgctttgggaaaaaaaaacaaaaaacaaaaaacagaaaacaaaaaaaaaaaaactgctttgcataaaacagtcacctgtttcctagtacctcaaacttaaccaagggaactctctgcatttgtcagtactacctgtcgtcgttgtggttaaatgtagagagaactgctgggcaagatggtgaatggagaaaaaaaaagagttttaaagaaaggaacacaaattgtgcttaaaatccccatgtgggttttatttcttaaaatactgtgatttttttaattattttagtaaaaaacaaaacaaaaaaaagaaacagactttaattattagataactgtttgtgaattgtcatcctttattccaggtaagctgtttattagtgttcaactataatttagaatttggtagattcatgtgagctaattttaaggtga

SEQ ID NO: 466397 - DNA, 7246 bp, Homo sapiens
  misc_feature (2)..(2): n is a, c, g, or t
  misc_feature (9)..(9): n is a, c, g, or t
  misc_feature (11)..(11): n is a, c, g, or t
  misc_feature (13)..(13): n is a, c, g, or t
  misc_feature (15)..(15): n is a, c, g, or t
tnctgcttntncnanaggttcctaatgtgagaggctagacccagatcatggaggtgcttcagtgtgatggctgtgatttccgagccccgtcttatgaagatctcaaggcacacattcaggatgtccacacggcatttctgcagccaactgatgttgctgaggacaatgtgaatgagctacgatgtgggtccgtgaatgccagtaatcagacagaggtggagttttcttctataaaggatgaatttgccattgcagaagatttatcaggtcaaaatgcaacttcattggggaccggaggttactatggccacagtccaggatattatggtcagcatattgccgctaatcccaaaccaacaaacaagttttttcaatgcaagttctgtgtacgctacttcaggtcaaaaaacctcctcatagaacacactagaaaggtccatggagctcaagctgaagggagttcatcaggaccccctgtcccgggatccttaaattataatatcatgatgcacgagggatttggaaaggtcttctcttgccagttttgcacatacaagtcaccaagaagggcaagaataattaagcatcagaagatgtatcacaaaaacaatttgaaggagaccactgctcccccacctgctcctgctccaatgccagaccctgtggttccgcccgtatcactgcaggacccctgcaaggaactgccagcagaggttgtggagcgcagcatcttagagtctatggtcaagcctttgaccaaatctcgaggcaacttttgttgtgagtggtgcagctaccagaccccccgccgagaacgctggtgtgaccacatgatgaagaaacaccgcagtatggtcaagatcctttccagtctcagacagcaacaagaaggaactaatctacctgatgtgccgaacaagagtgcccccagccccacttccaactccacctatctgaccatgaatgctgcaagccgggagatacccaatactaccgtctccaacttcaggggctccatgggcaactccatcatgagacccaattcttcagcttccaagttttcgcccatgtcttaccctcagatgaagccgaagtcacctcacaattctggtctagttaacttgacagagagatcccgttatggaatgactgacatgaccaattcttctgctgacctggaaactaacagcatgctaaatgactctagttctgatgaagagttaaatgaaatagacagtgagaatggtttaagtgctatggatcaccagacatcaggcctgtctgcagagcagctgatgggctcagatggcaacaaattattggagaccaaggggattccatttagaagattcatgaataggttccagtgccccttttgtcctttcctcaccatgcatcgacgtagcatctctcgtcacatagaaaacatccacttatctggaaagacagctgtctacaaatgtgacgaatgtccgtttacttgcaagagctcgttgaaacttggggctcacaaacagtgtcacacgggtacaacgtcagattgggatgctgtgaattcccagagtgaaagcatttcttcctcactgaatgaaggtgtggtgtcttatgagagctcaagcatcaatggtagaaagtcaggagtcatgttggatcccttgcagcagcaacagccaccgcagccaccaccaccgccgccgccaccaccaccatcacagccacagccactgcagcagccacagccaccacagctgcagccaccacatcaggtgccaccccagccacaaacacagccaccaccaacgcagcagccacagccacccacacaagccgcacctctgcacccatacaaatgcaccatgtgtaattactccaccacaactctgaaagggctaagagtccatcagcagcataaacattcattctgtgacaacttgccaaaattcgaggggcagccctcaagcctaccattggaaaatgagacagacagccacccctcttccagcaacactgtgaagaaaagtcagacctcaattcttgggttgtcctccaagaacaattttgtagctaaagcctctaggaagctcgccaatgactttcctctagatttgtcacccgtgaagaagagaaccaggattgacgagatagcaagcaaccttcagagcaaaattaaccaaaccaaacagcaggaagatgcagtgatcaatgttgaggatgatgaagaggaagaggaagacaacgaagtcgagatagaggttgagttggacagggaggaagaaccgacagaacccatcatagaggttcccacttccttttctgcccaacagatatggcacaatagtgaaaacacagactttggtgactctggaaggctttactattgtaaacactgtgactttaacaacaaatctgcccggagtgttagcacccactaccaacgaatgcacccatacattaaattcagctttaggtacatcttggaccccaatgatcacagtgcagtgtacaggtgcctggaatgctacatcgattacaccaacttcgaagatctccagcagcattatggcgagcaccacccagaagccatgaatgtactcaactttgatcactcggacctgatctaccggtgtcggttttgttcatacacgagcccgaatgttagaagcctgatgccacattaccaaagaatgcatcccacggtgaagatcaacaacgcgatgatattttcaagctatgtcgtggagcagcaggaagggctgaatacagaatcccagaccctgagggagattctgaattcggctcccaagaacatggcgacttccacacctgtggctcgtggtggtggtttgccagctacgttcaacaaaaacactcctaagacctttactcctgaatgtgaaaatcagaaggaccctttggtcaacactgttgttgtttatgattgtgatgtttgttcgtttgcaagccccaacatgcattctgtcttggttcattatcagaagaaacaccccgaagaaaaggcttcctactttaggatccagaaaactatgcgaatggtgtctgtggacaggggctctgccctttctcaattatcatttgaggtgggtgctccaatgtctcccaaaatgtccaacatgggttccccaccccccccacaacccccgccaccagacctcagtactgagctttactactgcaaacactgttcctacagcaatcggtcagttgtgggagtgcttgtccactaccagaaaagacacccagaaataaaggttactgccaaatatatcagacaggctcctcccacagctgcaatgatgagaggggtcgaagggccccaaggctccccccggccacccgcccccatacaacagctgaaccgaagcagctctgagagagatggccctcctgtggagaatgagatgttcttttgccagcactgtgattatgggaaccggacggtcaaaggggtactcattcattatcagaagaagcaccgagacttcaaggccaatgcagatgtgatccggcagcatacggccaccattcgaagcctctgcgaccgaaatcagaagaagcctgccagctgcgtgcttgtctccccctctaatctggagcgggacaaaacgaaactccgagcactcaaatgtaggcagtgctcatatacctccccctacttctatgcactgaggaagcatatcaagaaagaccaccccgccctgaaagccacagtcacgtccatcatgcgatgggcatttctagatggcttgatagaagctggctaccactgcgagtggtgcatctactcccatacggagcccaacggtttgctcctgcattaccaacggaggcatccagaacactatgttgattacacctacatggctactaaactgtgggctgggccagacccatcccctccctctctcacaatgccagccgaagccaaaacctacagatgcagggactgtgttttcgaagctgtttccatctgggacatcactaatcactaccaagcattccacccctgggccatgaatggtgatgagtcagtgctactggacatcatcaaggagaaagatgctgtggagaagcccattctttcatccgaagagttggcaggccctgtgaattgtgaaaacagtatacccacccctttcccggagcaggaagctgaatgtccagaggatgcaagactgtcccctgagaaaagcctgcagctagcttcagccaaccccgccatatcctccaccccataccagtgcacggtatgccaatctgagtataacaacttgcacggccttctcactcattatgggaagaagcaccctggcatgaaagtgaaggctgctgactttgcccaggacattgacatcaacccaggtgccgtctacaaatgcaggcattgcccatacatcaacacccgcatccacggcgtactgacccactaccagaagcgacacccgtccatcaaggtgaccgctgaggactttgtgcacgacgtagagcagtctgctgacatatcccagaatgacgtggaggagacgagcaggatcttcaagcaagggtatggcgcctaccggtgcaaactgtgtccgtacacacacggcactttggagaaactaaaaatccactacgagaagtatcacaatcagcctgaatttgatgtcttttcccagtcgcccccgaagctgccagtccccctcgagcccgagatgaccactgaagtgagcccttcccaagtctccatcactgaggaggaggtgggagaggagcccgtgtccacttctcacttctctacctcccacctggtctcccacactgtgttccggtgccagctctgcaagtacttctgctccacgaggaaggggatcgccaggcactaccgcatcaagcacaataatgtccgagcccagccagaaggcaagaacaacctcttcaagtgtgccctgtgtgcctacaccaaccccatccgcaaaggtctggcagcccactaccagaagcgccacgacattgatgcgtattacactcactgcttggcagcctccaggaccatcagcgacaagcccaacaaagtgatcatcccatccccgcccaaggacgactcccctcagctgagcgaggaactccggcgggcagtggagaagaaaaagtgctccttgtgctctttccagtcgttcagcaagaagggcatcgtgtcccattacatgaaacgccacccaggggtgttcccaaagaagcagcacgccagcaagttggggggctacttcacggccgtctatgcagatgagcatgagaagcccacactgatggaagaagaggagagaggcaactttgagaaagccgaggtggagggtgaagctcaggaaatcgagtggctcccattccgctgcatcaaatgcttcaagctgtcctttagcactgcagagctgctgtgcatgcattacactgaccaccacagtcgggacctaaagagggacttcatcattctgggcaacggcccccgcttgcagaactccacctaccagtgtaagcactgtgatagcaaactgcaaagcacagccgagctgacctcacacttgaacattcacaatgaggaattccagaagcgtgccaaacgtcaggagaggaggaaacagcttttgagcaagcagaaatatgcagatggtgcttttgcagatttcaaacaagagaggccttttggtcacttagaagaggtgccaaagatcaaggagaggaaagtggtgggctacaaatgtaaattctgtgtggaagtgcacccaacgctccgagccatctgcaatcacctccgaaagcacgtccagtatggcaatgtcccagctgtgtcagctgctgtgaagggaggcggatgaccctgcccacttgttcctggatggattggaagcagccaaagacgccagtggcgccctggtgggccgggtggatggtgaacactgcttgcttgatggaatgttggaggatgaaacccggccggggggataccattgcagtcaatgtgacagagtcctgatgtccatgcaggggctgcgttctcatgagaggagccacctggccctggccatgtttacccgcgaggacaagtacagctgccagtattgctcgtttgtttctgctttcaggcacaatttggatcgccatatgcaaacccaccacggacaccataaaccattccgatgcaaactctgctccttcaagtcctcctataacagccggctgaaaacacatatactcaaagctcatgctggtgagcatgcctacaagtgttcttggtgctcattctccaccatgacaatcagccagctgaaggaacactccctcaaggtccacggaaaagccctgaccctccccaggccacggatcgtcagtctcctctcctcacactcccaccactcctcccaaaaagctaccccggctgaagaagtggaagactccaatgactcatcatattcagagcccccagatgttcagcagcagttgaaccactatcagtcagctgccctggcaaggaacaacagccgtgttagccctgtgcctctttctggggctgctgctggcactgagcagaaaactgaagccgtgcttcactgcgaattctgtgaattctcctccggctacatccagagcatcaggcgtcattaccgggacaagcatggtgggaagaagcttttcaagtgcaaagactgctccttttacacaggctttaaatctgcttttactatgcacgtggaagctgggcactcagcagttcccgaggagggccccaaagatcttcgctgtcctctctgcctctatcacaccaaatacaagcgcaacatgattgaccacatcgtgctgcaccgagaagagcgtgttgtccccattgaagtttgccggtccaaactgtccaaatacttgcagggagtagttttccgctgtgataagtgtaccttcacctgctccagtgatgagagcctccagcaacatatagaaaagcacaatgaactgaaaccttacaaatgccagctctgctactatgagaccaagcacacggaggaactggacagccaccttcgggatgagcataagatgatttgcattataatgggaaaagcttgagctgtgtcatgtggagatctgagtcctaactaatcctggcttcatcacctacctgttttgtgatcttcatctacaaatatagaaggcaacacatttactgcacaatggtcgtaagggataagtgatacatgta

SEQ ID NO: 466398 - DNA, 423 bp, Homo sapiens
agaaagaagttactaccatttgacagtgttcagattcggttgagtgaccaagtttctgggtggtcaacaaacatgatgaacagatttttttttagccccacaagcaggagagccgcacttggacatatataacgggtttgccagcaggaaatgtgaaaatgcaatgatccctggttacacgcatcacctctcctcccaaactctctcctagatctgcttttactatgcacgtggaagctgggcactcagcagttcccgaggagggccccaaagatcttcgctgtcctctctgcctctatcacaccaaatacaagcgcaacatgattgaccacatcgtgctgcaccgaggtaacctttctaacttggttttcttggatgcagcggggggcaggcagcagagatggccttctagggatgctctct

SEQ ID NO: 466399 - DNA, 8923 bp, Homo sapiens
  misc_feature (2)..(2): n is a, c, g, or t
  misc_feature (9)..(9): n is a, c, g, or t
  misc_feature (11)..(11): n is a, c, g, or t
  misc_feature (13)..(13): n is a, c, g, or t
  misc_feature (15)..(15): n is a, c, g, or t
tnctgcttntncnanaggttcctaatgtgagaggctagacccagatcatggaggtgcttcagtgtgatggctgtgatttccgagccccgtcttatgaagatctcaaggcacacattcaggatgtccacacggcatttctgcagccaactgatgttgctgaggacaatgtgaatgagctacgatgtgggtccgtgaatgccagtaatcagacagaggtggagttttcttctataaaggatgaatttgccattgcagaagatttatcaggtcaaaatgcaacttcattggggaccggaggttactatggccacagtccaggatattatggtcagcatattgccgctaatcccaaaccaacaaacaagttttttcaatgcaagttctgtgtacgctacttcaggtcaaaaaacctcctcatagaacacactagaaaggtccatggagctcaagctgaagggagttcatcaggaccccctgtcccgggatccttaaattataatatcatgatgcacgagggatttggaaaggtcttctcttgccagttttgcacatacaagtcaccaagaagggcaagaataattaagcatcagaagatgtatcacaaaaacaatttgaaggagaccactgctcccccacctgctcctgctccaatgccagaccctgtggttccgcccgtatcactgcaggacccctgcaaggaactgccagcagaggttgtggagcgcagcatcttagagtctatggtcaagcctttgaccaaatctcgaggcaacttttgttgtgagtggtgcagctaccagaccccccgccgagaacgctggtgtgaccacatgatgaagaaacaccgcagtatggtcaagatcctttccagtctcagacagcaacaagaaggaactaatctacctgatgtgccgaacaagagtgcccccagccccacttccaactccacctatctgaccatgaatgctgcaagccgggagatacccaatactaccgtctccaacttcaggggctccatgggcaactccatcatgagacccaattcttcagcttccaagttttcgcccatgtcttaccctcagatgaagccgaagtcacctcacaattctggtctagttaacttgacagagagatcccgttatggaatgactgacatgaccaattcttctgctgacctggaaactaacagcatgctaaatgactctagttctgatgaagagttaaatgaaatagacagtgagaatggtttaagtgctatggatcaccagacatcaggcctgtctgcagagcagctgatgggctcagatggcaacaaattattggagaccaaggggattccatttagaagattcatgaataggttccagtgccccttttgtcctttcctcaccatgcatcgacgtagcatctctcgtcacatagaaaacatccacttatctggaaagacagctgtctacaaatgtgacgaatgtccgtttacttgcaagagctcgttgaaacttggggctcacaaacagtgtcacacgggtacaacgtcagattgggatgctgtgaattcccagagtgaaagcatttcttcctcactgaatgaaggtgtggtgtcttatgagagctcaagcatcaatggtagaaagtcaggagtcatgttggatcccttgcagcagcaacagccaccgcagccaccaccaccgccgccgccaccaccaccatcacagccacagccactgcagcagccacagccaccacagctgcagccaccacatcaggtgccaccccagccacaaacacagccaccaccaacgcagcagccacagccacccacacaagccgcacctctgcacccatacaaatgcaccatgtgtaattactccaccacaactctgaaagggctaagagtccatcagcagcataaacattcattctgtgacaacttgccaaaattcgaggggcagccctcaagcctaccattggaaaatgagacagacagccacccctcttccagcaacactgtgaagaaaagtcagacctcaattcttgggttgtcctccaagaacaattttgtagctaaagcctctaggaagctcgccaatgactttcctctagatttgtcacccgtgaagaagagaaccaggattgacgagatagcaagcaaccttcagagcaaaattaaccaaaccaaacagcaggaagatgcagtgatcaatgttgaggatgatgaagaggaagaggaagacaacgaagtcgagatagaggttgagttggacagggaggaagaaccgacagaacccatcatagaggttcccacttccttttctgcccaacagatatggcacaatagtgaaaacacagactttggtgactctggaaggctttactattgtaaacactgtgactttaacaacaaatctgcccggagtgttagcacccactaccaacgaatgcacccatacattaaattcagctttaggtacatcttggaccccaatgatcacagtgcagtgtacaggtgcctggaatgctacatcgattacaccaacttcgaagatctccagcagcattatggcgagcaccacccagaagccatgaatgtactcaactttgatcactcggacctgatctaccggtgtcggttttgttcatacacgagcccgaatgttagaagcctgatgccacattaccaaagaatgcatcccacggtgaagatcaacaacgcgatgatattttcaagctatgtcgtggagcagcaggaagggctgaatacagaatcccagaccctgagggagattctgaattcggctcccaagaacatggcgacttccacacctgtggctcgtggtggtggtttgccagctacgttcaacaaaaacactcctaagacctttactcctgaatgtgaaaatcagaaggaccctttggtcaacactgttgttgtttatgattgtgatgtttgttcgtttgcaagccccaacatgcattctgtcttggttcattatcagaagaaacaccccgaagaaaaggcttcctactttaggatccagaaaactatgcgaatggtgtctgtggacaggggctctgccctttctcaattatcatttgaggtgggtgctccaatgtctcccaaaatgtccaacatgggttccccaccccccccacaacccccgccaccagacctcagtactgagctttactactgcaaacactgttcctacagcaatcggtcagttgtgggagtgcttgtccactaccagaaaagacacccagaaataaaggttactgccaaatatatcagacaggctcctcccacagctgcaatgatgagaggggtcgaagggccccaaggctccccccggccacccgcccccatacaacagctgaaccgaagcagctctgagagagatggccctcctgtggagaatgagatgttcttttgccagcactgtgattatgggaaccggacggtcaaaggggtactcattcattatcagaagaagcaccgagacttcaaggccaatgcagatgtgatccggcagcatacggccaccattcgaagcctctgcgaccgaaatcagaagaagcctgccagctgcgtgcttgtctccccctctaatctggagcgggacaaaacgaaactccgagcactcaaatgtaggcagtgctcatatacctccccctacttctatgcactgaggaagcatatcaagaaagaccaccccgccctgaaagccacagtcacgtccatcatgcgatgggcatttctagatggcttgatagaagctggctaccactgcgagtggtgcatctactcccatacggagcccaacggtttgctcctgcattaccaacggaggcatccagaacactatgttgattacacctacatggctactaaactgtgggctgggccagacccatcccctccctctctcacaatgccagccgaagccaaaacctacagatgcagggactgtgttttcgaagctgtttccatctgggacatcactaatcactaccaagcattccacccctgggccatgaatggtgatgagtcagtgctactggacatcatcaaggagaaagatgctgtggagaagcccattctttcatccgaagagttggcaggccctgtgaattgtgaaaacagtatacccacccctttcccggagcaggaagctgaatgtccagaggatgcaagactgtcccctgagaaaagcctgcagctagcttcagccaaccccgccatatcctccaccccataccagtgcacggtatgccaatctgagtataacaacttgcacggccttctcactcattatgggaagaagcaccctggcatgaaagtgaaggctgctgactttgcccaggacattgacatcaacccaggtgccgtctacaaatgcaggcattgcccatacatcaacacccgcatccacggcgtactgacccactaccagaagcgacacccgtccatcaaggtgaccgctgaggactttgtgcacgacgtagagcagtctgctgacatatcccagaatgacgtggaggagacgagcaggatcttcaagcaagggtatggcgcctaccggtgcaaactgtgtccgtacacacacggcactttggagaaactaaaaatccactacgagaagtatcacaatcagcctgaatttgatgtcttttcccagtcgcccccgaagctgccagtccccctcgagcccgagatgaccactgaagtgagcccttcccaagtctccatcactgaggaggaggtgggagaggagcccgtgtccacttctcacttctctacctcccacctggtctcccacactgtgttccggtgccagctctgcaagtacttctgctccacgaggaaggggatcgccaggcactaccgcatcaagcacaataatgtccgagcccagccagaaggcaagaacaacctcttcaagtgtgccctgtgtgcctacaccaaccccatccgcaaaggtctggcagcccactaccagaagcgccacgacattgatgcgtattacactcactgcttggcagcctccaggaccatcagcgacaagcccaacaaagtgatcatcccatccccgcccaaggacgactcccctcagctgagcgaggaactccggcgggcagtggagaagaaaaagtgctccttgtgctctttccagtcgttcagcaagaagggcatcgtgtcccattacatgaaacgccacccaggggtgttcccaaagaagcagcacgccagcaagttggggggctacttcacggccgtctatgcagatgagcatgagaagcccacactgatggaagaagaggagagaggcaactttgagaaagccgaggtggagggtgaagctcaggaaatcgagtggctcccattccgctgcatcaaatgcttcaagctgtcctttagcactgcagagctgctgtgcatgcattacactgaccaccacagtcgggacctaaagagggacttcatcattctgggcaacggcccccgcttgcagaactccacctaccagtgtaagcactgtgatagcaaactgcaaagcacagccgagctgacctcacacttgaacattcacaatgaggaattccagaagcgtgccaaacgtcaggagaggaggaaacagcttttgagcaagcagaaatatgcagatggtgcttttgcagatttcaaacaagagaggccttttggtcacttagaagaggtgccaaagatcaaggagaggaaagtggtgggctacaaatgtaaattctgtgtggaagtgcacccaacgctccgagccatctgcaatcacctccgaaagcacgtccagtatggcaatgtcccagctgtgtcagctgctgtgaaggttggaccttcctcatctttctgttcagggaaaggtcgagtttcgatctggtttccttccacgcggatagtttggtggcagcagaaggtccaggattctcggtctaggaggcttcggggaggcggatgaccctgcccacttgttcctggatggattggaagcagccaaagacgccagtggcgccctggtgggccgggtggatggtgaacactgcttgcttgatggaatgttggaggatgaaacccggccggggggataccattgcagtcaatgtgacagagtcctgatgtccatgcaggggctgcgttctcatgagaggagccacctggccctggccatgtttacccgcgaggacaagtacagctgccagtattgctcgtttgtttctgctttcaggcacaatttggatcgccatatgcaaacccaccacggacaccataaaccattccgatgcaaactctgctccttcaagtcctcctataacagccggctgaaaacacatatactcaaagctcatgctgactcatcatattcagagcccccagatgttcagcagcagttgaaccactatcagtcagctgccctggcaaggaacaacagccgtgttagccctgtgcctctttctggggctgctgctggcactgagcagaaaactgaagccgtgcttcactgcgaattctgtgaattctcctccggctacatccagagcatcaggcgtcattaccgggacaagcatggtgggaagaagcttttcaagtgcaaagactgctccttttacacaggctttaaatctgcttttactatgcacgtggaagctgggcactcagcagttcccgaggagggccccaaagatcttcgctgtcctctctgcctctatcacaccaaatacaagcgcaacatgattgaccacatcgtgctgcaccgagaagagcgtgttgtccccattgaagtttgccggtccaaactgtccaaatacttgcagggagtagttttccgctgtgataagtgtaccttcacctgctccagtgatgagagcctccagcaacatatagaaaagcacaatgaactgaaaccttacaaatgccagctctgctactatgagaccaagcacacggaggaactggacagccaccttcgggatgagcataagtttggtaatgaaggtccggtgtacaaaagttccggtgaaaatgatggaatgtgggagcaaagggctgctccatctccaaaagagtcaaaacgaagaaaaagacctcttaggccccggagttgtttggtcctggttgcaaaaccacagtcacaggaaaatgatgtaagccgtaactttgagctggttggacgggttaacttggatcagctggaacagatgaaggagaaaatggagagctccagcagcgatgatgaggacaaggaagaagaaatgaacagcaaggctgaagacagagtgaacaaagataaacctgtgtcaaaaaggaaatgaatagatgctagcctgtgaggcactgatataaatcatcacacaagggagagaataaatcggaaaaaataatgctcagattcctttggaatctcgggcaagcggctcttcagtcaagaaagacccagattttgtgatagaagcattggggaggtgaggcgaaatgaggtcttggggcccaagaaccagaaacagttctcgaatgctattcaaggaatgccctaagggggaaacctaagaaaaagtgaggaatctggaaattgctttcaccacatggctttatcagtgaaggtaggagagagggtatcctaatgaatgctgacttacctattctgctgattcccacagcacacaggtaacacttctgctttctctttgcagagctgatgagattttctgaccacggggctgctcttaacactgagaagcgttttccatgtgaattttgtggacgggcgttttcacagggctctgagtgggaaagacatgtgctgagacacggcatggcattgaatgacaccaagcaggtgagcagagaagaaatccacccaaaagagatcatggagaacagtgttaaaatgccctccatagaggaaaaggaagatgacgaggccattgggatagacttttccctaaagaatgaaacagtagccatctgtgtagtaactgccgacaaatctctcctggagaatgcagaggccaaaaaagaatgagcgtttggtgaaattcttaatcaaaccttacttgaacagtgatgaaaaagtgggagggctggcttgggctgagaagggagggacagaaaagagaagacagaacaaagctgctttttaggactgaacaatctattttcaaagcactggtacctgtgtgagtgagtatgtaaattaaagttatttaaatggttggaatatgtggctccttttccatcactacatcttttcttccggatcttcatcatggaagtttcatttgttgcggaatatggaagcacctcccaatggtacggtgcaccctgtggtggtcttggacagtatgtggaaacagaagctccatgacggtagaagacttctcattggggagcaactttttgacgcacaacttttggtgcgtttttctagttttaataccttaagctttttcaagacctaactgcagccgctttgggaaaaaaaaacaaaaaacaaaaaacagaaaacaaaaaaaaaaaaactgctttgcataaaacagtcacctgtttcctagtacctcaaacttaaccaagggaactctctgcatttgtcagtactacctgtcgtcgttgtggttaaatgtagagagaactgctgggcaagatggtgaatggagaaaaaaaaagagttttaaagaaaggaacacaaattgtgcttaaaatccccatgtgggttttatttcttaaaatactgtgatttttttaattattttagtaaaaaacaaaacaaaaaaaagaaacagactttaattattagataactgtttgtgaattgtcatcctttattccaggtaagctgtttattagtgttcaactataatttagaatttggtagattcatgtgagctaattttaaggtga

SEQ ID NO: 466400 - DNA, 4182 bp, Homo sapiens
gcctgtgagcatcttctcattgatccagagagacagctcttgacaatcttgcacggccttctcactcattatgggaagaagcaccctggcatgaaagtgaaggctgctgactttgcccaggacattgacatcaacccaggtgccgtctacaaatgcaggcattgcccatacatcaacacccgcatccacggcgtactgacccactaccagaagcgacacccgtccatcaaggtgaccgctgaggactttgtgcacgacgtagagcagtctgctgacatatcccagaatgacgtggaggagacgagcaggatcttcaagcaagggtatggcgcctaccggtgcaaactgtgtccgtacacacacggcactttggagaaactaaaaatccactacgagaagtatcacaatcagcctgaatttgatgtcttttcccagtcgcccccgaagctgccagtccccctcgagcccgagatgaccactgaagtgagcccttcccaagtctccatcactgaggaggaggtgggagaggagcccgtgtccacttctcacttctctacctcccacctggtctcccacactgtgttccggtgccagctctgcaagtacttctgctccacgaggaaggggatcgccaggcactaccgcatcaagcacaataatgtccgagcccagccagaaggcaagaacaacctcttcaagtgtgccctgtgtgcctacaccaaccccatccgcaaaggtctggcagcccactaccagaagcgccacgacattgatgcgtattacactcactgcttggcagcctccaggaccatcagcgacaagcccaacaaagtgatcatcccatccccgcccaaggacgactcccctcagctgagcgaggaactccggcgggcagtggagaagaaaaagtgctccttgtgctctttccagtcgttcagcaagaagggcatcgtgtcccattacatgaaacgccacccaggggtgttcccaaagaagcagcacgccagcaagttggggggctacttcacggccgtctatgcagatgagcatgagaagcccacactgatggaagaagaggagagaggcaactttgagaaagccgaggtggagggtgaagctcaggaaatcgagtggctcccattccgctgcatcaaatgcttcaagctgtcctttagcactgcagagctgctgtgcatgcattacactgaccaccacagtcgggacctaaagagggacttcatcattctgggcaacggcccccgcttgcagaactccacctaccagtgtaagcactgtgatagcaaactgcaaagcacagccgagctgacctcacacttgaacattcacaatgaggaattccagaagcgtgccaaacgtcaggagaggaggaaacagcttttgagcaagcagaaatatgcagatggtgcttttgcagatttcaaacaagagaggccttttggtcacttagaagaggtgccaaagatcaaggagaggaaagtggtgggctacaaatgtaaattctgtgtggaagtgcacccaacgctccgagccatctgcaatcacctccgaaagcacgtccagtatggcaatgtcccagctgtgtcagctgctgtgaagggaggcggatgaccctgcccacttgttcctggatggattggaagcagccaaagacgccagtggcgccctggtgggccgggtggatggtgaacactgcttgcttgatggaatgttggaggatgaaacccggccggggggataccattgcagtcaatgtgacagagtcctgatgtccatgcaggggctgcgttctcatgagaggagccacctggccctggccatgtttacccgcgaggacaagtacagctgccagtattgctcgtttgtttctgctttcaggcacaatttggatcgccatatgcaaacccaccacggacaccataaaccattccgatgcaaactctgctccttcaagtcctcctataacagccggctgaaaacacatatactcaaagctcatgctggtgagcatgcctacaagtgttcttggtgctcattctccaccatgacaatcagccagctgaaggaacactccctcaaggtccacggaaaagccctgaccctccccaggccacggatcgtcagtctcctctcctcacactcccaccactcctcccaaaaagctaccccggctgaagaagtggaagactccaatgactcatcatattcagagcccccagatgttcagcagcagttgaaccactatcagtcagctgccctggcaaggaacaacagccgtgttagccctgtgcctctttctggggctgctgctggcactgagcagaaaactgaagccgtgcttcactgcgaattctgtgaattctcctccggctacatccagagcatcaggcgtcattaccgggacaagcatggtgggaagaagcttttcaagtgcaaagactgctccttttacacaggctttaaatctgcttttactatgcacgtggaagctgggcactcagcagttcccgaggagggccccaaagatcttcgctgtcctctctgcctctatcacaccaaatacaagcgcaacatgattgaccacatcgtgctgcaccgagaagagcgtgttgtccccattgaagtttgccggtccaaactgtccaaatacttgcagggagtagttttccgctgtgataagtgtaccttcacctgctccagtgatgagagcctccagcaacatatagaaaagcacaatgaactgaaaccttacaaatgccagctctgctactatgagaccaagcacacggaggaactggacagccaccttcgggatgagcataaggtaagccgtaactttgagctggttggacgggttaacttggatcagctggaacagatgaaggagaaaatggagagctccagcagcgatgatgaggacaaggaagaagaaatgaacagcaaggctgaagacagagagctgatgagattttctgaccacggggctgctcttaacactgagaagcgttttccatgtgaattttgtggacgggcgttttcacagggctctgagtgggaaagacatgtgctgagacacggcatggcattgaatgacaccaagcaggtgagcagagaagaaatccacccaaaagagatcatggagaacagtgttaaaatgccctccatagaggaaaaggaagatgacgaggccattgggatagacttttccctaaagaatgaaacagtagccatctgtgtagtaactgccgacaaatctctcctggagaatgcagaggccaaaaaagaatgagcgtttggtgaaattcttaatcaaaccttacttgaacagtgatgaaaaagtgggagggctggcttgggctgagaagggagggacagaaaagagaagacagaacaaagctgctttttaggactgaacaatctattttcaaagcactggtacctgtgtgagtgagtatgtaaattaaagttatttaaatggttggaatatgtggctccttttccatcactacatcttttcttccggatcttcatcatggaagtttcatttgttgcggaatatggaagcacctcccaatggtacggtgcaccctgtggtggtcttggacagtatgtggaaacagaagctccatgacggtagaagacttctcattggggagcaactttttgacgcacaacttttggtgcgtttttctagttttaataccttaagctttttcaagacctaactgcagccgctttgggaaaaaaaaacaaaaaacaaaaaacagaaaacaaaaaaaaaaaaactgctttgcataaaacagtcacctgtttcctagtacctcaaacttaaccaagggaactctctgcatttgtcagtactacctgtcgtcgttgtggttaaatgtagagagaactgctgggcaagatggtgaatggagaaaaaaaaagagttttaaagaaaggaacacaaattgtgcttaaaatccccatgtgggttttatttcttaaaatactgtgatttttttaattattttagtaaaaaacaaaacaaaaaaaagaaacagactttaattattagataactgtttgtgaattgtcatcctttattccaggtaagctgtttattagtgttcaactataatttagaatttggtagattcatgtgagctaattttaaggtga

SEQ ID NO: 466401 - DNA, 2290 bp, Homo sapiens
aggcactaagctaaagcagaagcttggatgagtaagaaggccccactcatggttcacacctgctgctatgttacctggagcctcagtcaccttttctgtaaaatggggctgagaacaggagattgatcggatggcgttagatttggcaaatgcaggcattttaaaaatgagaattggaggaattgctatgatttacccaaagtttggatcgccatatgcaaacccaccacggacaccataaaccattccgatgcaaactctgctccttcaagtcctcctataacagccggctgaaaacacatatactcaaagctcatgctgactcatcatattcagagcccccagatgttcagcagcagttgaaccactatcagtcagctgccctggcaaggaacaacagccgtgttagccctgtgcctctttctggggctgctgctggcactgagcagaaaactgaagccgtgcttcactgcgaattctgtgaattctcctccggctacatccagagcatcaggcgtcattaccgggacaagcatggtgggaagaagcttttcaagtgcaaagactgctccttttacacaggctttaaatctgcttttactatgcacgtggaagctgggcactcagcagttcccgaggagggccccaaagatcttcgctgtcctctctgcctctatcacaccaaatacaagcgcaacatgattgaccacatcgtgctgcaccgagaagagcgtgttgtccccattgaagtttgccggtccaaactgtccaaatacttgcagggagtagttttccgctgtgataagtgtaccttcacctgctccagtgatgagagcctccagcaacatatagaaaagcacaatgaactgaaaccttacaaatgccagctctgctactatgagaccaagcacacggaggaactggacagccaccttcgggatgagcataaggtaagccgtaactttgagctggttggacgggttaacttggatcagctggaacagatgaaggagaaaatggagagctccagcagcgatgatgaggacaaggaagaagaaatgaacagcaaggctgaagacagagagctgatgagattttctgaccacggggctgctcttaacactgagaagcgttttccatgtgaattttgtggacgggcgttttcacagggctctgagtgggaaagacatgtgctgagacacggcatggcattgaatgacaccaagcaggtgagcagagaagaaatccacccaaaagagatcatggagaacagtgttaaaatgccctccatagaggaaaaggaagatgacgaggccattgggatagacttttccctaaagaatgaaacagtagccatctgtgtagtaactgccgacaaatctctcctggagaatgcagaggccaaaaaagaatgagcgtttggtgaaattcttaatcaaaccttacttgaacagtgatgaaaaagtgggagggctggcttgggctgagaagggagggacagaaaagagaagacagaacaaagctgctttttaggactgaacaatctattttcaaagcactggtacctgtgtgagtgagtatgtaaattaaagttatttaaatggttggaatatgtggctccttttccatcactacatcttttcttccggatcttcatcatggaagtttcatttgttgcggaatatggaagcacctcccaatggtacggtgcaccctgtggtggtcttggacagtatgtggaaacagaagctccatgacggtagaagacttctcattggggagcaactttttgacgcacaacttttggtgcgtttttctagttttaataccttaagctttttcaagacctaactgcagccgctttgggaaaaaaaaacaaaaaacaaaaaacagaaaacaaaaaaaaaaaaactgctttgcataaaacagtcacctgtttcctagtacctcaaacttaaccaagggaactctctgcatttgtcagtactacctgtcgtcgttgtggttaaatgtagagagaactgctgggcaagatggtgaatggagaaaaaaaaagagttttaaagaaaggaacacaaattgtgcttaaaatccccatgtgggttttatttcttaaaatactgtgatttttttaattattttagtaaaaaacaaaacaaaaaaaagaaacagactttaattattagataactgtttgtgaattgtcatcctttattccaggtaagctgtttattagtgttcaactataatttagaatttggtagattcatgtgagctaattttaaggtga

SEQ ID NO: 466402 - DNA, 7565 bp, Homo sapiens
  misc_feature (2)..(2): n is a, c, g, or t
  misc_feature (9)..(9): n is a, c, g, or t
  misc_feature (11)..(11): n is a, c, g, or t
  misc_feature (13)..(13): n is a, c, g, or t
  misc_feature (15)..(15): n is a, c, g, or t
tnctgcttntncnanaggttcctaatgtgagaggctagacccagatcatggaggtgcttcagtgtgatggctgtgatttccgagccccgtcttatgaagatctcaaggcacacattcaggatgtccacacggcatttctgcagccaactgatgttgctgaggacaatgtgaatgagctacgatgtgggtccgtgaatgccagtaatcagacagaggtggagttttcttctataaaggatgaatttgccattgcagaagatttatcaggtcaaaatgcaacttcattggggaccggaggttactatggccacagtccaggatattatggtcagcatattgccgctaatcccaaaccaacaaacaagttttttcaatgcaagttctgtgtacgctacttcaggtcaaaaaacctcctcatagaacacactagaaaggtccatggagctcaagctgaagggagttcatcaggaccccctgtcccgggatccttaaattataatatcatgatgcacgagggatttggaaaggtcttctcttgccagttttgcacatacaagtcaccaagaagggcaagaataattaagcatcagaagatgtatcacaaaaacaatttgaaggagaccactgctcccccacctgctcctgctccaatgccagaccctgtggttccgcccgtatcactgcaggacccctgcaaggaactgccagcagaggttgtggagcgcagcatcttagagtctatggtcaagcctttgaccaaatctcgaggcaacttttgttgtgagtggtgcagctaccagaccccccgccgagaacgctggtgtgaccacatgatgaagaaacaccgcagtatggtcaagatcctttccagtctcagacagcaacaagaaggaactaatctacctgatgtgccgaacaagagtgcccccagccccacttccaactccacctatctgaccatgaatgctgcaagccgggagatacccaatactaccgtctccaacttcaggggctccatgggcaactccatcatgagacccaattcttcagcttccaagttttcgcccatgtcttaccctcagatgaagccgaagtcacctcacaattctggtctagttaacttgacagagagatcccgttatggaatgactgacatgaccaattcttctgctgacctggaaactaacagcatgctaaatgactctagttctgatgaagagttaaatgaaatagacagtgagaatggtttaagtgctatggatcaccagacatcaggcctgtctgcagagcagctgatgggctcagatggcaacaaattattggagaccaaggggattccatttagaagattcatgaataggttccagtgccccttttgtcctttcctcaccatgcatcgacgtagcatctctcgtcacatagaaaacatccacttatctggaaagacagctgtctacaaatgtgacgaatgtccgtttacttgcaagagctcgttgaaacttggggctcacaaacagtgtcacacgggtacaacgtcagattgggatgctgtgaattcccagagtgaaagcatttcttcctcactgaatgaaggtgtggtgtcttatgagagctcaagcatcaatggtagaaagtcaggagtcatgttggatcccttgcagcagcaacagccaccgcagccaccaccaccgccgccgccaccaccaccatcacagccacagccactgcagcagccacagccaccacagctgcagccaccacatcaggtgccaccccagccacaaacacagccaccaccaacgcagcagccacagccacccacacaagccgcacctctgcacccatacaaatgcaccatgtgtaattactccaccacaactctgaaagggctaagagtccatcagcagcataaacattcattctgtgacaacttgccaaaattcgaggggcagccctcaagcctaccattggaaaatgagacagacagccacccctcttccagcaacactgtgaagaaaagtcagacctcaattcttgggttgtcctccaagaacaattttgtagctaaagcctctaggaagctcgccaatgactttcctctagatttgtcacccgtgaagaagagaaccaggattgacgagatagcaagcaaccttcagagcaaaattaaccaaaccaaacagcaggaagatgcagtgatcaatgttgaggatgatgaagaggaagaggaagacaacgaagtcgagatagaggttgagttggacagggaggaagaaccgacagaacccatcatagaggttcccacttccttttctgcccaacagatatggcacaatagtgaaaacacagactttggtgactctggaaggctttactattgtaaacactgtgactttaacaacaaatctgcccggagtgttagcacccactaccaacgaatgcacccatacattaaattcagctttaggtacatcttggaccccaatgatcacagtgcagtgtacaggtgcctggaatgctacatcgattacaccaacttcgaagatctccagcagcattatggcgagcaccacccagaagccatgaatgtactcaactttgatcactcggacctgatctaccggtgtcggttttgttcatacacgagcccgaatgttagaagcctgatgccacattaccaaagaatgcatcccacggtgaagatcaacaacgcgatgatattttcaagctatgtcgtggagcagcaggaagggctgaatacagaatcccagaccctgagggagattctgaattcggctcccaagaacatggcgacttccacacctgtggctcgtggtggtggtttgccagctacgttcaacaaaaacactcctaagacctttactcctgaatgtgaaaatcagaaggaccctttggtcaacactgttgttgtttatgattgtgatgtttgttcgtttgcaagccccaacatgcattctgtcttggttcattatcagaagaaacaccccgaagaaaaggcttcctactttaggatccagaaaactatgcgaatggtgtctgtggacaggggctctgccctttctcaattatcatttgaggtgggtgctccaatgtctcccaaaatgtccaacatgggttccccaccccccccacaacccccgccaccagacctcagtactgagctttactactgcaaacactgttcctacagcaatcggtcagttgtgggagtgcttgtccactaccagaaaagacacccagaaataaaggttactgccaaatatatcagacaggctcctcccacagctgcaatgatgagaggggtcgaagggccccaaggctccccccggccacccgcccccatacaacagctgaaccgaagcagctctgagagagatggccctcctgtggagaatgagatgttcttttgccagcactgtgattatgggaaccggacggtcaaaggggtactcattcattatcagaagaagcaccgagacttcaaggccaatgcagatgtgatccggcagcatacggccaccattcgaagcctctgcgaccgaaatcagaagaagcctgccagctgcgtgcttgtctccccctctaatctggagcgggacaaaacgaaactccgagcactcaaatgtaggcagtgctcatatacctccccctacttctatgcactgaggaagcatatcaagaaagaccaccccgccctgaaagccacagtcacgtccatcatgcgatgggcatttctagatggcttgatagaagctggctaccactgcgagtggtgcatctactcccatacggagcccaacggtttgctcctgcattaccaacggaggcatccagaacactatgttgattacacctacatggctactaaactgtgggctgggccagacccatcccctccctctctcacaatgccagccgaagccaaaacctacagatgcagggactgtgttttcgaagctgtttccatctgggacatcactaatcactaccaagcattccacccctgggccatgaatggtgatgagtcagtgctactggacatcatcaaggagaaagatgctgtggagaagcccattctttcatccgaagagttggcaggccctgtgaattgtgaaaacagtatacccacccctttcccggagcaggaagctgaatgtccagaggatgcaagactgtcccctgagaaaagcctgcagctagcttcagccaaccccgccatatcctccaccccataccagtgcacggtatgccaatctgagtataacaacttgcacggccttctcactcattatgggaagaagcaccctggcatgaaagtgaaggctgctgactttgcccaggacattgacatcaacccaggtgccgtctacaaatgcaggcattgcccatacatcaacacccgcatccacggcgtactgacccactaccagaagcgacacccgtccatcaaggtgaccgctgaggactttgtgcacgacgtagagcagtctgctgacatatcccagaatgacgtggaggagacgagcaggatcttcaagcaagggtatggcgcctaccggtgcaaactgtgtccgtacacacacggcactttggagaaactaaaaatccactacgagaagtatcacaatcagcctgaatttgatgtcttttcccagtcgcccccgaagctgccagtccccctcgagcccgagatgaccactgaagtgagcccttcccaagtctccatcactgaggaggaggtgggagaggagcccgtgtccacttctcacttctctacctcccacctggtctcccacactgtgttccggtgccagctctgcaagtacttctgctccacgaggaaggggatcgccaggcactaccgcatcaagcacaataatgtccgagcccagccagaaggcaagaacaacctcttcaagtgtgccctgtgtgcctacaccaaccccatccgcaaaggtctggcagcccactaccagaagcgccacgacattgatgcgtattacactcactgcttggcagcctccaggaccatcagcgacaagcccaacaaagtgatcatcccatccccgcccaaggacgactcccctcagctgagcgaggaactccggcgggcagtggagaagaaaaagtgctccttgtgctctttccagtcgttcagcaagaagggcatcgtgtcccattacatgaaacgccacccaggggtgttcccaaagaagcagcacgccagcaagttggggggctacttcacggccgtctatgcagatgagcatgagaagcccacactgatggaagaagaggagagaggcaactttgagaaagccgaggtggagggtgaagctcaggaaatcgagtggctcccattccgctgcatcaaatgcttcaagctgtcctttagcactgcagagctgctgtgcatgcattacactgaccaccacagtcgggacctaaagagggacttcatcattctgggcaacggcccccgcttgcagaactccacctaccagtgtaagcactgtgatagcaaactgcaaagcacagccgagctgacctcacacttgaacattcacaatgaggaattccagaagcgtgccaaacgtcaggagaggaggaaacagcttttgagcaagcagaaatatgcagatggtgcttttgcagatttcaaacaagagaggccttttggtcacttagaagaggtgccaaagatcaaggagaggaaagtggtgggctacaaatgtaaattctgtgtggaagtgcacccaacgctccgagccatctgcaatcacctccgaaagcacgtccagtatggcaatgtcccagctgtgtcagctgctgtgaagggaggcggatgaccctgcccacttgttcctggatggattggaagcagccaaagacgccagtggcgccctggtgggccgggtggatggtgaacactgcttgcttgatggaatgttggaggatgaaacccggccggggggataccattgcagtcaatgtgacagagtcctgatgtccatgcaggggctgcgttctcatgagaggagccacctggccctggccatgtttacccgcgaggacaagtacagctgccagtattgctcgtttgtttctgctttcaggcacaatttggatcgccatatgcaaacccaccacggacaccataaaccattccgatgcaaactctgctccttcaagtcctcctataacagccggctgaaaacacatatactcaaagctcatgctggtgagcatgcctacaagtgttcttggtgctcattctccaccatgacaatcagccagctgaaggaacactccctcaaggtccacggaaaagccctgaccctccccaggccacggatcgtcagtctcctctcctcacactcccaccactcctcccaaaaagctaccccggctgaagaagtggaagactccaatgactcatcatattcagagcccccagatgttcagcagcagttgaaccactatcagtcagctgccctggcaaggaacaacagccgtgttagccctgtgcctctttctggggctgctgctggcactgagcagaaaactgaagccgtgcttcactgcgaattctgtgaattctcctccggctacatccagagcatcaggcgtcattaccgggacaagcatggtgggaagaagcttttcaagtgcaaagactgctccttttacacaggctttaaatctgcttttactatgcacgtggaagctgggcactcagcagttcccgaggagggccccaaagatcttcgctgtcctctctgcctctatcacaccaaatacaagcgcaacatgattgaccacatcgtgctgcaccgaggtaacctttctaacttggttttcttggatgcagcggggggcaggcagcagagatggccttctagggatgctctctcagagtggcagtagcacctgtgccttgttcctcaccttatcttcaggcaagaaaccacagtgataaccacagtgacagccaaaagggcaaaaacaccttcctgctgggagtatttcctccacctggagggaggcaaaggtgatggattctgcagtgaacatttccgtagggcttcccagcatgggggatttgtacattctgacaattctgccacccacagccttgcgtagactgcatagaaggaatgaacaagaaacaaaatgggtgggtgaaagcaaatgtgaaatgtggagagctctatggctgtgagagattctttcaagaagaccaaaatgatttccaaagcagaacatggaacttcccttgaaatggttgaagggagagagaattctttaaaataatgtatattatacattctaataatagtctctattatatattctaataataattagaaaatccatgggctttggatttaaattctggttttagagcccactgtgtttaacctctccatccattaaaagagatgattgtacctatgagataatgggtaaagtgtccagtggtttttcataatggatgcataatgactgctcaataaatgttggttcctgctgataaacagtga

SEQ ID NO: 466403 - DNA, 7464 bp, Homo sapiens
  misc_feature (2)..(2): n is a, c, g, or t
  misc_feature (9)..(9): n is a, c, g, or t
  misc_feature (11)..(11): n is a, c, g, or t
  misc_feature (13)..(13): n is a, c, g, or t
  misc_feature (15)..(15): n is a, c, g, or t
tnctgcttntncnanaggttcctaatgtgagaggctagacccagatcatggaggtgcttcagtgtgatggctgtgatttccgagccccgtcttatgaagatctcaaggcacacattcaggatgtccacacggcatttctgcagccaactgatgttgctgaggacaatgtgaatgagctacgatgtgggtccgtgaatgccagtaatcagacagaggtggagttttcttctataaaggatgaatttgccattgcagaagatttatcaggtcaaaatgcaacttcattggggaccggaggttactatggccacagtccaggatattatggtcagcatattgccgctaatcccaaaccaacaaacaagttttttcaatgcaagttctgtgtacgctacttcaggtcaaaaaacctcctcatagaacacactagaaaggtccatggagctcaagctgaagggagttcatcaggaccccctgtcccgggatccttaaattataatatcatgatgcacgagggatttggaaaggtcttctcttgccagttttgcacatacaagtcaccaagaagggcaagaataattaagcatcagaagatgtatcacaaaaacaatttgaaggagaccactgctcccccacctgctcctgctccaatgccagaccctgtggttccgcccgtatcactgcaggacccctgcaaggaactgccagcagaggttgtggagcgcagcatcttagagtctatggtcaagcctttgaccaaatctcgaggcaacttttgttgtgagtggtgcagctaccagaccccccgccgagaacgctggtgtgaccacatgatgaagaaacaccgcagtatggtcaagatcctttccagtctcagacagcaacaagaaggaactaatctacctgatgtgccgaacaagagtgcccccagccccacttccaactccacctatctgaccatgaatgctgcaagccgggagatacccaatactaccgtctccaacttcaggggctccatgggcaactccatcatgagacccaattcttcagcttccaagttttcgcccatgtcttaccctcagatgaagccgaagtcacctcacaattctggtctagttaacttgacagagagatcccgttatggaatgactgacatgaccaattcttctgctgacctggaaactaacagcatgctaaatgactctagttctgatgaagagttaaatgaaatagacagtgagaatggtttaagtgctatggatcaccagacatcaggcctgtctgcagagcagctgatgggctcagatggcaacaaattattggagaccaaggggattccatttagaagattcatgaataggttccagtgccccttttgtcctttcctcaccatgcatcgacgtagcatctctcgtcacatagaaaacatccacttatctggaaagacagctgtctacaaatgtgacgaatgtccgtttacttgcaagagctcgttgaaacttggggctcacaaacagtgtcacacgggtacaacgtcagattgggatgctgtgaattcccagagtgaaagcatttcttcctcactgaatgaaggtgtggtgtcttatgagagctcaagcatcaatggtagaaagtcaggagtcatgttggatcccttgcagcagcaacagccaccgcagccaccaccaccgccgccgccaccaccaccatcacagccacagccactgcagcagccacagccaccacagctgcagccaccacatcaggtgccaccccagccacaaacacagccaccaccaacgcagcagccacagccacccacacaagccgcacctctgcacccatacaaatgcaccatgtgtaattactccaccacaactctgaaagggctaagagtccatcagcagcataaacattcattctgtgacaacttgccaaaattcgaggggcagccctcaagcctaccattggaaaatgagacagacagccacccctcttccagcaacactgtgaagaaaagtcagacctcaattcttgggttgtcctccaagaacaattttgtagctaaagcctctaggaagctcgccaatgactttcctctagatttgtcacccgtgaagaagagaaccaggattgacgagatagcaagcaaccttcagagcaaaattaaccaaaccaaacagcaggaagatgcagtgatcaatgttgaggatgatgaagaggaagaggaagacaacgaagtcgagatagaggttgagttggacagggaggaagaaccgacagaacccatcatagaggttcccacttccttttctgcccaacagatatggcacaatagtgaaaacacagactttggtgactctggaaggctttactattgtaaacactgtgactttaacaacaaatctgcccggagtgttagcacccactaccaacgaatgcacccatacattaaattcagctttaggtacatcttggaccccaatgatcacagtgcagtgtacaggtgcctggaatgctacatcgattacaccaacttcgaagatctccagcagcattatggcgagcaccacccagaagccatgaatgtactcaactttgatcactcggacctgatctaccggtgtcggttttgttcatacacgagcccgaatgttagaagcctgatgccacattaccaaagaatgcatcccacggtgaagatcaacaacgcgatgatattttcaagctatgtcgtggagcagcaggaagggctgaatacagaatcccagaccctgagggagattctgaattcggctcccaagaacatggcgacttccacacctgtggctcgtggtggtggtttgccagctacgttcaacaaaaacactcctaagacctttactcctgaatgtgaaaatcagaaggaccctttggtcaacactgttgttgtttatgattgtgatgtttgttcgtttgcaagccccaacatgcattctgtcttggttcattatcagaagaaacaccccgaagaaaaggcttcctactttaggatccagaaaactatgcgaatggtgtctgtggacaggggctctgccctttctcaattatcatttgaggtgggtgctccaatgtctcccaaaatgtccaacatgggttccccaccccccccacaacccccgccaccagacctcagtactgagctttactactgcaaacactgttcctacagcaatcggtcagttgtgggagtgcttgtccactaccagaaaagacacccagaaataaaggttactgccaaatatatcagacaggctcctcccacagctgcaatgatgagaggggtcgaagggccccaaggctccccccggccacccgcccccatacaacagctgaaccgaagcagctctgagagagatggccctcctgtggagaatgagatgttcttttgccagcactgtgattatgggaaccggacggtcaaaggggtactcattcattatcagaagaagcaccgagacttcaaggccaatgcagatgtgatccggcagcatacggccaccattcgaagcctctgcgaccgaaatcagaagaagcctgccagctgcgtgcttgtctccccctctaatctggagcgggacaaaacgaaactccgagcactcaaatgtaggcagtgctcatatacctccccctacttctatgcactgaggaagcatatcaagaaagaccaccccgccctgaaagccacagtcacgtccatcatgcgatgggcatttctagatggcttgatagaagctggctaccactgcgagtggtgcatctactcccatacggagcccaacggtttgctcctgcattaccaacggaggcatccagaacactatgttgattacacctacatggctactaaactgtgggctgggccagacccatcccctccctctctcacaatgccagccgaagccaaaacctacagatgcagggactgtgttttcgaagctgtttccatctgggacatcactaatcactaccaagcattccacccctgggccatgaatggtgatgagtcagtgctactggacatcatcaaggagaaagatgctgtggagaagcccattctttcatccgaagagttggcaggccctgtgaattgtgaaaacagtatacccacccctttcccggagcaggaagctgaatgtccagaggatgcaagactgtcccctgagaaaagcctgcagctagcttcagccaaccccgccatatcctccaccccataccagtgcacggtatgccaatctgagtataacaacttgcacggccttctcactcattatgggaagaagcaccctggcatgaaagtgaaggctgctgactttgcccaggacattgacatcaacccaggtgccgtctacaaatgcaggcattgcccatacatcaacacccgcatccacggcgtactgacccactaccagaagcgacacccgtccatcaaggtgaccgctgaggactttgtgcacgacgtagagcagtctgctgacatatcccagaatgacgtggaggagacgagcaggatcttcaagcaagggtatggcgcctaccggtgcaaactgtgtccgtacacacacggcactttggagaaactaaaaatccactacgagaagtatcacaatcagcctgaatttgatgtcttttcccagtcgcccccgaagctgccagtccccctcgagcccgagatgaccactgaagtgagcccttcccaagtctccatcactgaggaggaggtgggagaggagcccgtgtccacttctcacttctctacctcccacctggtctcccacactgtgttccggtgccagctctgcaagtacttctgctccacgaggaaggggatcgccaggcactaccgcatcaagcacaataatgtccgagcccagccagaaggcaagaacaacctcttcaagtgtgccctgtgtgcctacaccaaccccatccgcaaaggtctggcagcccactaccagaagcgccacgacattgatgcgtattacactcactgcttggcagcctccaggaccatcagcgacaagcccaacaaagtgatcatcccatccccgcccaaggacgactcccctcagctgagcgaggaactccggcgggcagtggagaagaaaaagtgctccttgtgctctttccagtcgttcagcaagaagggcatcgtgtcccattacatgaaacgccacccaggggtgttcccaaagaagcagcacgccagcaagttggggggctacttcacggccgtctatgcagatgagcatgagaagcccacactgatggaagaagaggagagaggcaactttgagaaagccgaggtggagggtgaagctcaggaaatcgagtggctcccattccgctgcatcaaatgcttcaagctgtcctttagcactgcagagctgctgtgcatgcattacactgaccaccacagtcgggacctaaagagggacttcatcattctgggcaacggcccccgcttgcagaactccacctaccagtgtaagcactgtgatagcaaactgcaaagcacagccgagctgacctcacacttgaacattcacaatgaggaattccagaagcgtgccaaacgtcaggagaggaggaaacagcttttgagcaagcagaaatatgcagatggtgcttttgcagatttcaaacaagagaggccttttggtcacttagaagaggtgccaaagatcaaggagaggaaagtggtgggctacaaatgtaaattctgtgtggaagtgcacccaacgctccgagccatctgcaatcacctccgaaagcacgtccagtatggcaatgtcccagctgtgtcagctgctgtgaagggaggcggatgaccctgcccacttgttcctggatggattggaagcagccaaagacgccagtggcgccctggtgggccgggtggatggtgaacactgcttgcttgatggaatgttggaggatgaaacccggccggggggataccattgcagtcaatgtgacagagtcctgatgtccatgcaggggctgcgttctcatgagaggagccacctggccctggccatgtttacccgcgaggacaagtacagctgccagtattgctcgtttgtttctgctttcaggcacaatttggatcgccatatgcaaacccaccacggacaccataaaccattccgatgcaaactctgctccttcaagtcctcctataacagccggctgaaaacacatatactcaaagctcatgctggtgagcatgcctacaagtgttcttggtgctcattctccaccatgacaatcagccagctgaaggaacactccctcaaggtccacggaaaagccctgaccctccccaggccacggatcgtcagtctcctctcctcacactcccaccactcctcccaaaaagctaccccggctgaagaagtggaagactccaatgactcatcatattcagagcccccagatgttcagcagcagttgaaccactatcagtcagctgccctggcaaggaacaacagccgtgttagccctgtgcctctttctggggctgctgctggcactgagcagaaaactgaagccgtgcttcactgcgaattctgtgaattctcctccggctacatccagagcatcaggcgtcattaccgggacaagcatggtgggaagaagcttttcaagtgcaaagactgctccttttacacaggctttaaatctgcttttactatgcacgtggaagctgggcactcagcagttcccgaggagggccccaaagatcttcgctgtcctctctgcctctatcacaccaaatacaagcgcaacatgattgaccacatcgtgctgcaccgagaagagcgtgttgtccccattgaagtttgccggtccaaactgtccaaatacttgcagggagtagttttccgctgtgataagtgtaccttcacctgctccagtgatgagagcctccagcaacatatagaaaagcacaatgaactgaaaccttacaaatgccagctctgctactatgagaccaagcacacggaggaactggacagccaccttcgggatgagcataaggtaagccgtaactttgagctggttggacgggttaacttggatcagctggaacagatgaaggagaaaatggagagctccagcagcgatgatgaggacaaggaagaagaaatgaacagcaaggctgaagacagagagctgatgagattttctgaccacggggctgctcttaacactgagaagcgttttccatgtgaattttgtggacgggcgttttcacagggctctgagtgggaaagacatgtgctgagacacggcatggcattgaatgacaccaagcaggtgagcagagaagaaatccacccaaaagagatcatggagaacagtgttaaaatgccctccatagaggattcagaagtgagacgggatactctagagtcacct

SEQ ID NO: 466404 - DNA, 3203 bp, Homo sapiens
aacatttggctcctagttacttatgcaaatttctgcagctggcttgaatttctcctcagaaaatggtataatagatgacgcctggtggtttgggactgtggagagtcagcagccttttcaaccagagtatcctgatagttctttccagtgttacagtgttcagagaatatcagcattaatgtgggaggtacgctatattgaacataatgccaggactttcaatgagccagacagtcctatagttaaagcagctaaaattgtaactgatgtcttacttcgatttattggggatcagagctgtactgatatactggatacttataataaaattaaagcagaagaacgaaacagtactgatgcagaggaggatacagaaattgttgatttagattcagacggtcctggtacttcatctggaagaaaggattatcaagatgttatagatactcctgtggacttcagcactgtgaaagaaactttggaagcaggaaactatggtagtcctctggaattttataaggatgttcgccaaatattcaacaactccaaagcttatacctctaataaaaagtcaaggatctatagcatgatgctgcgattatctgccttatttgaaagtcatatcaaaaatatcatctctgaatataagtcagcaatccagagtcagaagaggagaaggccacggtacagaaaacgtctaagaagcagcagcagttcattatctagtagtggagcacctagtccaaaagggaagcagaaacaaatgaagttgcagcctaaaaatgaccagaatacctcagtatctcatgccaggactagctctcctttctcatctcctgtttcagatgctgctgaagggctttcactatatctacttgatgatgagccagatgggccattttcttcatcgagcttcggtggatatagccgaagtggaaatagccatgacccagggaaagccaaatcatttcggaatagagttttgccagttaaacaagatcactcccttgatggaccccttacaaatggtgatggcagagagccccggacaggaatcaagagaaaactacttagtgcatcagaagaagatgaaaacatgggaggagaagataaagagaaaaaagaaacaaaagagaaatctcatttatccacctcagagagtggagagttaggatccagtttaagttctgaaagtacctgtggttctgactctgactctgaatcaacttccagaacagatcaagattacgtagatggagaccatgattatagcaaattcatacaaaccagacctaaaagaaaactcagaaagcaacatggcaatggaaaaagaaattggaagaccagaggcacaggaggaagaggcagatggggaagatggggtagatggagtagaggaggcagaggaagaggaggcaggggacgagggagtcgaggaagaggtggaggtggcactagggggaggggaagagggagaggaggaagaggtgcttctagaggagctaccagagccaaacgagcacgtattgcagatgatgaatttgataccatgttttcaggacgtttcagtagactgcctcgaattaaaacaagaaaccaaggcaggaggactgttttatataatgatgattctgataatgacaattttgtgtccactgaggatcctctgaatcttggtacatccagatcaggcagagtgcgtaaaatgacagaaaaagccagggttagccatctcatgggatggaattattaacagttaataaatttagaataacttaaaaaattcaatggccttctactgcagggaatttaccaggaaatctacaaagcaagttgtgtggggacttctgcttcctttcacattggtgcttttccatttatgccagtatacatttgtttcaagacttttgatctccacacttcatttgttcaaataagccttactcattaggccttaaattaaaagaaattctgcccacacacacacaaacacatacacacacatacacacacacagacacacacacacgaaacacaacacagacactacagatttactacattaaaggagcattcagcttcttaagagtagcatgacatttttatctcaatagaatagccctcttttgcttttgtatcacagaagtatagcaccttcttacagagttttatatagtttgtttttgccattttgattcctatacccagtaataataacttttgcacaatacaccaatcctaaaggcagctattaaatgtttacagtttctatattgtaagagcgatctggattattttactcttcccaggccaaactttcatgacttgtactgaactgaagtatatatttatactacagttttttggggggtggggggatcttgatatgcttttcattgatttgcataattcacgttaaaggtgagaaagggttggtgccttgtaaatatgtagcagatcttcgtggtgtgttctgatgtgtgcattaactttattaaaaaagaatacttgaggtatcaatctagacaaggtgccaaatgcaaaagtttcccgcatcaatttttttcctatcacattttattgcattaatagaatttgtgtagcttaaataacttaaacatttgaaaaatcctcatccacaaagaacaacttctttgaacagtagctcagctacctcttaactacaactactggaaacattaaggaaaatagatgctgttattccttactgactaaggagaaatagaacaagcttagtaggaatgaataccccataagttataagctgagaggttgttaataattgtattggctctcaaattaataattgtaattaacaaagtttcataaatatagtatgctctaccaccttaggctttcttagaacatatttgtaaatcaggcttgtgttggaattcttctctataatactttgtttcccgcagatgcaaagtaacaaagtaactgagtaaaattagaaatctcattctgcacaactgtgcgctcagatatttaactcagccttctaatacttttaacttatcctttctttatgcaccttcctagtctaacatacttccattggaggttcgattttcttataatctttaaaagctctgtatcctacttgttaaagttatttatttgaaggcaaatatcccatagaactgctttaggtttctgctttcataagaaagccttat

SEQ ID NO: 466405 - DNA, 159 bp, Homo sapiens
tcctaaactcttatgcctatgtagagttagtaatcaaaagtactatttatgtgggttttactatcccagaaactttttttaaattttaatgattgaagtttcactgtcaaattatctatttcatgaattttagggcatttcttctttggccagctaata

SEQ ID NO: 466406 - DNA, 725 bp, Homo sapiens
gtctgtaatgatgatgcttaatattggtctaggcatgtttatacctttttttaaaatataaaactagttaagactatataatttctgccttctcagatctatagcatgatgctgcgattatctgccttatttgaaagtcatatcaaaaatatcatctctgaatataagtcagcaatccagagtcagaagaggagaaggccacggtacagaaaacgtctaagaagcagcagcagttcattatctagtagtggagcacctaggtatcattacattgatgcaacattttttgttctcaaagcattttgtatgtattacctaatttgtgaaagtttatgaataatttggggagatcccaagaggtctttttttgtttgtttcctaaactcttatgcctatgtagagttagtaatcaaaagtactatttatgtgggttttactatcccagaaactttttttaaattttaatgattgaagtttcactgtcaaattatctatttcatgaattttagggcatttcttctttggccagctaatacctgaccttgatacctctttgtatcatactgtctatcataatatgttgctaacagaaaaaaaaaaatgctcgttgttacatatttttacttctagtccaaaagggaagcagaaacaaatgaagttgcagcctaaaaatgaccagaatacctcagtatctcatgccaggactagctctcctttctcatctc

SEQ ID NO: 466407 - DNA, 444 bp, Homo sapiens
tttgagtgagaatggaagaaaatggtgagaagggaggaaggtttcaagcttgtcttatagcagactcggtcacagctgtgctgtctctctccccaagctcagactgggacatgtcacttctgttcacagtccattggccagaactaaatgcacttgtccaagcagtcacaaaaaaggctgagagaccaaggggagcccacggacaatcagtgccaaggcgtgttccatggtgcttactccaggagaagccagcttccatgttgtgcagatgctcaagcagtgcttggagaggctccttgtggaaaggagccgaggcctctgctgacaaccagcaccagacaattccattttctccaactgggagctgtgaaggatcaagtcctactttcttcattgatacggcaatatcaaataaatagtcataacactcacacatggttttgg

SEQ ID NO: 466408 - DNA, 2791 bp, Homo sapiens
tcttcttgcgtgactgatcgaccctatgaggcttttgtggttaaaatataaagttcctgaaaaaacctttccaaatctgaatgggattgcagtgacatcaaagcttttcctcttcaatacctttcatctttttcagactctggcactctccccaccagcttcaagtcaattaattgaaaagtcattagaaagctcctctgctgtgaaggcccacctcatcagctccatatctgggtccttcaagaaggaacagaagggccgttggcctccacattattggtgcttcgcccacctccaccctgttctggtctcagatgtttgtcctgtggccctagacatgaaatccctagccatttctcttagaaaatgcaagccatggtcacaaggaaaacctagaaaaggcagcgtgggcacaaaccatggcacagaagcagctgaaggagcctgctttcttgttggggaacgctggaatggagatagcacctctgaatcctcccaagtggatgatctggcaaagtccaagatacagaaattattctttcaaatagaggagtgcaggaaatccaatcctgaagatctccttccagttggctagcctgtgacccagaaatcactaccatgaatcaacgtgaaagtatgccaagccaccctgaggagccacatagaaaacaggtagatttgcaccacatctgatgcttttgctaccctggacatgagaaactgcttatatataacttggattatcctatccacccctgggagataaaaaggcattagagttttgaagaagattggtctttactttctttaagaaattctatttgttgaatgaatgtgtatatgaatgtaaaaatgaatcaatgaatgcatgaaactttaagtttataataggaaattaatcttggggtcaaatgagaaattatgaagatccattcttttcatggcatcccaaaactgtcacccttcaaaacaatttgcacagcctgctcatgaaggggtacatagcattttggaaggaatcagttctaattcacctttaaatatgttttttctcttaaaaatttattgtaagatatttcagacatattgtactaggcaagcctctaagggctcccccaatgatccctgcttcctggtattcatgttgttgtgtaaatccctccacttgagtgtcggctgtacctagtgactgacttccaatgaacaaaatacagcaaaagtgatgggatgtcacttttatgctctctggaaccagactgaaattgaaatgcaagatatatatatatatatatatatcacagaatctctgtcactaaatattctcccagaggcaaaggagctgggatatttacaccctgactctcatcattaagtggatggctcttggagggtatttgaactctctcacacatctggactgccaagaacacagacatgatgcttggagctatagcagccatctcgcaatcatgaggaaaggccaagagaatttctgagtcaccaaacccagcactgttcagctgctgagccaatccctacagcctcctatctctagaccttgtgctctgtgagaaaactaaaaccccattttgtttaatgccctcctgctccgagagttcaggttttctattccttacagtggaatgcatttcaaactgatataactgatccctcagccaaatactattcccagcagatggttagggttggctgtgtacagctatgcaaactgcacactccgggagacaccattcagaatgcctttggacttgtgtagtgcaaaacctgcattaagatgcaagctgttttctctggtgctgatatcagctgcccttctacctctgagaagatcatcctgagcttcctcttggagaataaatggtgcccatttctgtaagagactgtagcagcagctggcaccctgcgccctcacgcttctgctaaacagaaacgagcttttctgtggtcagcgcatcctcacacccaccgctgctgtgaaaagctggctgtaatgccattgagtgctgggatggaagctgacactcttgtcagctgaaaacctctaaacagaaacaggaggagagccctgggcttgcagggaggggcatctgacagcttgtctctttttcatggtagtggggagggtggagggtgggatgaggccacatttttgctgagtgtctgggaccaagagatccaggaacaacgggggcagttagcaccaaagtagtacttaaaggaaaaactcagcccttcaggcaggaaggcaaggacagtgcttgttgccttccacagtttccagaaaagcctgttattcacagccactaaaggacctggccctggcctggcctggcagacactgaagagggctgtttttctgatgctaatgtgcagcctagctttcattttctttcttttttttttttttttaatgaggggcctactcatcttgaaaccttttcaaataggtctccccctccctttcttccagtctctccacccccaccctctttgtttttaagcaggaaaacttgtttcccccaaatgcatccatagagatgggaaaattaatttaaacagacatgtgtcaaccccgttcttaaaaaaaagggacaagtatgacgttacaaaattgtacttcaggaatcattatgcagaacagagcatggtggtgtcttgattcaacgttcaccttaaaagcaagggggggcagccatcccccaggggcctgttgtcagccctcttccttttcctctctctgcagcctagcttttattctgcaattcataga

SEQ ID NO: 466409 - DNA, 2225 bp, Homo sapiens
tcttcttgcgtgactgatcgaccctatgaggcttttgtggttaaaatataaagttcctgaaaaaacctttccaaatctgaatgggattgcagtgacatcaaagcttttcctcttcaatacctttcatctttttcagactctggcactctccccaccagcttcaagtcaattaattgaaaagtcattagaaagctcctctgctgtgaaggcccacctcatcagctccatatctgggtccttcaagaaggaacagaagggccgttggcctccacattattggtgcttcgcccacctccaccctgttctggtctcagatgtttgtcctgtggccctagacatgaaatccctagccatttctcttagaaaatgcaagccatggtcacaaggaaaacctagaaaaggcagcgtgggcacaaaccatggcacagaagcagctgaaggagcctgctttcttgttggggaacgctggaatggagatagcacctctgaatcctcccaagtggatgatctggcaaagtccaagatacagaaattattctttcaaatagaggagtgcaggaaatccaatcctgaagatctccttccagttggctagcctgtgacccagaaatcactaccatgaatcaacgtgaaagtatgccaagccaccctgaggagccacatagaaaacagatgctctctggaaccagactgaaattgaaatgcaagatatatatatatatatatatatcacagaatctctgtcactaaatattctcccagaggcaaaggagctgggatatttacaccctgactctcatcattaagtggatggctcttggagggtatttgaactctctcacacatctggactgccaagaacacagacatgatgcttggagctatagcagccatctcgcaatcatgaggaaaggccaagagaatttctgagtcaccaaacccagcactgttcagctgctgagccaatccctacagcctcctatctctagaccttgtgctctgtgagaaaactaaaaccccattttgtttaatgccctcctgctccgagagttcaggttttctattccttacagtggaatgcatttcaaactgatataactgatccctcagccaaatactattcccagcagatggttagggttggctgtgtacagctatgcaaactgcacactccgggagacaccattcagaatgcctttggacttgtgtagtgcaaaacctgcattaagatgcaagctgttttctctggtgctgatatcagctgcccttctacctctgagaagatcatcctgagcttcctcttggagaataaatggtgcccatttctgtaagagactgtagcagcagctggcaccctgcgccctcacgcttctgctaaacagaaacgagcttttctgtggtcagcgcatcctcacacccaccgctgctgtgaaaagctggctgtaatgccattgagtgctgggatggaagctgacactcttgtcagctgaaaacctctaaacagaaacaggaggagagccctgggcttgcagggaggggcatctgacagcttgtctctttttcatggtagtggggagggtggagggtgggatgaggccacatttttgctgagtgtctgggaccaagagatccaggaacaacgggggcagttagcaccaaagtagtacttaaaggaaaaactcagcccttcaggcaggaaggcaaggacagtgcttgttgccttccacagtttccagaaaagcctgttattcacagccactaaaggacctggccctggcctggcctggcagacactgaagagggctgtttttctgatgctaatgtgcagcctagctttcattttctttcttttttttttttttttaatgaggggcctactcatcttgaaaccttttcaaataggtctccccctccctttcttccagtctctccacccccaccctctttgtttttaagcaggaaaacttgtttcccccaaatgcatccatagagatgggaaaattaatttaaacagacatgtgtcaaccccgttcttaaaaaaaagggacaagtatgacgttacaaaattgtacttcaggaatcattatgcagaacagagcatggtggtgtcttgattcaacgttcaccttaaaagcaagggggggcagccatcccccaggggcctgttgtcagccctcttccttttcctctctctgcagcctagcttttattctgcaattcataga

SEQ ID NO: 466410 - DNA, 2871 bp, Homo sapiens
cctcctgctgagccccagagctgatacagcacagccccacagagacatcagagacatgtgcacacacggccctgggattgccgacagacacacaggcacacataggcacgtacacacaggcatacagacacaggcacagactcacactcggcccctccccactcacactcgctcacactcatgctcacactcacaccaacccccctcccccaaatctgctgcgcaccaacggttggtgcgagcggggttgagaacgggaggaaaaaagcccacgactcagcccgggaagaggggtgcggtgggggaagggcgggcgagggaaatgacagcccgcggtccccctcgagtcccggctcatgaatattaatacggcggtaattaaaatgcagggacgcagcaggatggatgcggctgcctccggagcgcgggggagcgcggagtctttgcaggcgggtgaagcccgctcctcgccggcgaaaagcggggccgggctccggggcctgggtccggggcgggcgggagtggggacatttttcgtggtcccgagcgtcccgtcccggcgtccccgcccccgccccgcggccgcctctccacgccctgccccgggccgcccgccaggccgccgtttcccggagccggccccctcccgccctcgcggccggctgatgtcatctgcacacaactttccgcttcccggcccgtctcggggccctgagtcatcgccgcccccggccccgacgctggcctgcggcgtctgtttgtgcagagcgaggccccgccggccgggcttgacgtcaggctggcagggcctggaacggccccgcatcgcggccccctgggggcaggacgacaccgctgggggccgagggcagggcacgccttcggaatccggcttcgaagccggccgcctgacctggggcaagtgctttcaactctctgaacttcggttcctcatctgccagttggcagacgctcagcaaatcttcctagactcacggggcgaattgtacagttgggtaaatcgaggcccagagatggcaaaaggaccgtccaaggtcgtacagccacccggaattacaattcttttctgccgggtcacacgctgtcatccacgtgttacctaagagagctttccagcctgtgctaagaaaactgccccacatcatctgcagtaggacgggggagttggagccctggtcaggccactctgctactgaccacagttttctcatctctaaaaaggcgcagtaacaatataattaccgtatgcagtcccccaggatacagggtcaaaggagagcacaaccatcgcagttggaagcccatggggcagcccagtgcagatgcatctgacttacgaaacttcagtgacacctgctctgtgccagacactgaagatggagcagtgaacagcactgacccagcctgtcctcctgttgcctgcaggccagacggagtctcactctgtcaccaggctggagtacagtggtgtgatctcggctcactgcaacctccgcctcccaggttcaagcgattctcctgcctcagcctctcaagtagctgagattacagacgtgtgtcaccatgccctgttaatttttgtttgtttgttttgttttttgttttgttttgtttcgttttttgttttttttttttgagacggagtcttgctctgtcgcccaggctggagtgcagtggccccgatctcggctcaccgcaagctccgcctcgcgggttcatgccattctccggcctcagcctcccgagtagctgggactacaggcatccgccaccacacccagctaattttttgtattttttttagtagagacggggtttcactgtgttagccaggatggtctcgatcccctgaccttgtgatccacccaaggcctcggcctcccaaagtgctgggattacaggcatgagccaccgtgcccggtcaatttttatattttttgtagagacagggtttcaccatgttggccaggctggtgtcgaactcccgacctcaggtgattgtcggccttggcctcccaaagtgctgggattacaggcgtgagccaccgcgcccagccggtgggcagccagttgtgttccgggaggaggaggacaccctggaaagacagtggggccagacactgaactgcctttggaagcaagtaggagcaacagcgaaggtttgctggctcagaagcaaggtctcgctgtgttaccctggctggagtgcagtggctacttacaggcatgatcatagcatactgcagcctcgaactcctggactagagcagttctcctgcctcagcctccagagcagctgggactgcagacacgcaccacagagcccagcctgagtcattttgattctgtaactggcttcctctcggcgggcaggctcacaccctccacccccagctggagatggaaggaggatgctcaccgcccattcctcatgcaggccatcgatggaaatgtcagacagtgcgagtccacgcctgaacacttctggggtccgctctgggactgacactggcagatccatcgatgccgttccattgtttgctgacttgcattgattctatgagaagtctgcagtcttttgcagcgttgttttcctatgtataattgtctcctcccaccccactcaccccagctgctttccacattctctctctttgattttcagcagtctgcccatgatgtgcctaaataggactttctttgcattcatcttggctggggctcactgaactttctgaatctgtagattaattttcttttttcaataaaccttggaatattttcagcataatttttttcctgtcttcttctctctcttttctcctctgaaatgccaattaaatatatgtt

SEQ ID NO: 466411 - DNA, 1070 bp, Homo sapiens
aattaggctaggtacgaggccggggttaatcggccgagggtgacacctgctctgtgccagacactgaagatggagcagtgaacagcactgacccagcctgtcctcctgttgcctgcaggccagaagcaaggtctcgctgtgttaccctggctggagtgcagtggctacttacaggcatgatcatagcatactgcagcctcgaactcctggactagagcagttctcctgcctcagcctccagagcagctgggactgcagacacgcaccacagagcccagcctgagtcattttgattctgtaactggcttcctctcggcgggcaggctcacaccctccacccccagctggagatggaaggaggatgctcaccgcccattcctcatgcaggccatcgatggaaatgtcagacagtgcgagtccacgcctgaacacttctggggtccgctctgggactgacactggcagatccatcggtgagctcccgcctgccacctctgggcctgcattgcggtgatagggccaagggcctgggccttcaattctccagacttgccaaaatgctcagcgcaggcctcgtcggcaactgcagacaagcagaggcagcacctgggctctgcctgtgcctggcacagtgaagcgagggtgggggcaggaatgagggtcctctccatgcaaggggggaagatagaagaacaaaatttcaccctaatgtagtgtctttagaccgtgcaatgttgtgctcctgttagtctgatatcaggggcttgcagcctggcaaaggaaaaaaaacaggctgaggcacatgatagaagacaggcagggatgccacaatcataaccatggcaaagaccaggatcagaaaggcccaccatctctgaccccaaatccctgggcagatggttccagaactcagaattttcccagttgtagaaagatggggccaggtgcagtggctcacgcctgtaatcccagcattttgggagtacaaggtgggcggatcacctgaggtcaggagttcgagaccagcctggccaacatggtgaaaccctgtctctactaaaaaaaaaaaa

SEQ ID NO: 466412 - DNA, 657 bp, Homo sapiens
tacgggcatatgtcgacccacgcgtcgcggacgcgtgggctgacactggcagatccatcggtgagctcccgcctgccacctctgggcctgcattgcggtgatagggccaagggcctgggccttcaattctccagacttgccaaaatgctcagcgcaggcctcgtcggcaactgcagacaagcagaggcagcacctgggctctgcctgtgcctggcacagtgaagcgagggtgggggcaggaatgagggtcctctccatgcaaggggggaagatagaagaacaaaatttcaccctaatgtagtgtctttagaccgtgcaatgttgtgctcctgttagtctgatatcaggggcttgcagcctggcaaaggaaaaaaaacaggctgaggcacatgatagaagacaggcagggatgccacaatcataaccatggcaaagaccaggatcagaaaggcccaccatctctgaccccaaatccctgggcagatggttccagaactcagaattttcccagttgtagaaagatggggccaggtgcagtggctcacgcctgtaatcccagcattttgggagtacaaggtgggcggatcacctgaggtcaggagttcgagaccagcctggccaacatggtgaaaccctgtctctactaaaaaaaaaaaa

SEQ ID NO: 466413 - DNA, 565 bp, Homo sapiens
gacatggtgggggcagccaggaacggtgtgccagggggaggaacagcttgagcaaaggtgcagagaggagacaggcaaagagaaccacatgtgacatggtgggacatgccggaatcttccagagaggtgggccacatgtgacatggtgggacatgccggaatcttccagagaggtgggcctctgatgcaagcagacgggtctgccctggatctgcaggcagtggacagctatgggcatgtgggagcgggagaggggaagggagcttccagctctagacacagtgagggtgcccagcagccagggacccaggctggtggtgggggagtgtcactggggcaggtgtcagggccttagctctgggacagcatgtgtgtgtgttagaatgagtgtaaaagtatgagagggagtgcgagagtgtgtgtgtatgagtgtgtatatgaatgtgagtgtgtgagtattcgtgtgttgggtctgaggggcttgtcactgtgatcggctggctcatgtgtgtcctgtgggctgccatgtgtgtagtgtttactgtcacgtcactgtgagacccgt

SEQ ID NO: 466414 - DNA, 435 bp, Homo sapiens
cctgcctcagcctcctgagtagctgggattacaggtgcccaccaccacgcccagctaatttttagagacagggtttcaccatgttgcccaggctggtctcaaactcctgagctcaggtgatccgcctgccttggcctgcgataaaattgcacagaagtaaatacacacacgtgaggatacggaaaaccggggaaacctgagcaagagcagtcagaccccggctgtgatggcgcccagtagttctgcgagatgttaccattggggaaactgagtgaaggcgggtacctgggatccctctgttttcttttttgttgttgttgttattttgagatgaagtttcaccatgttggccaggctggtctcaaactcctgacctcaggtgatccgcctgcctcggcctgcgataaaattgcacagaagtaaatacacacacgt

SEQ ID NO: 466415 - DNA, 1262 bp, Homo sapiens
gtaaaatgggctaacactgaaagaaccttgcagaatctcagcaacgtcacagaggacattgttagcacagccagcgggctcctgctgggctgagtttgtgggtaatccaagcctcggcaggtacagttcctccctcagggcccaggacacagtgagcatacaatagacattagctgctgtggtgtcttgatttcaagcccagtgcagatgcatctgacttacgaaacttcagtgacacctgctctgtgccagacactgaagatggagcagtgaacagcactgacccagcctgtcctcctgttgcctgcaggccagaagcaaggtctcgctgtgttaccctggctggagtgcagtggctacttacaggcatgatcatagcatactgcagcctcgaactcctggactagagcagttctcctgcctcagcctccagagcagctgggactgcagacacgcaccacagagcccagcctgagtcattttgattctgtaactggcttcctctcggcgggcaggctcacaccctccacccccagctggagatggaaggaggatgctcaccgcccattcctcatgcaggccatcgatggaaatgtcagacagtgcgagtccacgcctgaacacttctggggtccgctctgggactgacactggcagatccatcggtgagctcccgcctgccacctctgggcctgcattgcggtgatagggccaagggcctgggccttcaattctccagacttgccaaaatgctcagcgcaggcctcgtcggcaactgcagacaagcagaggcagcacctgggctctgcctgtgcctggcacagtgaagcgagggtgggggcaggaatgagggtcctctccatgcaaggggggaagatagaagaacaaaatttcaccctaatgtagtgtctttagaccgtgcaatgttgtgctcctgttagtctgatatcaggggcttgcagcctggcaaaggaaaaaaaacaggctgaggcacatgatagaagacaggcagggatgccacaatcataaccatggcaaagaccaggatcagaaaggcccaccatctctgaccccaaatccctgggcagatggttccagaactcagaattttcccagttgtagaaagatggggccaggtgcagtggctcacgcctgtaatcccagcattttgggagtacaaggtgggcggatcacctgaggtcaggagttcgagaccagcctggccaacatggtgaaaccctgtctctactaaaaaaaaaaaa

SEQ ID NO: 466416 - DNA, 2280 bp, Homo sapiens
cctcctgctgagccccagagctgatacagcacagccccacagagacatcagagacatgtgcacacacggccctgggattgccgacagacacacaggcacacataggcacgtacacacaggcatacagacacaggcacagactcacactcggcccctccccactcacactcgctcacactcatgctcacactcacaccaacccccctcccccaaatctgctgcgcaccaacggttggtgcgagcggggttgagaacgggaggaaaaaagcccacgactcagcccgggaagaggggtgcggtgggggaagggcgggcgagggaaatgacagcccgcggtccccctcgagtcccggctcatgaatattaatacggcggtaattaaaatgcagggacgcagcaggatggatgcggctgcctccggagcgcgggggagcgcggagtctttgcaggcgggtgaagcccgctcctcgccggcgaaaagcggggccgggctccggggcctgggtccggggcgggcgggagtggggacatttttcgtggtcccgagcgtcccgtcccggcgtccccgcccccgccccgcggccgcctctccacgccctgccccgggccgcccgccaggccgccgtttcccggagccggccccctcccgccctcgcggccggctgatgtcatctgcacacaactttccgcttcccggcccgtctcggggccctgagtcatcgccgcccccggccccgacgctggcctgcggcgtctgtttgtgcagagcgaggccccgccggccgggcttgacgtcaggctggcagggcctggaacggccccgcatcgcggccccctgggggcaggacgacaccgctgggggccgagggcagggcacgccttcggaatccggcttcgaagccggccgcctgacctggggcaagtgctttcaactctctgaacttcggttcctcatctgccagttggcagacgctcagcaaatcttcctagactcacggggcgaattgtacagttgggtaaatcgaggcccagagatggcaaaaggaccgtccaaggtcgtacagccacccggaattacaattcttttctgccgggtcacacgctgtcatccacgtgttacctaagagagctttccagcctgtgctaagaaaactgccccacatcatctgcagtaggacgggggagttggagccctggtcaggccactctgctactgaccacagttttctcatctctaaaaaggcgcagtaacaatataattaccgtatgcagtcccccaggatacagggtcaaaggagagcacaaccatcgcagttggaagcccatggggcagaagcaaggtctcgctgtgttaccctggctggagtgcagtggctacttacaggcatgatcatagcatactgcagcctcgaactcctggactagagcagttctcctgcctcagcctccagagcagctgggactgcagacacgcaccacagagcccagcctgagtcattttgattctgtaactggcttcctctcggcgggcaggctcacaccctccacccccagctggagatggaaggaggatgctcaccgcccattcctcatgcaggccatcgatggaaatgtcagacagtgcgagtccacgcctgaacacttctggggtccgctctgggactgacactggcagatccatcggtgagctcccgcctgccacctctgggcctgcattgcggtgatagggccaagggcctgggccttcaattctccagacttgccaaaatgctcagcgcaggcctcgtcggcaactgcagacaagcagaggcagcacctgggctctgcctgtgcctggcacagtgaagcgagggtgggggcaggaatgagggtcctctccatgcaaggggggaagatagaagaacaaaatttcaccctaatgtagtgtctttagaccgtgcaatgttgtgctcctgttagtctgatatcaggggcttgcagcctggcaaaggaaaaaaaacaggctgaggcacatgatagaagacaggcagggatgccacaatcataaccatggcaaagaccaggatcagaaaggcccaccatctctgaccccaaatccctgggcagatggttccagaactcagaattttcccagttgtagaaagatggggccaggtgcagtggctcacgcctgtaatcccagcattttgggagtacaaggtgggcggatcacctgaggtcaggagttcgagaccagcctggccaacatggtgaaaccctgtctctactaaaaaaaaaaaa

SEQ ID NO: 466417 - DNA, 1164 bp, Homo sapiens
tacgggcatatgtcgacccacgcgtcgcggacgcgtgggcggcccaggacacagtgagcatacaatagacattagctgctgtggtgtcttgatttcaagcccagtgcagatgcatctgacttacgaaacttcagtgacacctgctctgtgccagacactgaagatggagcagtgaacagcactgacccagcctgtcctcctgttgcctgcaggccagaagcaaggtctcgctgtgttaccctggctggagtgcagtggctacttacaggcatgatcatagcatactgcagcctcgaactcctggactagagcagttctcctgcctcagcctccagagcagctgggactgcagacacgcaccacagagcccagcctgagtcattttgattctgtaactggcttcctctcggcgggcaggctcacaccctccacccccagctggagatggaaggaggatgctcaccgcccattcctcatgcaggccatcgatggaaatgtcagacagtgcgagtccacgcctgaacacttctggggtccgctctgggactgacactggcagatccatcggtgagctcccgcctgccacctctgggcctgcattgcggtgatagggccaagggcctgggccttcaattctccagacttgccaaaatgctcagcgcaggcctcgtcggcaactgcagacaagcagaggcagcacctgggctctgcctgtgcctggcacagtgaagcgagggtgggggcaggaatgagggtcctctccatgcaaggggggaagatagaagaacaaaatttcaccctaatgtagtgtctttagaccgtgcaatgttgtgctcctgttagtctgatatcaggggcttgcagcctggcaaaggaaaaaaaacaggctgaggcacatgatagaagacaggcagggatgccacaatcataaccatggcaaagaccaggatcagaaaggcccaccatctctgaccccaaatccctgggcagatggttccagaactcagaattttcccagttgtagaaagatggggccaggtgcagtggctcacgcctgtaatcccagcattttgggagtacaaggtgggcggatcacctgaggtcaggagttcgagaccagcctggccaacatggtgaaaccctgtctctactaaaaaaaaaaaa

SEQ ID NO: 466418 - DNA, 2122 bp, Homo sapiens
gagggggtactcagagtatccgaggaggagactcctggatgctaacagagcccccagttaggagcagtccgcgagacagttggtaacagtgctggccttgcccgggcgccggaaggttccgtgaggcccagcaagtcctgacttggcacagggcccagcacacggcgcagtaacaatataattaccgtatgcagtcccccaggatacagggtcaaaggagagcacaaccatcgcagttggaagcccatggggcagggcccaggacacagtgagcatacaatagacattagctgctgtggtgtcttgatttcaagcccagtgcagatgcatctgacttacgaaacttcagtgacacctgctctgtgccagacactgaagatggagcagtgaacagcactgacccagcctgtcctcctgttgcctgcaggccagacggagtctcactctgtcaccaggctggagtacagtggtgtgatctcggctcactgcaacctccgcctcccaggttcaagcgattctcctgcctcagcctctcaagtagctgagattacagacgtgtgtcaccatgccctgttaatttttgtttgtttgttttgttttttgttttgttttgtttcgttttttgttttttttttttgagacggagtcttgctctgtcgcccaggctggagtgcagtggccccgatctcggctcaccgcaagctccgcctcgcgggttcatgccattctccggcctcagcctcccgagtagctgggactacaggcatccgccaccacacccagctaattttttgtattttttttagtagagacggggtttcactgtgttagccaggatggtctcgatcccctgaccttgtgatccacccaaggcctcggcctcccaaagtgctgggattacaggcatgagccaccgtgcccggtcaatttttatattttttgtagagacagggtttcaccatgttggccaggctggtgtcgaactcccgacctcaggtgattgtcggccttggcctcccaaagtgctgggattacaggcgtgagccaccgcgcccagccggtgggcagccagttgtgttccgggaggaggaggacaccctggaaagacagtggggccagacactgaactgcctttggaagcaagtaggagcaacagcgaaggtttgctggctcagaagcaaggtctcgctgtgttaccctggctggagtgcagtggctacttacaggcatgatcatagcatactgcagcctcgaactcctggactagagcagttctcctgcctcagcctccagagcagctgggactgcagacacgcaccacagagcccagcctgagtcattttgattctgtaactggcttcctctcggcgggcaggctcacaccctccacccccagctggagatggaaggaggatgctcaccgcccattcctcatgcaggccatcgatggaaatgtcagacagtgcgagtccacgcctgaacacttctggggtccgctctgggactgacactggcagatccatcggtgagctcccgcctgccacctctgggcctgcattgcggtgatagggccaagggcctgggccttcaattctccagacttgccaaaatgctcagcgcaggcctcgtcggcaactgcagacaagcagaggcagcacctgggctctgcctgtgcctggcacagtgaagcgagggtgggggcaggaatgagggtcctctccatgcaaggggggaagatagaagaacaaaatttcaccctaatgtagtgtctttagaccgtgcaatgttgtgctcctgttagtctgatatcaggggcttgcagcctggcaaaggaaaaaaaacaggctgaggcacatgatagaagacaggcagggatgccacaatcataaccatggcaaagaccaggatcagaaaggcccaccatctctgaccccaaatccctgggcagatggttccagaactcagaattttcccagttgtagaaagatggggccaggtgcagtggctcacgcctgtaatcccagcattttgggagtacaaggtgggcggatcacctgaggtcaggagttcgagaccagcctggccaacatggtgaaaccctgtctctactaaaaaaaaaaaa

SEQ ID NO: 466419 - DNA, 3563 bp, Homo sapiens
gatgatgtgatacatatcacatattccgtactccccaccctaacacatttaagcatatgcataaagcagacgaggaaagattctaaataggctctgaatctcagttttctcatctctacaatggggcagtgatggcatgcacctcccagggctgttctgagaatctgatgcctcccattgcactggtgagcctggcacaggcacaggtcccaccccaggccctttgaactggctgttcctttggcctggaacattcctccccagatacctcctgagagggctccctcacttccttcaaggcactgctcaaatgctacctcttcacagaggctttccctgaccaccccgtctctttcctcttcctgcatagcctctgtcacctgacattttatgtcataaattactcatttattaatttcctgctctcccacagtggcacccgagctctgtgagggcaagactttgttcggttgtgggctatgcccccaacccctcggacagtgcctgcacaggtggacatttttgttggatgaaggattttctgttaaatgtgtctggcacacacagaaaaacaaagcccagcaggtacgatggtgattattattgttactggtggcgctctattattgttattagtgtctgttgaaaaagaccctgagctataccagcccttggttctccagcctgtgaaatgggcatcctgggcactgaggcactagccttgggaagctgatagggggtccctgcaggagagacaaagaacactgcccacccccccgggggagcctgcgcccctcaccggaaagagaagcaggggggagcagagggagcttgcagccccacacgcagggctgccagaaggccatacataattcattgccaaatggggctgcgggcggctctccgcggcgtgcgctgggggctcactctgcgcctggcacttcgctgactgcgcctcacacgttgcctcattgcatcttcatggatttgcagggtgtgacccttccccctgttttacccagggggatcctgaggctcagaggatggggccaccgtgctagtcacacagcctctctgtggccaagctgggcctcgggccagcagattcggcccccagcggcccccattcactgcctctctgctgagggaaaagacgggcctggggagcgggtgggaggcacaaaggagaccccgctctgagacaggctgcagaagagggagctgggtctcagcagggctggggaaggctctggccccagccctccgcccaaccccctgccctcctctcctggaggagatgctccccaaattagccatcatgagcgctggctctgggggttgggcgttggggagcagtttgctcagctgtaaaatgggaataacagaaaccgtccctgggactatgagatcaaggtgctcaagaaaagtggtgtctgctgaggggaaaagccagtcccaaaaggttgcatactctcattctgtttatttgtttttgtttttgagacagggtctcgccctgtcacccaggctggagtacagtggcgcaatatgggctcactgcaacctccacctcctgggctcaagtgatcctcccatctcagaccctcaaggagctggggctacaggcacgtgccaccgtgtccggctaatttttgtattttatgtagagacagggtttcaccatgttgcccaggctggtctcaaactcctgagctcaggtgatccgcctgccttggcctgcgataaaattgcacagaagtaaatacacacacgtgaggatacggaaaaccggggaaacctgagcaagagcagtcagaccccggctgtgatggcgcccagtagttctgcgagatgttaccattggggaaactgagtgaaggcgggtacctgggatccctctgttttcttttttgttgttgttgttattttgagatgaagtttccctcttgttgcccaggctgggtgatccacctgcctcggcctcccaaagtgctgggattacacgcgtgagccactgtgcccagcctctctgttttatttcttctttttttttttttttttttggagacgctctgtcgcccaggctggagtgcagtggcgcgatattggctcactgcaagctccgcctcctgggttcacaccattctcctgcctcagcctcccgagtagctgggactacaggcgcccgccacctcgcccgtctaattttttgtatttttagtagaggcggggcttcaccgtgttggccaggatggtctcaatctcctgacctcgtcatccgcccgtctcggcctcccatagtgctgggattacaggcatgagccaccacgcccggctgttttatttcttataactgtacaggaatctacaatgattgtaacaaaaatttcaattaaggccactctaggcacatggcctgtggggtagccctgctcaacaagaagccgtcaaaaaaatgttttttaattaaaaaatttcttcaattaaaaagcgttatcttcctctgcccggaaagggttaagtgagtcactgcagttagctccccttcccccacaaccacctagaccaggccaggaccagcgggcaattgcctggcagctggagttttcctccactgtggactgtacttcttgcgtcactctgaatgtctccagtctttattccagaatgttctggtcctctcccacttttccaaggacaggaattccctagtggggctccagaagaggctctggaggagaacaagaaaggcccttgtcatccattggcctcaggctgggaaatctcggttccactcccagcccagcctcaatattaggttgtcagtctggagtctgagagccatgcccccacccccttagtccttcacctccaggagagttggggatactggaaagaatgttgagtgtcagagcccctctcagtggctcacgcctgaaatcccagccctttgggaggctgaggcaggtggattgcttgaggccaggagttcaagaccagcctggccaacgcgacgaagccctgactctactgaaaatacaaaaattagctgggcgtggtggcacacacctgtaatcccagcagctcgggaggctgaggcaggagaattgtttgaacctgagaggtggaggttgcagtgagctgagatcacaacactgcactcaaaaagtagttaattaatttagtttaattaaaaaagaatattgagtgtcaggcaatctgggtagaacccattgtgtttctacaggatagaatctgctgtgttctctagcggaacttccggatcaccttcaccgtatgactctagacaatccctgtccactcttcagttttagatgccccattcaaagaatgaaagaattgtcctagatgatcctttagggtcttccaggctgatgacaagggggacctggcccctctgctgctggccaaagaggactttacttcccattccgtgtggttgaacaagaattgctgggctccagtcctgcctttggcccttccctacatgtgaccttgggccctctttgcctttcagaatcaatacagtgagagagttaaca

SEQ ID NO: 466420 - DNA, 1073 bp, Homo sapiens
gacatggtgggggcagccaggaacggtgtgccagggggaggaacagcttgagcaaaggtgcagagaggagacaggcaaagagaaccacatgtgacatggtgggacatgccggaatcttccagagagaagcaaggtctcgctgtgttaccctggctggagtgcagtggctacttacaggcatgatcatagcatactgcagcctcgaactcctggactagagcagttctcctgcctcagcctccagagcagctgggactgcagacacgcaccacagagcccagcctgagtcattttgattctgtaactggcttcctctcggcgggcaggctcacaccctccacccccagctggagatggaaggaggatgctcaccgcccattcctcatgcaggccatcgatggaaatgtcagacagtgcgagtccacgcctgaacacttctggggtccgctctgggactgacactggcagatccatcggtgagctcccgcctgccacctctgggcctgcattgcggtgatagggccaagggcctgggccttcaattctccagacttgccaaaatgctcagcgcaggcctcgtcggcaactgcagacaagcagaggcagcacctgggctctgcctgtgcctggcacagtgaagcgagggtgggggcaggaatgagggtcctctccatgcaaggggggaagatagaagaacaaaatttcaccctaatgtagtgtctttagaccgtgcaatgttgtgctcctgttagtctgatatcaggggcttgcagcctggcaaaggaaaaaaaacaggctgaggcacatgatagaagacaggcagggatgccacaatcataaccatggcaaagaccaggatcagaaaggcccaccatctctgaccccaaatccctgggcagatggttccagaactcagaattttcccagttgtagaaagatggggccaggtgcagtggctcacgcctgtaatcccagcattttgggagtacaaggtgggcggatcacctgaggtcaggagttcgagaccagcctggccaacatggtgaaaccctgtctctactaaaaaaaaaaaa

SEQ ID NO: 466421 - DNA, 2258 bp, Homo sapiens
cctcctgctgagccccagagctgatacagcacagccccacagagacatcagagacatgtgcacacacggccctgggattgccgacagacacacaggcacacataggcacgtacacacaggcatacagacacaggcacagactcacactcggcccctccccactcacactcgctcacactcatgctcacactcacaccaacccccctcccccaaatctgctgcgcaccaacggttggtgcgagcggggttgagaacgggaggaaaaaagcccacgactcagcccgggaagaggggtgcggtgggggaagggcgggcgagggaaatgacagcccgcggtccccctcgagtcccggctcatgaatattaatacggcggtaattaaaatgcagggacgcagcaggatggatgcggctgcctccggagcgcgggggagcgcggagtctttgcaggcgggtgaagcccgctcctcgccggcgaaaagcggggccgggctccggggcctgggtccggggcgggcgggagtggggacatttttcgtggtcccgagcgtcccgtcccggcgtccccgcccccgccccgcggccgcctctccacgccctgccccgggccgcccgccaggccgccgtttcccggagccggccccctcccgccctcgcggccggctgatgtcatctgcacacaactttccgcttcccggcccgtctcggggccctgagtcatcgccgcccccggccccgacgctggcctgcggcgtctgtttgtgcagagcgaggccccgccggccgggcttgacgtcaggctggcagggcctggaacggccccgcatcgcggccccctgggggcaggacgacaccgctgggggccgagggcagggcacgccttcggaatccggcttcgaagccggccgcctgacctggggcaagtgctttcaactctctgaacttcggttcctcatctgccagttggcagacgctcagcaaatcttcctagactcacggggcgaattgtacagttgggtaaatcgaggcccagagatggcaaaaggaccgtccaaggtcgtacagccacccggaattacaattcttttctgccgggtcacacgctgtcatccacgtgttacctaagagagctttccagcctgtgctaagaaaactgccccacatcatctgcagtaggacgggggagttggagccctggtcaggccactctgctactgaccacagttttctcatctctaaaaaggcgcagtaacaatataattaccgtatgcagtcccccaggatacagggtcaaaggagagcacaaccatcgcagttggaagcccatggggcagggcccaggacacagtgagcatacaatagacattagctgctgtggtgtcttgatttcaagcccagtgcagatgcatctgacttacgaaacttcagtgacacctgctctgtgccagacactgaagatggagcagtgaacagcactgacccagcctgtcctcctgttgcctgcaggccagaagcaaggtctcgctgtgttaccctggctggagtgcagtggctacttacaggcatgatcatagcatactgcagcctcgaactcctggactagagcagttctcctgcctcagcctccagagcagctgggactgcagacacgcaccacagagcccagcctgagtcattttgattctgtaactggcttcctctcggcgggcaggctcacaccctccacccccagctggagatggaaggaggatgctcaccgcccattcctcatgcaggccatcgatggaaatgtcagacagtgcgagtccacgcctgaacacttctggggtccgctctgggactgacactggcagatccatcggtgagctcccgcctgccacctctgggcctgcattgcggtgatagggccaagggcctgggccttcaattctccagacttgccaaaatgctcagcgcaggcctcgtcggcaactgcagacaagcagaggcagcacctgggctctgcctgtgcctggcacagtgaagcgagggtgggggcaggaatgagggtcctctccatgcaaggggggaagatagaagaacaaaatttcaccctaatgtagtgtctttagaccgtgaaaaaaaaaaaaaaaaaaaaaaaacccggggttttttcggggcgggaaaaagggtataaagggcctggcttagctgtttctgccccacttcttgtgcacagggaaatcggcggcccaaagggggggataataaacccggaca

SEQ ID NO: 466422 - DNA, 2486 bp, Homo sapiens
gatgatgtgatacatatcacatattccgtactccccaccctaacacatttaagcatatgcataaagcagacgaggaaagattctaaataggctctgaatctcagttttctcatctctacaatggggcagtgatggcatgcacctcccagggctgttctgagaatctgatgcctcccattgcactggtgagcctggcacaggcacaggtcccaccccaggccctttgaactggctgttcctttggcctggaacattcctccccagatacctcctgagagggctccctcacttccttcaaggcactgctcaaatgctacctcttcacagaggctttccctgaccaccccgtctctttcctcttcctgcatagcctctgtcacctgacattttatgtcataaattactcatttattaatttcctgctctcccacagtggcacccgagctctgtgagggcaagactttgttcggttgtgggctatgcccccaacccctcggacagtgcctgcacaggtggacatttttgttggatgaaggattttctgttaaatgtgtctggcacacacagaaaaacaaagcccagcaggtacgatggtgattattattgttactggtggcgctctattattgttattagtgtctgttgaaaaagaccctgagctataccagcccttggttctccagcctgtgaaatgggcatcctgggcactgaggcactagccttgggaagctgatagggggtccctgcaggagagacaaagaacactgcccacccccccgggggagcctgcgcccctcaccggaaagagaagcaggggggagcagagggagcttgcagccccacacgcagggctgccagaaggccatacataattcattgccaaatggggctgcgggcggctctccgcggcgtgcgctgggggctcactctgcgcctggcacttcgctgactgcgcctcacacgttgcctcattgcatcttcatggatttgcagggtgtgacccttccccctgttttacccagggggatcctgaggctcagaggatggggccaccgtgctagtcacacagcctctctgtggccaagctgggcctcgggccagcagattcggcccccagcggcccccattcactgcctctctgctgagggaaaagacgggcctggggagcgggtgggaggcacaaaggagaccccgctctgagacaggctgcagaagagggagctgggtctcagcagggctggggaaggctctggccccagccctccgcccaaccccctgccctcctctcctggaggagatgctccccaaattagccatcatgagcgctggctctgggggttgggcgttggggagcagtttgctcagctgtaaaatgggaataacagaaaccgtccctgggactatgagatcaaggtgctcaagaaaagtggtgtctgctgaggggaaaagccagtcccaaaaggttgcatactctcattctgtttatttgtttttgtttttgagacagggtctcgccctgtcacccaggctggagtacagtggcgcaatatgggctcactgcaacctccacctcctgggctcaagtgatcctcccatctcagaccctcaaggagctggggctacaggcacgtgccaccgtgtccggctaatttttgtattttatgtagagacagggtttcaccatgttgcccaggctggtctcaaactcctgagctcaggtgatccgcctgccttggcctgcgataaaattgcacagaagtaaatacacacacgtgaggatacggaaaaccggggaaacctgagcaagagcagtcagaccccggctgtgatggcgcccagtagttctgcgagatgttaccattggggaaactgagtgaaggcgggtacctgggatccctctgttttcttttttgttgttgttgttattttgagatgaagtttccctcttgttgcccaggctgggtgatccacctgcctcggcctcccaaagtgctgggattacacgcgtgagccactgtgcccagcctctctgttttatttcttctttttttttttttttttttggagacgctctgtcgcccaggctggagtgcagtggcgcgatattggctcactgcaagctccgcctcctgggttcacaccattctcctgcctcagcctcccgagtagctgggactacaggcgcccgccacctcgcccgtctaattttttgtatttttagtagaggcggggcttcaccgtgttggccaggatggtctcaatctcctgacctcgtcatccgcccgtctcggcctcccatagtgctgggattacaggcatgagccaccacgcccggctgttttatttcttataactgtacaggaatctacaatgattgtaacaaaaatttcaattaaggccactctaggcacatggcctgtggggtagccctgctcaacaagaagccgtcaaaaaaatgttttttaattaaaaaatttcttcaatta

SEQ ID NO: 466423 - DNA, 1607 bp, Homo sapiens
  misc_feature (1579)..(1579): n is a, c, g, or t
  misc_feature (1600)..(1600): n is a, c, g, or t
  misc_feature (1603)..(1603): n is a, c, g, or t
gatgatgtgatacatatcacatattccgtactccccaccctaacacatttaagcatatgcataaagcagacgaggaaagattctaaataggctctgaatctcagttttctcatctctacaatggggcagtgatggcatgcacctcccagggctgttctgagaatctgatgcctcccattgcactggtgagcctggcacaggcacaggtcccaccccaggccctttgaactggctgttcctttggcctggaacattcctccccagatacctcctgagagggctccctcacttccttcaaggcactgctcaaatgctacctcttcacagaggctttccctgaccaccccgtctctttcctcttcctgcatagcctctgtcacctgacattttatgtcataaattactcatttattaatttcctgctctcccacagtggcacccgagctctgtgagggcaagactttgttcggttgtgggctatgcccccaacccctcggacagtgcctgcacaggtggacatttttgttggatgaaggattttctgttaaatgtgtctggcacacacagaaaaacaaagcccagcaggtacgatggtgattattattgttactggtggcgctctattattgttattagtgtctgttgaaaaagaccctgagctataccagcccttggttctccagcctgtgaaatgggcatcctgggcactgaggcactagccttgggaagctgatagggggtccctgcaggagagacaaagaacactgcccacccccccgggggagcctgcgcccctcaccggaaagagaagcaggggggagcagagggagcttgcagccccacacgcagggctgccagaaggccatacataattcattgccaaatggggctgcgggcggctctccgcggcgtgcgctgggggctcactctgcgcctggcacttcgctgactgcgcctcacacgttgcctcattgcatcttcatggatttgcagggtgtgacccttccccctgttttacccagggggatcctgaggctcagaggatggggccaccgtgctagtcacacagcctctctgtggccaagctgggcctcgggccagcagattcggcccccagcggcccccattcactgcctctctgctgagggaaaagacgggcctggggagcgggtgggaggcacaaaggagaccccgctctgagacaggctgcagaagagggagctgggtctcagcagggctggggaaggctctggccccagccctccgcccaaccccctgccctcctctcctggaggagatgctccccaaattagccatcatgagcgctggctctgggggttgggcgttggggagcagtttgctcagctgtaaaatgggaataacagaaaccgtccctgggactatgagatcaaggtgctcaagaaaagtggtgtctgctgaggggaaaagccagtcccaaaaggttgcatactctcattctgtttatttgtttttgtttttgagacagggtctcgccctgtcacccaggctggagtacagtgagccaagatcgcgccactacactccagtccgggcgacngagcaagagtccattcccccnccnccaa

SEQ ID NO: 466424 - DNA, 3023 bp, Homo sapiens
cctcctgctgagccccagagctgatacagcacagccccacagagacatcagagacatgtgcacacacggccctgggattgccgacagacacacaggcacacataggcacgtacacacaggcatacagacacaggcacagactcacactcggcccctccccactcacactcgctcacactcatgctcacactcacaccaacccccctcccccaaatctgctgcgcaccaacggttggtgcgagcggggttgagaacgggaggaaaaaagcccacgactcagcccgggaagaggggtgcggtgggggaagggcgggcgagggaaatgacagcccgcggtccccctcgagtcccggctcatgaatattaatacggcggtaattaaaatgcagggacgcagcaggatggatgcggctgcctccggagcgcgggggagcgcggagtctttgcaggcgggtgaagcccgctcctcgccggcgaaaagcggggccgggctccggggcctgggtccggggcgggcgggagtggggacatttttcgtggtcccgagcgtcccgtcccggcgtccccgcccccgccccgcggccgcctctccacgccctgccccgggccgcccgccaggccgccgtttcccggagccggccccctcccgccctcgcggccggctgatgtcatctgcacacaactttccgcttcccggcccgtctcggggccctgagtcatcgccgcccccggccccgacgctggcctgcggcgtctgtttgtgcagagcgaggccccgccggccgggcttgacgtcaggctggcagggcctggaacggccccgcatcgcggccccctgggggcaggacgacaccgctgggggccgagggcagggcacgccttcggaatccggcttcgaagccggccgcctgacctggggcaagtgctttcaactctctgaacttcggttcctcatctgccagttggcagacgctcagcaaatcttcctagactcacggggcgaattgtacagttgggtaaatcgaggcccagagatggcaaaaggaccgtccaaggtcgtacagccacccggaattacaattcttttctgccgggtcacacgctgtcatccacgtgttacctaagagagctttccagcctgtgctaagaaaactgccccacatcatctgcagtaggacgggggagttggagccctggtcaggccactctgctactgaccacagttttctcatctctaaaaaggcgcagtaacaatataattaccgtatgcagtcccccaggatacagggtcaaaggagagcacaaccatcgcagttggaagcccatggggcagcccagtgcagatgcatctgacttacgaaacttcagtgacacctgctctgtgccagacactgaagatggagcagtgaacagcactgacccagcctgtcctcctgttgcctgcaggccagacggagtctcactctgtcaccaggctggagtacagtggtgtgatctcggctcactgcaacctccgcctcccaggttcaagcgattctcctgcctcagcctctcaagtagctgagattacagacgtgtgtcaccatgccctgttaatttttgtttgtttgttttgttttttgttttgttttgtttcgttttttgttttttttttttgagacggagtcttgctctgtcgcccaggctggagtgcagtggccccgatctcggctcaccgcaagctccgcctcgcgggttcatgccattctccggcctcagcctcccgagtagctgggactacaggcatccgccaccacacccagctaattttttgtattttttttagtagagacggggtttcactgtgttagccaggatggtctcgatcccctgaccttgtgatccacccaaggcctcggcctcccaaagtgctgggattacaggcatgagccaccgtgcccggtcaatttttatattttttgtagagacagggtttcaccatgttggccaggctggtgtcgaactcccgacctcaggtgattgtcggccttggcctcccaaagtgctgggattacaggcgtgagccaccgcgcccagccggtgggcagccagttgtgttccgggaggaggaggacaccctggaaagacagtggggccagacactgaactgcctttggaagcaagtaggagcaacagcgaaggtttgctggctcagaagcaaggtctcgctgtgttaccctggctggagtgcagtggctacttacaggcatgatcatagcatactgcagcctcgaactcctggactagagcagttctcctgcctcagcctccagagcagctgggactgcagacacgcaccacagagcccagcctgagtcattttgattctgtaactggcttcctctcggcgggcaggctcacaccctccacccccagctggagatggaaggaggatgctcaccgcccattcctcatgcaggccatcgatggaaatgtcagacagtgcgagtccacgcctgaacacttctggggtccgctctgggactgacactggcagatccatcgtggcacccgagctctgtgagggcaagactttgttcggttgtgggctatgcccccaacccctcggacagtgcctgcacaggtggacatttttgttggatgaaggattttctgttaaatgtgtctggcacacacagaaaaacaaagcccagcagatgccgttccattgtttgctgacttgcattgattctatgagaagtctgcagtcttttgcagcgttgttttcctatgtataattgtctcctcccaccccactcaccccagctgctttccacattctctctctttgattttcagcagtctgcccatgatgtgcctaaataggactttctttgcattcatcttggctggggctcactgaactttctgaatctgtagattaattttcttttttcaataaaccttggaatattttcagcataatttttttcctgtcttcttctctctcttttctcctctgaaatgccaattaaatatatgtt

SEQ ID NO: 466425 - DNA, 552 bp, Homo sapiens
  misc_feature (34)..(34): n is a, c, g, or t
  misc_feature (41)..(41): n is a, c, g, or t
cgaaaaaaaaatttggttcctttaccaaaagggncccgggnccaaaaggggggcctcgtcggcaactgcagacaagcagaggcagcacctgggctctgcctgtgcctggcacagtgaagcgagggtgggggcaggaatgagggtcctctccatgcaaggggggaagatagaagaacaaaatttcaccctaatgtagtgtctttagaccgtgcaatgttgtgctcctgttagtctgatatcaggggcttgcagcctggcaaaggaaaaaaaacaggctgaggcacatgatagaagacaggcagggatgccacaatcataaccatggcaaagaccaggatcagaaaggcccaccatctctgaccccaaatccctgggcagatggttccagaactcagaattttcccagttgtagaaagatggggccaggtgcagtggctcacgcctgtaatcccagcattttgggagtacaaggtgggcggatcacctgaggtcaggagttcgagaccagcctggccaacatggtgaaaccctgtctctactaaaaaaaaaaaa

SEQ ID NO: 466426 - DNA, 1982 bp, Homo sapiens
ctacgaattcgaggtttctcctgcctcagcctctcaagcagcaggtgcaagccaccgtgtccggctaatttttgtattttatgtagagacagggtttcaccatgttgcccaggctggtctcaaactcctgagctcaggtgatccgcctgccttggcctgcgataaaattgcacagaagtaaatacacacacgtgaggatacggaaaaccggggaaacctgagcaagagcagtcagaccccggctgtgatggcgcccagtagttctgcgagatgttaccattggggaaactgagtgaaggcgggtacctgggatccctctgttttcttttttgttgttgttgttattttgagatgaagtttccctcttgttgcccaggctgggtgatccacctgcctcggcctcccaaagtgctgggattacacgcgtgagccactgtgcccagcctctctgttttatttcttctttttttttttttttttttggagacgctctgtcgcccaggctggagtgcagtggcgcgatattggctcactgcaagctccgcctcctgggttcacaccattctcctgcctcagcctcccgagtagctgggactacaggcgcccgccacctcgcccgtctaattttttgtatttttagtagaggcggggcttcaccgtgttggccaggatggtctcaatctcctgacctcgtcatccgcccgtctcggcctcccatagtgctgggattacaggcatgagccaccacgcccggctgttttatttcttataactgtacaggaatctacaatgattgtaacaaaaatttcaattaaggccactctaggcacatggcctgtggggtagccctgctcaacaagaagccgtcaaaaaaatgttttttaattaaaaaatttcttcaattaaaaagcgttatcttcctctgcccggaaagggttaagtgagtcactgcagttagctccccttcccccacaaccacctagaccaggccaggaccagcgggcaattgcctggcagctggagttttcctccactgtggactgtacttcttgcgtcactctgaatgtctccagtctttattccagaatgttctggtcctctcccacttttccaaggacaggaattccctagtggggctccagaagaggctctggaggagaacaagaaaggcccttgtcatccattggcctcaggctgggaaatctcggttccactcccagcccagcctcaatattaggttgtcagtctggagtctgagagccatgcccccacccccttagtccttcacctccaggagagttggggatactggaaagaatgttgagtgtcagagcccctctcagtggctcacgcctgaaatcccagccctttgggaggctgaggcaggtggattgcttgaggccaggagttcaagaccagcctggccaacgcgacgaagccctgactctactgaaaatacaaaaattagctgggcgtggtggcacacacctgtaatcccagcagctcgggaggctgaggcaggagaattgtttgaacctgagaggtggaggttgcagtgagctgagatcacaacactgcactcaaaaagtagttaattaatttagtttaattaaaaaagaatattgagtgtcaggcaatctgggtagaacccattgtgtttctacaggatagaatctgctgtgttctctagcggaacttccggatcaccttcaccgtatgactctagacaatccctgtccactcttcagttttagatgccccattcaaagaatgaaagaattgtcctagatgatcctttagggtcttccaggctgatgacaagggggacctggcccctctgctgctggccaaagaggactttacttcccattccgtgtggttgaacaagaattgctgggctccagtcctgcctttggcccttccctacatgtgaccttgggccctctttgcctttcagaatcaatacagtgagagagttaaca

SEQ ID NO: 466427 - DNA, 259 bp, Homo sapiens
cgagctcggtacccctctctccacactggggcaggtgtcagggccttagctctgggacagcatgtgtgtgtgttagaatgagtgtaaaagtatgagagggagtgcgagagtgtgtgtgtatgagtgtgtatatgaatgtgagtgtgtgagtattcgtgtgttgggtctgaggggcttgtcactgtgatcggctggctcatgtgtgtcctgtgggctgccatgtgtgtagtgtttactgtcacgtcactgtgagacccgt

SEQ ID NO: 466428 - DNA, 136 bp, Homo sapiens
gcaacagcgaaggtttgctggctcaggtaggaggattaattggaacgattaagctggaagctctgtaagacggattagaggggcaaacttggaggcaggaaggctgggaggagaccactgctgagtgatttttctt

SEQ ID NO: 466429 - DNA, 401 bp, Homo sapiens
gccttggcccagctggggctagatggcaagaggtggttcagcattggagctccattgcctgggttcaaatcggggtctgtcactggccagctgtgagcctaagtctctgaacttctctgtgccttagtgtcctcattctgtagagtggagatagtaatcattcctatttcaaagattgttgtgagaaataagtgaactaatacatgtcatatgcttaaaagcagggcccaggacacagtgagcatacaatagacattagctgctgtggtgtcttgatttcaagcccagtgcagatgcatctgacttacgaaacttcagtgacacctgctctgtgccagacactgaagatggagcagtgaacagcactgacccagcctgtcctcctgttgcctgcaggccag

SEQ ID NO: 466430 - DNA, 2457 bp, Homo sapiens
cctcctgctgagccccagagctgatacagcacagccccacagagacatcagagacatgtgcacacacggccctgggattgccgacagacacacaggcacacataggcacgtacacacaggcatacagacacaggcacagactcacactcggcccctccccactcacactcgctcacactcatgctcacactcacaccaacccccctcccccaaatctgctgcgcaccaacggttggtgcgagcggggttgagaacgggaggaaaaaagcccacgactcagcccgggaagaggggtgcggtgggggaagggcgggcgagggaaatgacagcccgcggtccccctcgagtcccggctcatgaatattaatacggcggtaattaaaatgcagggacgcagcaggatggatgcggctgcctccggagcgcgggggagcgcggagtctttgcaggcgggtgaagcccgctcctcgccggcgaaaagcggggccgggctccggggcctgggtccggggcgggcgggagtggggacatttttcgtggtcccgagcgtcccgtcccggcgtccccgcccccgccccgcggccgcctctccacgccctgccccgggccgcccgccaggccgccgtttcccggagccggccccctcccgccctcgcggccggctgatgtcatctgcacacaactttccgcttcccggcccgtctcggggccctgagtcatcgccgcccccggccccgacgctggcctgcggcgtctgtttgtgcagagcgaggccccgccggccgggcttgacgtcaggctggcagggcctggaacggccccgcatcgcggccccctgggggcaggacgacaccgctgggggccgagggcagggcacgccttcggaatccggcttcgaagccggccgcctgacctggggcaagtgctttcaactctctgaacttcggttcctcatctgccagttggcagacgctcagcaaatcttcctagactcacggggcgaattgtacagttgggtaaatcgaggcccagagatggcaaaaggaccgtccaaggtcgtacagccacccggaattacaattcttttctgccgggtcacacgctgtcatccacgtgttacctaagagagctttccagcctgtgctaagaaaactgccccacatcatctgcagtaggacgggggagttggagccctggtcaggccactctgctactgaccacagttttctcatctctaaaaaggcgcagtaacaatataattaccgtatgcagtcccccaggatacagggtcaaaggagagcacaaccatcgcagttggaagcccatggggcagggcccaggacacagtgagcatacaatagacattagctgctgtggtgtcttgatttcaagcccagtgcagatgcatctgacttacgaaacttcagtgacacctgctctgtgccagacactgaagatggagcagtgaacagcactgacccagcctgtcctcctgttgcctgcaggccagaagcaaggtctcgctgtgttaccctggctggagtgcagtggctacttacaggcatgatcatagcatactgcagcctcgaactcctggactagagcagttctcctgcctcagcctccagagcagctgggactgcagacacgcaccacagagcccagcctgagtcattttgattctgtaactggcttcctctcggcgggcaggctcacaccctccacccccagctggagatggaaggaggatgctcaccgcccattcctcatgcaggccatcgatggaaatgtcagacagtgcgagtccacgcctgaacacttctggggtccgctctgggactgacactggcagatccatcggtgagctcccgcctgccacctctgggcctgcattgcggtgatagggccaagggcctgggccttcaattctccagacttgccaaaatgctcagcgcaggcctcgtcggcaactgcagacaagcagaggcagcacctgggctctgcctgtgcctggcacagtgaagcgagggtgggggcaggaatgagggtcctctccatgcaaggggggaagatagaagaacaaaatttcaccctaatgtagtgtctttagaccgtgcaatgttgtgctcctgttagtctgatatcaggggcttgcagcctggcaaaggaaaaaaaacaggctgaggcacatgatagaagacaggcagggatgccacaatcataaccatggcaaagaccaggatcagaaaggcccaccatctctgaccccaaatccctgggcagatggttccagaactcagaattttcccagttgtagaaagatggggccaggtgcagtggctcacgcctgtaatcccagcattttgggagtacaaggtgggcggatcacctgaggtcaggagttcgagaccagcctggccaacatggtgaaaccctgtctctactaaaaaaaaaaaa

SEQ ID NO: 466431 - DNA, 3200 bp, Homo sapiens
cctcctgctgagccccagagctgatacagcacagccccacagagacatcagagacatgtgcacacacggccctgggattgccgacagacacacaggcacacataggcacgtacacacaggcatacagacacaggcacagactcacactcggcccctccccactcacactcgctcacactcatgctcacactcacaccaacccccctcccccaaatctgctgcgcaccaacggttggtgcgagcggggttgagaacgggaggaaaaaagcccacgactcagcccgggaagaggggtgcggtgggggaagggcgggcgagggaaatgacagcccgcggtccccctcgagtcccggctcatgaatattaatacggcggtaattaaaatgcagggacgcagcaggatggatgcggctgcctccggagcgcgggggagcgcggagtctttgcaggcgggtgaagcccgctcctcgccggcgaaaagcggggccgggctccggggcctgggtccggggcgggcgggagtggggacatttttcgtggtcccgagcgtcccgtcccggcgtccccgcccccgccccgcggccgcctctccacgccctgccccgggccgcccgccaggccgccgtttcccggagccggccccctcccgccctcgcggccggctgatgtcatctgcacacaactttccgcttcccggcccgtctcggggccctgagtcatcgccgcccccggccccgacgctggcctgcggcgtctgtttgtgcagagcgaggccccgccggccgggcttgacgtcaggctggcagggcctggaacggccccgcatcgcggccccctgggggcaggacgacaccgctgggggccgagggcagggcacgccttcggaatccggcttcgaagccggccgcctgacctggggcaagtgctttcaactctctgaacttcggttcctcatctgccagttggcagacgctcagcaaatcttcctagactcacggggcgaattgtacagttgggtaaatcgaggcccagagatggcaaaaggaccgtccaaggtcgtacagccacccggaattacaattcttttctgccgggtcacacgctgtcatccacgtgttacctaagagagctttccagcctgtgctaagaaaactgccccacatcatctgcagtaggacgggggagttggagccctggtcaggccactctgctactgaccacagttttctcatctctaaaaaggcgcagtaacaatataattaccgtatgcagtcccccaggatacagggtcaaaggagagcacaaccatcgcagttggaagcccatggggcagggcccaggacacagtgagcatacaatagacattagctgctgtggtgtcttgatttcaagcccagtgcagatgcatctgacttacgaaacttcagtgacacctgctctgtgccagacactgaagatggagcagtgaacagcactgacccagcctgtcctcctgttgcctgcaggccagacggagtctcactctgtcaccaggctggagtacagtggtgtgatctcggctcactgcaacctccgcctcccaggttcaagcgattctcctgcctcagcctctcaagtagctgagattacagacgtgtgtcaccatgccctgttaatttttgtttgtttgttttgttttttgttttgttttgtttcgttttttgttttttttttttgagacggagtcttgctctgtcgcccaggctggagtgcagtggccccgatctcggctcaccgcaagctccgcctcgcgggttcatgccattctccggcctcagcctcccgagtagctgggactacaggcatccgccaccacacccagctaattttttgtattttttttagtagagacggggtttcactgtgttagccaggatggtctcgatcccctgaccttgtgatccacccaaggcctcggcctcccaaagtgctgggattacaggcatgagccaccgtgcccggtcaatttttatattttttgtagagacagggtttcaccatgttggccaggctggtgtcgaactcccgacctcaggtgattgtcggccttggcctcccaaagtgctgggattacaggcgtgagccaccgcgcccagccggtgggcagccagttgtgttccgggaggaggaggacaccctggaaagacagtggggccagacactgaactgcctttggaagcaagtaggagcaacagcgaaggtttgctggctcagaagcaaggtctcgctgtgttaccctggctggagtgcagtggctacttacaggcatgatcatagcatactgcagcctcgaactcctggactagagcagttctcctgcctcagcctccagagcagctgggactgcagacacgcaccacagagcccagcctgagtcattttgattctgtaactggcttcctctcggcgggcaggctcacaccctccacccccagctggagatggaaggaggatgctcaccgcccattcctcatgcaggccatcgatggaaatgtcagacagtgcgagtccacgcctgaacacttctggggtccgctctgggactgacactggcagatccatcggtgagctcccgcctgccacctctgggcctgcattgcggtgatagggccaagggcctgggccttcaattctccagacttgccaaaatgctcagcgcaggcctcgtcggcaactgcagacaagcagaggcagcacctgggctctgcctgtgcctggcacagtgaagcgagggtgggggcaggaatgagggtcctctccatgcaaggggggaagatagaagaacaaaatttcaccctaatgtagtgtctttagaccgtgcaatgttgtgctcctgttagtctgatatcaggggcttgcagcctggcaaaggaaaaaaaacaggctgaggcacatgatagaagacaggcagggatgccacaatcataaccatggcaaagaccaggatcagaaaggcccaccatctctgaccccaaatccctgggcagatggttccagaactcagaattttcccagttgtagaaagatggggccaggtgcagtggctcacgcctgtaatcccagcattttgggagtacaaggtgggcggatcacctgaggtcaggagttcgagaccagcctggccaacatggtgaaaccctgtctctactaaaaaaaaaaaa

SEQ ID NO: 466432 - DNA, 1218 bp, Homo sapiens
tcacacagccggccggccccaagtgacaggggccgaagacgtagttgtctgacctgtgctctaaccactgtgctctctggcctcaagccggctcccacactacccttccctgttctccgtggccctccagcgcctgaaagccgcttgggggccgcggaggcaggtggcatggccagggcagagtccgcggggcggaaagggttaacgggctccgccgcattgggctgtccttcaaggggggagccagccaatgagcgcgcgccgcgatgagaagcaaggtctcgctgtgttaccctggctggagtgcagtggctacttacaggcatgatcatagcatactgcagcctcgaactcctggactagagcagttctcctgcctcagcctccagagcagctgggactgcagacacgcaccacagagcccagcctgagtcattttgattctgtaactggcttcctctcggcgggcaggctcacaccctccacccccagctggagatggaaggaggatgctcaccgcccattcctcatgcaggccatcgatggaaatgtcagacagtgcgagtccacgcctgaacacttctggggtccgctctgggactgacactggcagatccatcggtgagctcccgcctgccacctctgggcctgcattgcggtgatagggccaagggcctgggccttcaattctccagacttgccaaaatgctcagcgcaggcctcgtcggcaactgcagacaagcagaggcagcacctgggctctgcctgtgcctggcacagtgaagcgagggtgggggcaggaatgagggtcctctccatgcaaggggggaagatagaagaacaaaatttcaccctaatgtagtgtctttagaccgtgcaatgttgtgctcctgttagtctgatatcaggggcttgcagcctggcaaaggaaaaaaaacaggctgaggcacatgatagaagacaggcagggatgccacaatcataaccatggcaaagaccaggatcagaaaggcccaccatctctgaccccaaatccctgggcagatggttccagaactcagaattttcccagttgtagaaagatggggccaggtgcagtggctcacgcctgtaatcccagcattttgggagtacaaggtgggcggatcacctgaggtcaggagttcgagaccagcctggccaacatggtgaaaccctgtctctactaaaaaaaaaaaa

SEQ ID NO: 466433 - DNA, 3333 bp, Homo sapiens
cccagaaagttgattatttttaacccaggaagaagaaaggaaggaggcgagggagaaggactcagagaaaagaggagaggaaaagagaggagaggagaggctttccctgaccaccccgtctctttcctcttcctgcatagcctctgtcacctgacattttatgtcataaattactcatttattaatttcctgctctcccacagtggcacccgagctctgtgagggcaagactttgttcggttgtgggctatgcccccaacccctcggacagtgcctgcacaggtggacatttttgttggatgaaggattttctgttaaatgtgtctggcacacacagaaaaacaaagcccagcaggtacgatggtgattattattgttactggtggcgctctattattgttattagtgtctgttgaaaaagaccctgagctataccagcccttggttctccagcctgtgaaatgggcatcctgggcactgaggcactagccttgggaagctgatagggggtccctgcaggagagacaaagaacactgcccacccccccgggggagcctgcgcccctcaccggaaagagaagcaggggggagcagagggagcttgcagccccacacgcagggctgccagaaggccatacataattcattgccaaatggggctgcgggcggctctccgcggcgtgcgctgggggctcactctgcgcctggcacttcgctgactgcgcctcacacgttgcctcattgcatcttcatggatttgcagggtgtgacccttccccctgttttacccagggggatcctgaggctcagaggatggggccaccgtgctagtcacacagcctctctgtggccaagctgggcctcgggccagcagattcggcccccagcggcccccattcactgcctctctgctgagggaaaagacgggcctggggagcgggtgggaggcacaaaggagaccccgctctgagacaggctgcagaagagggagctgggtctcagcagggctggggaaggctctggccccagccctccgcccaaccccctgccctcctctcctggaggagatgctccccaaattagccatcatgagcgctggctctgggggttgggcgttggggagcagtttgctcagctgtaaaatgggaataacagaaaccgtccctgggactatgagatcaaggtgctcaagaaaagtggtgtctgctgaggggaaaagccagtcccaaaaggttgcatactctcattctgtttatttgtttttgtttttgagacagggtctcgccctgtcacccaggctggagtacagtggcgcaatatgggctcactgcaacctccacctcctgggctcaagtgatcctcccatctcagaccctcaaggagctggggctacaggcacgtgccaccgtgtccggctaatttttgtattttatgtagagacagggtttcaccatgttgcccaggctggtctcaaactcctgagctcaggtgatccgcctgccttggcctgcgataaaattgcacagaagtaaatacacacacgtgaggatacggaaaaccggggaaacctgagcaagagcagtcagaccccggctgtgatggcgcccagtagttctgcgagatgttaccattggggaaactgagtgaaggcgggtacctgggatccctctgttttcttttttgttgttgttgttattttgagatgaagtttccctcttgttgcccaggctgggtgatccacctgcctcggcctcccaaagtgctgggattacacgcgtgagccactgtgcccagcctctctgttttatttcttctttttttttttttttttttggagacgctctgtcgcccaggctggagtgcagtggcgcgatattggctcactgcaagctccgcctcctgggttcacaccattctcctgcctcagcctcccgagtagctgggactacaggcgcccgccacctcgcccgtctaattttttgtatttttagtagaggcggggcttcaccgtgttggccaggatggtctcaatctcctgacctcgtcatccgcccgtctcggcctcccatagtgctgggattacaggcatgagccaccacgcccggctgttttatttcttataactgtacaggaatctacaatgattgtaacaaaaatttcaattaaggccactctaggcacatggcctgtggggtagccctgctcaacaagaagccgtcaaaaaaatgttttttaattaaaaaatttcttcaattaaaaagcgttatcttcctctgcccggaaagggttaagtgagtcactgcagttagctccccttcccccacaaccacctagaccaggccaggaccagcgggcaattgcctggcagctggagttttcctccactgtggactgtacttcttgcgtcactctgaatgtctccagtctttattccagaatgttctggtcctctcccacttttccaaggacaggaattccctagtggggctccagaagaggctctggaggagaacaagaaaggcccttgtcatccattggcctcaggctgggaaatctcggttccactcccagcccagcctcaatattaggttgtcagtctggagtctgagagccatgcccccacccccttagtccttcacctccaggagagttggggatactggaaagaatgttgagtgtcagagcccctctcagtggctcacgcctgaaatcccagccctttgggaggctgaggcaggtggattgcttgaggccaggagttcaagaccagcctggccaacgcgacgaagccctgactctactgaaaatacaaaaattagctgggcgtggtggcacacacctgtaatcccagcagctcgggaggctgaggcaggagaattgtttgaacctgagaggtggaggttgcagtgagctgagatcacaacactgcactcaaaaagtagttaattaatttagtttaattaaaaaagaatattgagtgtcaggcaatctgggtagaacccattgtgtttctacaggatagaatctgctgtgttctctagcggaacttccggatcaccttcaccgtatgactctagacaatccctgtccactcttcagttttagatgccccattcaaagaatgaaagaattgtcctagatgatcctttagggtcttccaggctgatgacaagggggacctggcccctctgctgctggccaaagaggactttacttcccattccgtgtggttgaacaagaattgctgggctccagtcctgcctttggcccttccctacatgtgaccttgggccctctttgcctttcagaatcaatacagtgagagagttaaca

SEQ ID NO: 466434 - DNA, 2339 bp, Homo sapiens
cctcctgctgagccccagagctgatacagcacagccccacagagacatcagagacatgtgcacacacggccctgggattgccgacagacacacaggcacacataggcacgtacacacaggcatacagacacaggcacagactcacactcggcccctccccactcacactcgctcacactcatgctcacactcacaccaacccccctcccccaaatctgctgcgcaccaacggttggtgcgagcggggttgagaacgggaggaaaaaagcccacgactcagcccgggaagaggggtgcggtgggggaagggcgggcgagggaaatgacagcccgcggtccccctcgagtcccggctcatgaatattaatacggcggtaattaaaatgcagggacgcagcaggatggatgcggctgcctccggagcgcgggggagcgcggagtctttgcaggcgggtgaagcccgctcctcgccggcgaaaagcggggccgggctccggggcctgggtccggggcgggcgggagtggggacatttttcgtggtcccgagcgtcccgtcccggcgtccccgcccccgccccgcggccgcctctccacgccctgccccgggccgcccgccaggccgccgtttcccggagccggccccctcccgccctcgcggccggctgatgtcatctgcacacaactttccgcttcccggcccgtctcggggccctgagtcatcgccgcccccggccccgacgctggcctgcggcgtctgtttgtgcagagcgaggccccgccggccgggcttgacgtcaggctggcagggcctggaacggccccgcatcgcggccccctgggggcaggacgacaccgctgggggccgagggcagggcacgccttcggaatccggcttcgaagccggccgcctgacctggggcaagtgctttcaactctctgaacttcggttcctcatctgccagttggcagacgctcagcaaatcttcctagactcacggggcgaattgtacagttgggtaaatcgaggcccagagatggcaaaaggaccgtccaaggtcgtacagccacccggaattacaattcttttctgccgggtcacacgctgtcatccacgtgttacctaagagagctttccagcctgtgctaagaaaactgccccacatcatctgcagtaggacgggggagttggagccctggtcaggccactctgctactgaccacagttttctcatctctaaaaaggcgcagtaacaatataattaccgtatgcagtcccccaggatacagggtcaaaggagagcacaaccatcgcagttggaagcccatggggcagggcccaggacacagtgagcatacaatagacattagctgctgtggtgtcttgatttcaagcccagtgcagatgcatctgacttacgaaacttcagtgacacctgctctgtgccagacactgaagatggagcagtgaacagcactgacccagcctgtcctcctgttgcctgcaggccagaagcaaggtctcgctgtgttaccctggctggagtgcagtggctacttacaggcatgatcatagcatactgcagcctcgaactcctggactagagcagttctcctgcctcagcctccagagcagctgggactgcagacacgcaccacagagcccagcctgagtcattttgattctgtaactggcttcctctcggcgggcaggctcacaccctccacccccagctggagatggaaggaggatgctcaccgcccattcctcatgcaggccatcgatggaaatgtcagacagtgcgagtccacgcctgaacacttctggggtccgctctgggactgacactggcagatccatcgtggcacccgagctctgtgagggcaagactttgttcggttgtgggctatgcccccaacccctcggacagtgcctgcacaggtggacatttttgttggatgaaggattttctgttaaatgtgtctggcacacacagaaaaacaaagcccagcagatgccgttccattgtttgctgacttgcattgattctatgagaagtctgcagtcttttgcagcgttgttttcctatgtataattgtctcctcccaccccactcaccccagctgctttccacattctctctctttgattttcagcagtctgcccatgatgtgcctaaataggactttctttgcattcatcttggctggggctcactgaactttctgaatctgtagattaattttcttttttcaataaaccttggaatattttcagcataatttttttcctgtcttcttctctctcttttctcctctgaaatgccaattaaatatatgtt

SEQ ID NO: 466435 - DNA, 1309 bp, Homo sapiens
cctcctgctgagccccagagctgatacagcacagccccacagagacatcagagacatgtgcacacacggccctgggattgccgacagacacacaggcacacataggcacgtacacacaggcatacagacacaggcacagactcacactcggcccctccccactcacactcgctcacactcatgctcacactcacaccaacccccctcccccaaatctgctgcgcaccaacggttggtgcgagcggggttgagaacgggaggaaaaaagcccacgactcagcccgggaagaggggtgcggtgggggaagggcgggcgagggaaatgacagcccgcggtccccctcgagtcccggctcatgaatattaatacggcggtaattaaaatgcagggacgcagcaggatggatgcggctgcctccggagcgcgggggagcgcggagtctttgcaggcgggtgaagcccgctcctcgccggcgaaaagcggggccgggctccggggcctgggtccggggcgggcgggagtggggacatttttcgtggtcccgagcgtcccgtcccggcgtccccgcccccgccccgcggccgcctctccacgccctgccccgggccgcccgccaggccgccgtttcccggagccggccccctcccgccctcgcggccggctgatgtcatctgcacacaactttccgcttcccggcccgtctcggggccctgagtcatcgccgcccccggccccgacgctggcctgcggcgtctgtttgtgcagagcgaggccccgccggccgggcttgacgtcaggctggcagggcctggaacggccccgcatcgcggccccctgggggcaggacgacaccgctgggggccgagggcagggcacgccttcggaatccggcttcgaagccggccgcctgacctggggcaagtgctttcaactctctgaacttcggttcctcatctgccagttggcagacgctcagcaaatcttcctagactcacggggcgaattgtacagttgggtaaatcgaggcccagagatggcaaaaggaccgtccaaggtcgtacagccacccggaattacaattcttttctgccgggtcacacgctgtcatccacgtgttacctaagagagctttccagcctgtgctaagaaaactgccccacatcatctgcagtaggacgggggagttggagccctggtcaggccactctgctactgaccacagttttctcatctctaaaaaggcgcagtaacaatataattaccgtatgcatccgggcgacagagcaagagtccattcccccaccacca

SEQ ID NO: 466436 - DNA, 365 bp, Homo sapiens
tgtaagattctcccggggcctgaaagcttaaggagatgaataactcctcccttctcaggcccagtcccaaggcgcaagggccacttgtgtcagcagtgtgcaccagcagcgtgcgccggcaagatagcagaagcatgaaaagggccggccagaagacacctactctggctggaagacacgtacccctgaagatcaagaaagaagctatctgggaacaatgtagcagttacgtcagaccaggacacttcctgtttacaggagactataaaacctttgtcctatcatcacttgatgtggacgccattttaggcctcagcccgcctgcacccaggcactgattaaaacagcatgttgctccacactgc

SEQ ID NO: 466437 - DNA, 605 bp, Homo sapiens
cagcatgttgctccacactgcctcgtgttgtctactctacagacacatcacttctcctcctttgttccccttccagttctgctatggaagaagcaacatctaagatgacggaaattatttcagagcccacagttacactggaaaatgagaattcggatgtgaatccatctgcaggaaagtctggtccagggctctttctggttgaacacctgggggaaggggaggctgtgggcgcagcttcagcagacttaaatgttcctgccagacggctctgcagagagcagcgtatcctgacaaggaggattctcccagcacagaacgggagctccactaagggacagactgcttccttaagtgggtccctgacccccgtgcctcccgactgggagacagctcccagcaggggtcagcagacaccttatacaagagagctccagctggcatctggcaggtgcctctctgagacaaagcttccagatgaaggagcaggcagcagtctttgctgttctgcagcctctgctggtgatacccaggcaaacagggtctggagtggacctccggcaaactacagcagacatgcagaaaaggggcctgattgttagaag

SEQ ID NO: 466438 - DNA, 1641 bp, Homo sapiens
cttctcagccatgcagaactaatcactggtttatgaattaccgggtctggatgactagttggctatgactgggaaggaaggaggacataaagatagattttctagctcacatgacctggggaaacgctattggtttaaggtcttgtctctggaatcagagtggctacaacaggtgcttgatggtagccttgggcaaatgacatacttcttgcctagaaataatactctcacaatttatattctctgtctctctttggctacaaagaaaatcccccctgcacttcaaacagcagaggtctgccagatactccaccctcatcaatcttcatttaaatgccagcaacatgaccctatgaataaaggtgctccatttgtctacaagcaaaggctttccaaaacagacagaagaagtcccacttggggtgaagtttgcagttccatatgtttcagtgggagagggggaaaacgatgggatgaggggagcaaaaactggattcaaaagagaggaactatttagttcagtatcctaagacctcaatgctaagacatcagggaatccatccagccaacccctctcctcagtaaatgcaaaatataaataaatgacactcactctcattcccacccctcatatcagagaccacattaatgtaagagaacgaaaaaatactatgatgacgataactattctttattgaatagattctatgtgccagctctatcaagctataattcacatgccttaaaattcaccttttttgaaatgtacaactgagtgatttgtaatatattcacagagttgtgcaatcttaacaactacttaattccagaacatttacatcacttcaaagaaaccccataccctatagcagtcactcccaattctcttcttccacccattccctggaaaccactaatttactttccgtctctttggatttaactactcaggacattttatatttcaagtgattgaagatgtaaaaatgcaaccaggagtagctctgagaaacaccaggattatctatccacccttctgaagctgagcagcagatttatggaatcagaacagggaatggactgggtgcttaacaccaattagagctgcacatctgaagaagggaagagaaagatccaaaaatctcacaagataggaggagagtgcagatcagaacccaccaccttctctgactccaaatgcaatgctcttggcttgtctgcgcaccacttcttctccatctccaggtcactgcatttaattctatcccatctgagtatgtgaaatggaagcttgtttagaaaaatctttttatctgccacctcctgaatcttaattcgtcttagtgccaaaatgtatagtaatccacaaagctgaagaaggctgcatcatgtttgggacttgttccccgctcatttggatggctggatcagaaacaacagaagaaagagtgcttgtctcttgtgagtttgccaactgagtatttggattcagatggatcacacgcaacacatcaaattgtttttagctcagtatccaaacatttgatttttttatctacactaattccaaattttataaagttgttgaaagttgcttgtggataagttcatacatatttgaaaaagacacaaccaaaatac

SEQ ID NO: 466439 - DNA, 1935 bp, Homo sapiens
acacgctgatcgatgagcaggacatcccgctggtggagagctactcctttgaggcccgaatggaagtggatgcagatggaaatggtgctaagatatttgcctatgcctttgacaagaaccgaggaaggggctctgggagactccttcatgagctgctgtggtgggtgtttccaagctgtctctgccccccgccactgggctcctgggtgagctccgatggcacagggcgcctggagccccctgccccgctgaagccctgccttgccttccctgaatctcgcagttatttttgtgtccttcaccactaacccaaaggaacgaatgatttgtatgttgcacttcaaacaccaagtggactttctgctgggagcttgcccaggaccggcagcctctggagggacggtggttgctccccttgctgggttttgccgagcccccccggtgtgcatggtagggaccactcagatggggagctgtctcgaggccatctgcttaggtggttttgcgttccagctttggctgtctgtgctctgaagtccaggggccgggtcctccctgtgtccctgtcctgtttgggccacagatcaggtgcttgggtttctctcagcagcttccgcctgaggtaccctcatccaaaggaccaggggcccgatcagatcacatggctgacatttcttcctggaaggactttggtacctgaccagaaatgtctgtgagggtgggaggcagcgatgcagggttagatgcagggtttgctgtctgtttctagggagcggcaccgggggggcgtggccccgggcttccaggtggtgcacctcaacgctgtgaccgtggacaatcgcctggacaacctgcaactggtgccgtggggctggcggcccaaggctgaagagacctccagcaagcagagggagcaaagcttgtattggcttgcaattcagcagctgcctacagaccctatagaagaacagtttcctgtcctaaatgtgacccggtattataatgccaacggggatgtagtggaagaggaggagaactcttgcacctactatgagtgccactaccctccctgcacagtgattgagaagcagctccgggagttcaacatctgtgggcgctgccaggtggcccggtactgcggctcccagtgccagcagaaggactggcctgcccacaagaagcactgtcgggagaggaagcgtcccttccagcatgagcttgagccagagcgatgacgggcaggggagccacacatactcacagcccccgggctctaccctgggcacagcagagacagactggtggttgaacctggaggtgccaaaaaagccagctgcgggcccaggacagctgccgtgagactcccgatgtcacaggcagtctgtgtggttacagcgcccctcagtgttcatctccagcagagacaacggaggaggctcccaccaggacggttctcattatttatatgttaatatgtttgtaaactcatgtacagttttttttgggggggaggcaatgggaagggtagaaattacaaatagaatcatttgctgtaatccttaaatggcaaacggtcaggccacgtgactaaaaactgtcctgttgtcgaagcttctcccctgggccgccgggagccccgtggagcgcggcctgcacgggagttgtgtccacaaaggcaaagtaaaggggtggaatcatctggcctctcggacattctctgctccgcctccctcttgtgctgcttagggcctcaccccagcaggtggcaccgttgagggtgggacgggccccaccactgcttccctctcacctgatacccaatcctctggtcatctttcccgttccgtggccccgacttcttggtcttcgtagccagaggtgtgtggttgaggcccttttggaatgccctgctgccttcctggccagccttttctg

SEQ ID NO: 466440 - DNA, 1698 bp, Homo sapiens
acacgctgatcgatgagcaggacatcccgctggtggagagctactcctttgaggcccgaatggaagtggatgcagatggaaatggtgctaagatatttgcctatgcctttgacaagaaccgaggaaggggctctgggagactccttcatgagctgctgtggtgggtgtttccaagctgtctctgccccccgccactgggctcctgggtgagctccgatggcacagggcgcctggagccccctgccccgctgaagccctgccttgccttccctgaatctcgcagttatttttgtgtccttcaccactaacccaaaggaacgaatgatttgtatgttgcacttcaaacaccaagtggactttctgctgggagcttgcccaggaccggcagcctctggagggacggtggttgctccccttgctgggttttgccgagcccccccggtgtgcatggtagggaccactcagatggggagctgtctcgaggccatctgcttaggtggttttgcgttccagctttggctgtctgtgctctgaagtccaggggccgggtcctccctgtgtccctgtcctgtttgggccacagatcaggtgcttgggtttctctcagcagcttccgcctgaggtaccctcatccaaaggaccaggggcccgatcagatcacatggctgacatttcttcctggaaggactttggtacctgaccagaaatgtctgtgagggtgggaggcagcgatgcagggttagatgcagggtttgctgtctgtttctagggagcggcaccgggggggcgtggccccgggcttccaggtggtgcacctcaacgctgtgaccgtggacaatcgcctggacaacctgcaactggtgccgtggggctggcggcccaaggctgaagagacctccagcaagcagagggagcaaagcttgtattggcttgcaattcagcagctgcctacagaccctatagaagaacagtttcctgtcctaaatgtgacccggtattataatgccaacggggatgtagtggaagaggaggagaactcttgcacctactatgagtgccactaccctccctgcacagtgattgagaagcagctccgggagttcaacatctgtgggcgctgccaggtggcccggtactgcggctcccagtgccagcagaaggactggcctgcccacaagaagcactgtcgggagaggaagcgtcccttccagcatgagcttgagccagagcgatgacgggcaggggagccacacatactcacagcccccgggctctaccctgggcacagcagagacagactggtggttgaacctggaggtgccaaaaaagccagctgcgggcccaggacagctgccgtgagactcccgatgtcacaggcagtctgtgtggttacagcgcccctcagtgttcatctccagcagagacaacggaggaggctcccaccaggacggttctcattatttatatgttaatatgtttgtaaactcatgtacagttttttttgggggggaggcaatgggaagggtagaaattacaaatagaatcatttgctgtaatccttaaatggcaaacggtcaggccacgtgactaaaaactgtcctgttgtcgaagcttctcccctgggccgccgggagccccgtggagcgcggcctgcacgggagttgtgtccacaaaggcaaagtaaaggggtggaatcat

SEQ ID NO: 466441 - DNA, 3056 bp, Homo sapiens
  misc_feature (1712)..(1712): n is a, c, g, or t
  misc_feature (1717)..(1717): n is a, c, g, or t
acacgctgatcgatgagcaggacatcccgctggtggagagctactcctttgaggcccgaatggaagtggatgcagatggaaatggtgctaagatatttgcctatgcctttgacaagaaccgaggaaggggctctgggagactccttcatgagctgctgtggtgggtgtttccaagctgtctctgccccccgccactgggctcctgggtgagctccgatggcacagggcgcctggagccccctgccccgctgaagccctgccttgccttccctgaatctcgcagttatttttgtgtccttcaccactaacccaaaggaacgaatgatttgtatgttgcacttcaaacaccaagtggactttctgctgggagcttgcccaggaccggcagcctctggagggacggtggttgctccccttgctgggttttgccgagcccccccggtgtgcatggtagggaccactcagatggggagctgtctcgaggccatctgcttaggtggttttgcgttccagctttggctgtctgtgctctgaagtccaggggccgggtcctccctgtgtccctgtcctgtttgggccacagatcaggtgcttgggtttctctcagcagcttccgcctgaggtaccctcatccaaaggaccaggggcccgatcagatcacatggctgacatttcttcctggaaggactttggtacctgaccagaaatgtctgtgagggtgggaggcagcgatgcagggttagatgcagggtttgctgtctgtttctagggagcggcaccgggggggcgtggccccgggcttccaggtggtgcacctcaacgctgtgaccgtggacaatcgcctggacaacctgcaactggtgccgtggggctggcggcccaaggctgaagagacctccagcaagcagagggagcaaagcttgtattggcttgcaattcagcagctgcctacagaccctatagaagaacagtttcctgtcctaaatgtgacccggtattataatgccaacggggatgtagtggaagaggaggagaactcttgcacctactatgagtgccactaccctccctgcacagtgattgagaagcagctccgggagttcaacatctgtgggcgctgccaggtggcccggtactgcggctcccagtgccagcagaaggactggcctgcccacaagaagcactgtcgggagaggaagcgtcccttccagcatgagcttgagccagagcgatgacgggcaggggagccacacatactcacagcccccgggctctaccctgggcacagcagagacagactggtggttgaacctggaggtgccaaaaaagccagctgcgggcccaggacagctgccgtgagactcccgatgtcacaggcagtctgtgtggttacagcgcccctcagtgttcatctccagcagagacaacggaggaggctcccaccaggacggttctcattatttatatgttaatatgtttgtaaactcatgtacagttttttttgggggggaggcaatgggaagggtagaaattacaaatagaatcatttgctgtaatccttaaatggcaaacggtcaggccacgtgactaaaaactgtcctgttgtcgaagcttctcccctgggccgccgggagccccgtggagcgcggcctgcacgggagttgtgtccacaaaggcaaagtaaaggggtggaatcataaaaaaaaaaaaanaaaanaaaaaaaaaaaaaaaaaaaaaaaaaaaaaaaaaaaaaaaaaaaaaaaaaaaaaaaagaagaacagaagaaaaaaaagaaaacagacgaaaggatagcgcaactagacgacggagacggggaggaaggagcacgttgttgtgcgcagcagcgaagcgagaaggagacgagctgacggagcgcagagcggcgagcacgagcgacaggggcgggaggcgcgagagcagaaggagagggtaggagagaggcaggcccgcacccaggaggaagagccagcgagacgggagcaggcgaggcggcagaaacaggagagagagaggacagcgcaaaaacggaaagaaggaaaaggaaggagagagaaacgagagagaaaaggccagacgagccacaagcacgacgacagacagagcagcaaaaacaaaagagagcaggagaggaagacgaagaagagaacagagcggagaagagagcaagccggggccagggaggcggcggcacgaggcggggagagcagagagggaggagcaagacagagaccaagaaaccaacgagacgcacggcgcggagcacgaggagagcgagcacgagccgcgcgcccgcggcggcaaccaacaggagcgcaccagcaacagacaacgacagaccgagaacagcacaagaagccccagccagaacgacgcgcagagagagagggagagcgagagagggagaacagagggagcgggagcaagcgaagaagggcagaaggacgagcgaagccggacgcgaagagagaacggaacgagagagagcgagcaggaaagggagacaacaccgacgaaacgacagcgagacaaacgaccgaacagaccacagccgagacccaagagcacgagaccgcagcaaagacagggtagcgagcgacagaggcacagagacagaacagcaacacagaacagaacgaggaaagaccagcaacaaggaggcggaaagacgacccagagacgagggaaacgggcgcagaggagcgcgccgacggaacaagaaagaaacaaaaacaccgacacgccgagacacaaagcgaacgaaccagggaagaaaacacaccagacaccgaacaagaaagagagacagagaagaaaaacccacagacagagagcgcaggagaaagagaaaggaacagagagaagaagacagcgagggaggcgggcgagccgcgaagccggacgaaacgaaaaacgcacgcgggcaggagcgagagcggaggagaggcaggagacagacagcggaggggagacgcgcagaaaacacgaccagcggacacatggagacgaaacgacgaaaaaccaagggaacgaggca

SEQ ID NO: 466442 - DNA, 1542 bp, Homo sapiens
acacgctgatcgatgagcaggacatcccgctggtggagagctactcctttgaggcccgaatggaagtggatgcagatggaaatggtgctaagatatttgcctatgcctttgacaagaaccgaggaaggggctctgggagactccttcatgagctgctgtggtgggtgtttccaagctgtctctgccccccgccactgggctcctgggtgagctccgatggcacagggcgcctggagccccctgccccgctgaagccctgccttgccttccctgaatctcgcagttatttttgtgtccttcaccactaacccaaaggaacgaatgatttgtatgttgcacttcaaacaccaagtggactttctgctgggagcttgcccaggaccggcagcctctggagggacggtggttgctccccttgctgggttttgccgagcccccccggtgtgcatggtagggaccactcagatggggagctgtctcgaggccatctgcttaggtggttttgcgttccagctttggctgtctgtgctctgaagtccaggggccgggtcctccctgtgtccctgtcctgtttgggccacagatcaggtgcttgggtttctctcagcagcttccgcctgaggtaccctcatccaaaggaccaggggcccgatcagatcacatggctgacatttcttcctggaaggactttggtacctgaccagaaatgtctgtgagggtgggaggcagcgatgcagggttagatgcagggtttgctgtctgtttctagggagcggcaccgggggggcgtggccccgggcttccaggtggtgcacctcaacgctgtgaccgtggacaatcgcctggacaacctgcaactggtgccgtggggctggcggcccaaggctgaagagacctccagcaagcagagggagcaaagcttgtattggcttgcaattcagcagctgcctacagaccctatagaagaacagtttcctgtcctaaatgtgacccggtattataatgccaacggggatgtagtggaagaggaggagaactcttgcacctactatgagtgccactaccctccctgcacagtgattgagaagcagctccgggagttcaacatctgtgggcgctgccaggtggcccggtactgcggctcccagtgccagcagaaggactggcctgcccacaagaagcactgtcgggagaggaagcgtcccttccagcatgagcttgagccagagcgatgacgggcaggggagccacacatactcacagcccccgggctctaccctgggcacagcagagacagactggtggttgaacctggaggtgccaaaaaagccagctgcgggcccaggacagctgccgtgagactcccgatgtcacaggcaaaatagaatcatttgctgtaatccttaaatggcaaacggtcaggccacgtgactaaaaactgtcctgttgtcgaagcttctcccctgggccgccgggagccccgtggagcgcggcctgcacgggagttgtgtccacaaaggcaaagtaaaggggtggaatcat

SEQ ID NO: 466443 - DNA, 409 bp, Homo sapiens
gggttagtgggaagatgagacacaatatttactgtcaggtggtgaaaagcacatgcagcagggatgggccaaaggagactcaaactcgggctgggtgtcctgggcaggatggcactctatggagtcattgcatcgtctgctgtgtgctggccccgtttggccagagtgcactcaagtgtctgcttctttctttaagggagcaaagcttgtattggcttgcaattcagcagctgcctacagaccctatagaagaacagtttcctgtcctaaatgtgacccggtattataatgccaacggggatgtagtggaagaggaggagaactcttgcacctactatgagtgccactaccctccctgcacagtgattgagaagcaggtgggtgtgctgcagtgcggtcgcgtccctgg

SEQ ID NO: 466444 - DNA, 1089 bp, Homo sapiens
acacgctgatcgatgagcaggacatcccgctggtggagagctactcctttgaggcccgaatggaagtggatgcagatggaaatggtgctaagatatttgcctatgcctttgacaagaaccgaggaaggggctctgggagactccttcatgagctgctgtgggagcggcaccgggggggcgtggccccgggcttccaggtggtgcacctcaacgctgtgaccgtggacaatcgcctggacaacctgcaactggtgccgtggggctggcggcccaaggctgaagagacctccagcaagcagagggagcaaagcttgtattggcttgcaattcagcagctgcctacagaccctatagaagaacagtttcctgtcctaaatgtgacccggtattataatgccaacggggatgtagtggaagaggaggagaactcttgcacctactatgagtgccactaccctccctgcacagtgattgagaagcagctccgggagttcaacatctgtgggcgctgccaggtggcccggtactgcggctcccagtgccagcagaaggactggcctgcccacaagaagcactgtcgggagaggaagcgtcccttccagcatgagcttgagccagagcgatgacgggcaggggagccacacatactcacagcccccgggctctaccctgggcacagcagagacagactggtggttgaacctggaggtgccaaaaaagccagctgcgggcccaggacagctgccgtgagactcccgatgtcacaggcagtctgtgtggttacagcgcccctcagtgttcatctccagcagagacaacggaggaggctcccaccaggacggttctcattatttatatgttaatatgtttgtaaactcatgtacagttttttttgggggggaggcaatgggaagggtagaaattacaaatagaatcatttgctgtaatccttaaatggcaaacggtcaggccacgtgactaaaaactgtcctgttgtcgaagcttctcccctgggccgccgggagccccgtggagcgcggcctgcacgggagttgtgtccacaaaggcaaagtaaaggggtggaatcat

SEQ ID NO: 466445 - DNA, 2742 bp, Homo sapiens
cctgtgagaaggacatgattatggggggagcggagggcaaactgagcacctctgggggcacagcggccctgggctgcctggtcaaggactacttccccgaaccggtgacggtgtcgtggaactcaggcgccctgaccagcggcgtgcacaccttcccagctgtcctacagtcctcaggactctactccctcagcagcgtggtgaccgtgccctccagcaacttcggcacccagacctacacctgcaacgtagatcacaagcccagcaacaccaaggtggacaagacagttgcaccacctgtggcaggaccgtcagtcttcctcttccccccaaaacccaaggacaccctcatgatctcccggacccctgaggtcacgtgcgtggtggtggacgtgagccacgaagaccccgaggtccagttcaactggtacgtggacggcgtggaggtgcataatgccaagacaaagccacgggaggagcagttcaacagcacgttccgtgtggtcagcgtcctcaccgttgtgcaccaggactggctgaacggcaaggagtacaagtgcaaggtctccaacaaaggcctcccagcccccatcgagaaaaccatctccaaaaccaaagggcagccccgagaaccacaggtgtacaccctgcccccatcccgggaggagatgaccaagaaccaggtcagcctgacctgcctggtcaaaggcttctaccccagcgacatcgccgtggagtgggagagcaatgggcagccggagaacaactacaagaccacacctcccatgctggactccgacggctccttcttcctctacagcaagctcaccgtggacaagagcaggtggcagcaggggaacgtcttctcatgctccgtgatgcatgaggctctgcacaaccactacacgcagaagagcctctccctgtctccggagctgcaactggaggagagctgtgcggaggcgcaggacggggagctggacgggctgtggaccaccatcaccatcttcatcacactcttcctgctaagcgtgtgctacagtgccaccatcaccttcttcaaggttggccgcacgttgtccccagctgtccttgacattgtcccccatgctgtcacacactgtccccatgctgtccccacatgtccctgacactgtcccccatgctgtccccacctgtcccggacactctcctccgcactgtctcgacctgtgcccaacactgtcccccacgctatccccctatccccaacaatgtcccccacactgtttcctcctgtcccctatccccgacactgtcctccacactgtccccacctctccctgtcactgtcgcccatgctgcccccacctgtcccaacactttcctccaagctgtcctcacctgtccccaacactctcccccacactctctccacctgtccctgacactctcccccatgctgtccccacctgtccctgatgctgtcctccacactgtccccacctctccctgtcactgtccccatgctgtcccctgtccctcacactttcctccatgctgtcctcacctgtccccaacactctcccccactgtctccacctgtccctgacactgtcccccacactgtccccacctgtccctgatgctgtcgtctgtgctgtccacatactgttggtgacctggctctgttctccaagttcaagcctcagagcaggcagtggtgaggccgtggcacctgggtggcctgaggggtggggcgggccttgggggcagggctgtggcctcgctcacccctgtgctgtgccttgcctacaggtgaagtggatcttctcctcagtggtggacctgaagcagaccatcgtccccgactacaggaacatgatcaggcagggggcctagggccaccctctgtggggtgtccagggccgcccagacccccacacaggagccgtgggccatgctcagccatcacccaggccacacctgcccccgacctcaccgccctcaaccccatggctctctggcctcgcagtcgccctctgaccctgacacgccccccttccagaccctgtgcatagcaggtctaccccagacctccgctgcttggtgcatgcagggcgctgggggccaggacacgctgctgcagccccgcggggggtgagggagacagcacctggggtgcagggcgggcagctgctgcatcaccggctctatcccaagcccaaggatggcgtcccagagatgcaggagagctttgtccagagaaggtgccagccctcagggaccctgctggagagatctccaccctctgcccttcaaggggccctacgggcctccaggtgctctggtggggtgggctccagtccactgtctgaggatggacggcctggccaggataaggaaaggaaacccaggacggtgccgggctccgggtcattccgtgcactgagcaggctgagttgggaagaagcagatgcttcctgcagctgctgccccctgcagggcctggcgcctggaccaggttcccctggggaaattgggcccctccctgagccacccggggcccacctcccactttctacctgggaccgagcatcctccagagggtcagccctcctgcgggaacaccatgcccagccccaggaccctccctcaactctccagcaaggctgcccctgcacaccccccagcagcccatgctgtgatgtaacatgacatcgtgtgacatggtgcccctgccccacgtgacccaagtgggct

SEQ ID NO: 466446 - DNA, 2778 bp, Homo sapiens
cctgtgagaaggacatgattatggggggagcggagggcaaactgagcacctctgggggcacagcggccctgggctgcctggtcaaggactacttccccgaaccggtgacggtgtcgtggaactcaggcgccctgaccagcggcgtgcacaccttcccagctgtcctacagtcctcaggactctactccctcagcagcgtggtgaccgtgccctccagcaacttcggcacccagacctacacctgcaacgtagatcacaagcccagcaacaccaaggtggacaagacagttgagcgcaaatgttgtgtcgagtgcccaccgtgcccagcaccacctgtggcaggaccgtcagtcttcctcttccccccaaaacccaaggacaccctcatgatctcccggacccctgaggtcacgtgcgtggtggtggacgtgagccacgaagaccccgaggtccagttcaactggtacgtggacggcgtggaggtgcataatgccaagacaaagccacgggaggagcagttcaacagcacgttccgtgtggtcagcgtcctcaccgttgtgcaccaggactggctgaacggcaaggagtacaagtgcaaggtctccaacaaaggcctcccagcccccatcgagaaaaccatctccaaaaccaaagggcagccccgagaaccacaggtgtacaccctgcccccatcccgggaggagatgaccaagaaccaggtcagcctgacctgcctggtcaaaggcttctaccccagcgacatcgccgtggagtgggagagcaatgggcagccggagaacaactacaagaccacacctcccatgctggactccgacggctccttcttcctctacagcaagctcaccgtggacaagagcaggtggcagcaggggaacgtcttctcatgctccgtgatgcatgaggctctgcacaaccactacacgcagaagagcctctccctgtctccggagctgcaactggaggagagctgtgcggaggcgcaggacggggagctggacgggctgtggaccaccatcaccatcttcatcacactcttcctgctaagcgtgtgctacagtgccaccatcaccttcttcaaggttggccgcacgttgtccccagctgtccttgacattgtcccccatgctgtcacacactgtccccatgctgtccccacatgtccctgacactgtcccccatgctgtccccacctgtcccggacactctcctccgcactgtctcgacctgtgcccaacactgtcccccacgctatccccctatccccaacaatgtcccccacactgtttcctcctgtcccctatccccgacactgtcctccacactgtccccacctctccctgtcactgtcgcccatgctgcccccacctgtcccaacactttcctccaagctgtcctcacctgtccccaacactctcccccacactctctccacctgtccctgacactctcccccatgctgtccccacctgtccctgatgctgtcctccacactgtccccacctctccctgtcactgtccccatgctgtcccctgtccctcacactttcctccatgctgtcctcacctgtccccaacactctcccccactgtctccacctgtccctgacactgtcccccacactgtccccacctgtccctgatgctgtcgtctgtgctgtccacatactgttggtgacctggctctgttctccaagttcaagcctcagagcaggcagtggtgaggccgtggcacctgggtggcctgaggggtggggcgggccttgggggcagggctgtggcctcgctcacccctgtgctgtgccttgcctacaggtgaagtggatcttctcctcagtggtggacctgaagcagaccatcgtccccgactacaggaacatgatcaggcagggggcctagggccaccctctgtggggtgtccagggccgcccagacccccacacaggagccgtgggccatgctcagccatcacccaggccacacctgcccccgacctcaccgccctcaaccccatggctctctggcctcgcagtcgccctctgaccctgacacgccccccttccagaccctgtgcatagcaggtctaccccagacctccgctgcttggtgcatgcagggcgctgggggccaggacacgctgctgcagccccgcggggggtgagggagacagcacctggggtgcagggcgggcagctgctgcatcaccggctctatcccaagcccaaggatggcgtcccagagatgcaggagagctttgtccagagaaggtgccagccctcagggaccctgctggagagatctccaccctctgcccttcaaggggccctacgggcctccaggtgctctggtggggtgggctccagtccactgtctgaggatggacggcctggccaggataaggaaaggaaacccaggacggtgccgggctccgggtcattccgtgcactgagcaggctgagttgggaagaagcagatgcttcctgcagctgctgccccctgcagggcctggcgcctggaccaggttcccctggggaaattgggcccctccctgagccacccggggcccacctcccactttctacctgggaccgagcatcctccagagggtcagccctcctgcgggaacaccatgcccagccccaggaccctccctcaactctccagcaaggctgcccctgcacaccccccagcagcccatgctgtgatgtaacatgacatcgtgtgacatggtgcccctgccccacgtgacccaagtgggct

SEQ ID NO: 466447 - DNA, 5964 bp, Homo sapiens
gtcgggaggaaggactgcttgtgtgcggggtgggggggggtggtggagagcgggggcggggattcagcgcgtgtatgtaaaggtgcagcccgtgtgctaggcgctgggtgcgcgcgcggtgtctgctcgggtgcgcgcgcgcgccgctgcccgcctgcccgccggcccgcctgctcgcctgctggggctgctccgtgggtttgacgggcgagcgggcgcggaggagctctgtccggaatcacatagataccatcgtggaaacagcagcgcaggtcacggcgccgcgggccctgcaccagacgctgggctctagagattatttctctttattcagaagcatacagttgtttgctgattgcaagaagatgtttctgtggctgtttctgattttgtcagccctgatttcttcgacaaatgcagattctgacatatcggtggaaatttgcaatgtgtgttcctgcgtgtcagttgagaatgtgctctatgtcaacttctccctgcatctggggaataataaactgcagaacattgagggaggagcctttcttgggctcagtgcattaaagcagttgcacttgaacaacaatgaattaaagattctccgagctgacactttccttggcatagagaacttggagtatctccaggctgactacaatttaatcaagtatattgaacgaggagccttcaataagctccacaaactgaaagttctcattcttaatgacaatctgatttcattccttcctgataatattttccgattcgcatctttgacccatctggatatacgagggaacagaatccagaagctcccttatatcggggttctggaacacattggccgtgtcgttgaattgcaactggaagataacccttggaactgtagctgtgatttattgcccttaaaagcttggctggagaacatgccatataacatttacataggagaagctatctgtgaaactcccagtgacttatatggaaggcttttaaaagaaaccaacaaacaagagctatgtcccatgggcaccggcagtgattttgacgtgcgcatcctgcctccatctcagctggaaaatggctacaccactcccaatggtcacactacccaaacatctttacacagattagtaactaaaccaccaaaaacaacaaatccttccaagatctctggaatcgttgcaggcaaagccctctccaaccgcaatctcagtcagattgtgtcttaccaaacaagggtgcctcctctaacaccttgcccggcaccttgcttctgcaaaacacacccttcagatttgggactaagtgtgaactgccaagagaaaaatatacagtctatgtctgaactgataccgaaacctttaaatgcgaagaagctgcacgtcaatggcaatagcatcaaggatgtggacgtatcagacttcactgactttgaaggactggatttgcttcatttaggcagcaatcaaattacagtgattaagggagacgtatttcacaatctcactaatttacgcaggctatatctcaatggcaatcaaattgagagactctatcctgaaatattttcaggtcttcataacctgcagtatctgtatttggaatacaatttgattaaggaaatctcagcaggcacctttgactccatgccaaatttgcagttactgtacttaaacaataatctcctaaagagcctgcctgtttacatcttttccggagcacccttagctagactgaacctgaggaacaacaaattcatgtacctgcctgtcagtggggtccttgatcagttgcaatctcttacacagattgacttggagggcaacccatgggactgtacttgtgacttggtggcattaaagctgtgggtggagaagttgagcgacgggattgttgtgaaagaactgaaatgtgagacgcctgttcagtttgccaacattgaactgaagtccctcaaaaatgaaatcttatgtcccaaacttttaaataagccgtctgcaccattcacaagccctgcacctgccattacattcaccactcctttgggtcccattcgaagtcctcctggtgggccagtgcctctgtctattttaatcttaagtatcttagtggtcctcattttaacggtgtttgttgctttttgccttcttgtttttgtcctgcgacgcaacaagaaacccacagtgaagcacgaaggcctggggaatcctgactgtggctccatgcagctgcagctaaggaagcatgaccacaaaaccaataaaaaagatggactgagcacagaagctttcattccacaaactatagaacagatgagcaagagccacacttgtggcttgaaagagtcagaaactgggttcatgttttcagatcctccaggacagaaagttgttatgagaaatgtggccgacaaggagaaagatttattacatgtagataccaggaagagactgagcacaattgatgagctggatgaattattccctagcagggattccaatgtgtttattcagaattttcttgaaagcaaaaaggagtataatagcataggtgtcagtggctttgagatccgctatccagaaaaacaaccagacaaaaaaagtaagaagtcactgataggtggcaaccacagtaaaattgttgtggaacaaaggaagagtgagtattttgaactgaaggcgaaactgcagagttcccctgactacctacaggtccttgaggagcaaacagctttgaacaagatctaggtcatgtaatcttacttcatacagaggacatttatttaatgatgaaagtgccttttgttgacttctaacttccaaatactatattatcaataggcatggaggcaggtgtttccaagggtgtctcattaactgtagctgcaaagatgtgtcaagtagaagagaatttgtttaatagattttactacataaaacctatactgtggagtcctgtggggatactgcaaactctattgccaaagggatgctttatacacataatactgaatttaacctcaagaggcaaatctgttttgtaccccaatgcaaaaccttcgtctctttgtgctttgtaaagcaaactcaagaaaactggtacacctgtaccagctgggtcctttatcttgcacgtagattaagttggtggaactggaataatccttttgatttgtggcattgtaacaactccgtgtaaagattatctgaaaagtaaaaaaaaaaaaaaaaaaaaaaaaaaaaaaaaaaaaaaaaaaaaaaagcatgcaaagagagaacactcgatagtatttgtaaattggtaacctttatggcctgcatcttgaaaccgctggatttataatgttaatttgtgcaaatacttgtttaaaatataacatacattacataactataaaataaatttgaacactttaagcattacctgtctatacataaaaatctaaaagaaaaaatcaacgtgagttagatagcatttgtgatgatctgaagaaatatgtgacgtttatcagaattaaacatggctcaaattaaactaacactagagtttgttctcagttacgtgaaacacccacaatccttcaaggttgtccaaaataagcagagtgcttactgtgtgagcgcacccaaagctatttttgtaacataattcatatttatgaagtactttgtatactaaataggaaaatatgtactccttaatatgtatttaatatgcctgacttgttttcctgatcacagtgaatttatcagttaatttgtaagagaaaaatcaagtaatgctgtaaaagctcatgtaaatcacagaaaagaactgttttaatgacttttgtttgcttttaataacatcaaggtattagaatttattaattgccatttttatgaaagtattaataaaattgtttgctacaatgatatttctgaagccacagtttgttaaatatatttgtctttccattatttttcagaaaaatataaagcagtaaccaaactgatcatttcacccagatttgagggtaagatatagctttagcctactgtttatattcaacttaactgctaaatctctgttaaaaaaaaacgctttctttagaaacatattttcaatctgtgttccttcccactggcagcccctttggagaagagtctgacagtgccaagatcaacatgctttgattcttgcccattcttttgaatcagttggattctgacataacttcagataagcaaatactaatattcagtcttaactatctgctcaaatacttttagaaacccttcagtacctctgtattccattgccagtttgcctggttacaggttagttacccacttatggagtgaattgtgatttgtatttggttcttttaaagatgaccaaaattatcaatccatgactttacccaaattattactgttgtggaaaatgaactaattgcattacggttaacttgagggcagaaatgaatgtaactgactatattgaccaatacggtgggtttaaggttcatatatttatggtaagaaaagtaaacacagaaacagagagagagagagaatataaattaagattgttgttgctttacacgtatacataggtatgctgaaggtgtgaacagtatagatagcatatgcaagtacttttagactaaatgccttatgcatctgaggagatacaccgtaggattgtgttattttatttatttatgagtactgagcacagagctttgggttccagccacttctgttatgtagacaagtggcatcaaatcaaggtttggcatcatttctagtgctcatcccattagtcactgtggtcagatgggctgaactaaaataaaatatcctgtttgtggcttcacttacctagaataactggtgacatatatcaagttcacctgataattgttaactctcaatttcagatttcctaaggatctattctttgttaatttaaaagctaatgggaactcaaatgaattttaataacttactttgtacaaaactgcccttaatctaatttggaattttattttgttttatttatttatttatttatttatttaatgtctttttagtttctactggttgataggattgtgttttaaaagggaaaatcgaggaagggaaattgtgttgtttatcttataggaaatgatggttttttttaatttttaaaaattattttaacctgttgttcttatgtctacaaggggaaaataaagtagggctctgaggcatttgaatattttagaccaaataattgctattgagaataaagattcaagcttctcattaatccataattgacatttccactgactgtaggacccagaaccaggagagaattactcaaccctccacttcagtttacttttgtagacactgcctaaatagaaatagaaattctggtgatttcaataacatcaaaaatgacaaattacctgtttaacttaaaaaggtcatgaatgaggccttcagagaaataatattaataatataatgaataaccatagagcagtgcctttaaattagctataggaaggaaatagtcttttcaagtttctgaacaatatatttctcttagttggcacctcacaaatactagatcatgtcagacgctgctggttaatagctgcaggaaggcatgttgtgcagtggatattgctcatggaagtgtgtgaaaatcatagtaagctttgttctccctgctaagacttgctatgtatatttccatcattgtttcatgtaaactgaaccattgtggtaaacttttggagttgatatggaatcactttaatgctgttttcacaaataaaagttttttcttataggtcacatttgtagccattcagtgtgtttattagtgtggaattagtaaagctcaagctcaaaaagaaatgcaaatagtctggtttttagctgatgcaatcaatatattagtttacatggctaggccagg

SEQ ID NO: 466448 - DNA, 2867 bp, Homo sapiens
  misc_feature (121)..(121): n is a, c, g, or t
  misc_feature (123)..(123): n is a, c, g, or t
  misc_feature (126)..(127): n is a, c, g, or t
  misc_feature (129)..(129): n is a, c, g, or t
atatgccaaacagcagtgttgaagggaggcagggctctggtttctcttttctgggttgaagaccctgagggagagagtcatgggggatgactgctccattgcatttaggctggtcgtcagngncanncnagtatctgcggtaaattggttccataagccccccgtggataccaaaatccagggatgctcaagtcctggagtcacgtgggatgcagaacccacggatgcaaaacattgtccctctgtattggtggattctgtattacatgaacactatattttgatcaacagcaggtcatttgttgcggtgactgagcctgtgcctgctggagcaatttcagctttagagggtatcctaagtccaggaccattatggctggttgcattgctcgactggaattctctggccactgaagctggcatagcactgaggtacagccatgtttatgaatcacagcaagaaggttcatctggaagtgaaggtgctttaactcagatcctcattcattgtgagattggaaaaacatgcacgtgcaggtcttgtcttaggtagcaataaaatgctattactaggtccccaaatgtaaatgacacaggcaactatttcataacatcaataaatctaatgtctgtgtggaggttgcagtgagctgagatcatgccactgcactccagcctgggtgacagagtgagactatgtctcaaaaaaagaaagaaagaaagaaagaaaaatttgaagtatagaggggaatcacaaaaattctaaatggtaactcatgtcaggaacctgaaagtcaagtcttcacttcagcattgggaagtatatgaaactgttttcggaccacacaactctgtgagctcatcgctaagaattggtatgcaaggtcttcagaagggtaggcaatttgtaaactccttttgacttagctggtaagacagaaagttcttttttcatggctaaatgatacttgagaaaagaaaaaatgtggtgaagctgaatgtatctagttgaaataaaaatgcctacctttctcctgcataggcaaaatatactacttacaagaaaaaaaggaatttatgaatagaaatagaatcaggtcacagtgcatttcctaattctccactggattttattactcaagcactgtatttttaccttttatcatagctgtcattcgtccttgtactttagatagcagcttatcaacccttgttatatccttaccttctttagggtgatgatcttatctttatttttgaccacacttcctgtgcctgccccttttcttacatcaatttctgttccacttgggattttgtactcacagatgtgacatgaatatttatgagattaaagtgaatggtccaacatcaattcagaaaaattttgatccattcgtccaaattatttaaaatattccctttctaattgaggcagcaaggcctctagcttagtgctcattttccctctctaagcatattcatgccattagggtattaatttcttctaaactaaagctcttatctcctcataattcattatgtctgtttttgattcgcactatcattgtggtctctcaacttactcccgttaacacagtcattttggtggcttttataatacctcctctgttgttcttcaaattttgcctaaataggcaataacttaaatgaaaaagtgttcatgaaactcgttaagtatgtaccagcacaccctgtaaggttgattgatgcttgatctaggtgtcttccgtatgctttgtgtgttactcctgtggctttaccagctattatgcattagtctctggggataagggaagtaataaacctttgtcccaggtctcataaatagcttggttattaatcaaatgatcatttggtctggcttcctttgttcggtcctatgcttgccacgccttcctgctttatcctcctcctgtatcccttcattcttcttctcctctttcctcccctcccaaactccttccttccctcattcctccactttcatctctttgctatttctagaaagaatcttttgtcttgctaggcagagcatttataacaaaggaaagacaggaggtgtagatgatgaagcagagtagagcacttttaactgcaagagtgttaggatatgaacactgctgttaggatagaaaagagaaaatcctcagacattttttttttccagagcaagagaaaatccagtgactgaaaaagaataagaagaaaaacactgaccaaggcaataattccaagaagtcaaaaattaaggcctgagaggaagaaggcagactaaagaaagtaggtaagacagtgacctgaacgaaagtgctggctccatgctctgtgacgttgggcgtcctcactgacctcggaagcatggtcttggtgacactggtcaggtgcatgaagtgttagaaaattttattaaagattccatggttgcatctctgccttcatgcctggatagttttttctcctccttctttcactcccagtccataacttgccaatccatttctataacctctttaaatataaataaagtctgaccattgtgaatagacccactttttatataatgaagaggaagttagggatatgctgagtttttgtttcattgttgttagtaatttaagatatcccttggtgttttctccatgtttcttgctggtttcattgcaactaagtatttcctctgtcccctactctctttcctctcctttgagaactccaatttcattaggcctatcccacccctccagtgggccatctgaaggtgtttcagacctcactggtgctctactcatattcgttcaaatctgctcttaatctcatcaagtatatttttcatctcagacatc

SEQ ID NO: 466449 - DNA, 2852 bp, Homo sapiens
ggactaactttcctcttctcgcggagcaccctatcccctattatcggcatctgatcttcctagttcggatccccggaacacacgccttctccagcctgcaatctacacacgtggggaagcgcgtccaagtggtgccaggaggcaggagggaagcgcaaaggttaatgcacaccaagtccacgtcctgatgcagcagcacctcatcaatgcggctagtgtagaaggggacactcatctccttggccagctcctccgcttcttcctgcgtgcggccccacagcgccttcaccgcgaagccctcgtctttcagcagcgggatgatgacacgggccgtgaggctggtgccgaacacgcccaccccgggaagcatggctgctcagagccgcctggttctgcttctgctcggatctccagtccaacgcgcgcacacacccacctctagccagtcctgcaccccgctcctgtagccaatctagccgcggtgcgccagccgccgtgcaccgggcaaggcgcccgggtgcccagagcgcaccgagctgcaggcggagcaagctcggggcgcctcagaacggtgactgcggcagtgtccgccacgcggggctcgcgtccttcccggagtcggcggcagggacccccccagggcgccggaggcttcgaagccccctggagccccggctcaggctgcgctcccgcggcagcgccagtccgctgcgtgcgccccgccaaggccgctccatggccggctcatccccgcggccgcgccgccgcagcccgggaccggctctctcccgcgtcgtttgcgcagccggcgaatcgcacagacaaacgtctacaccctgccagagcacggaaccgctccgcgggggagtctcctttctccctagctctccgttgggaatgaaataatcccgcggccgccaggaggccggctaaggatgcggcccggagcgcgccggactgggatcccgagctgcagcgcggcagcggcggccacgacccggcgccagcctcctcattctgctgccatgttcgctcgcctcgcggctcgggcggcctcggccccaggccggctcaggctctgggatcccgcggggacgagggcggagttggcgagtttggctgtcagcggccggtgttcctgcaccgccctcgctgcagcgccgcgcgccattggccgccgcgcgccgcccccgcccccgccgccgccagctccgggtgcgcgctgcgcccgggccccgggagcccagcccggctcctccccggccccgcccaggccgcctcgcccgcctcctgcccctccgcttcttccctttctttgccctcaccatctccttctcttccctgcttcactccaaaccccgccccaaccaagcaaatacatctatctaggcaggacgcgccctaataggttagtcgcctgtcccttggaagagagcagtgggcgccttggcctggggtaggtgaggggacccggcgaggtgcgaacagccgataataataacctcggctcccggagcgtttcttgcgtgctgagcatcatactaacgcctttccaggtattgtcccttttagtcctcgcagcaacctaaggttattgtaaacccattttaccagtgatgtgaatgagccgcaatgaaggctaagggacttgcgcaaggtgacatatataagcaacaggcctgcgattggaatccaggccccagagtctgggcacggaaccgcagacttctacggtctccttccaagctagcctgctccaatcgcgcgcccccgctccggccgcgcacgcacggttcagccgccttcttccaagacagtccagtcttggcgggctcccatctgcctcccacctcccccgcccctaggcccatgcccgcccccgcgtagacgctgtggtgtgtacggccgcagcggggcagggggtctccgaggccgctgcggcacgtgcgtctcgtgtctagtttcgagacggatacgtcgccctggccacatgccacgcccgcctcttgcttcggctcctgttgccgtcgccacttaccgcagcctttacttctcccagcttgcccccacctccaccaccctgcacccttcccaggccctcgagggggcactgaggaggactggccaaggctggccccgcacctctggagccatggggactctgcgtctgtctggttttccgccatatccttggcacctggcacactgccttgccctgtatgtaccaaccatcagcaaatcctgtctgctccacttgcagaatgcatccagagtctgcccacctctccctgccatggttggggagtccaagtcaccatcatcactatcaggaccactgtccttactggtctacctgcttccagtgatgcccctcccaatccatggctcttggagagcgggaatgcccttacatcaatgcataggagtttaggcatcacagaagcttctgagcaaaatacagaacttttctttttggtgtgtgaaggtctcagggtgcttggcctcttcatgcacacagcttctctggggtaatgctgttcagtgtacgtttctgctgcctctgtcagcctattaaggtgtgtagggcagatgatataattgcgctataaataaacagacagcaaggatggtgccctttccaggcagatcaataagcacataggaaaactatttagcgtcccaagtcattaacatgctgcttatacacacagatttagtgcaccagaaaaataacctttataacagtctggcagaaagtaaataaatactatttaaatttttaatttccagttgagagaggagaatgacatggcatctgcaattcaaattaagagtactattttaggcccttc

SEQ ID NO: 466450 - DNA, 2059 bp, Homo sapiens
  misc_feature (11)..(11): n is a, c, g, or t
  misc_feature (21)..(21): n is a, c, g, or t
tcatgtgctcnccccgggtantggctatcgtcgaacccaggcgctcgggcagccaacgacgtggagactcgcgggcccctttgcgaggttactacacgggttgcgccctccgaagtcttcggccttacttcccattagaacagagaaatgccatccacaggccaacaatctccctctgatgccgagccaaagctggactgtactgccatctcggctcactgcaacctccctgcctgattctcctgcctcagcctgccgagtgcctgcgattgcaggtgcgcgccgccacgcctgactgtttttcgtatttttttggtggagacggggtttcgctgtgttggccgggctggtctccagctcctaaccgcgagtgatccgccagcctcggcctcccgaggtgccgggattgcagacggagtctcgttcactcagtgctcaatggtgcccaggctggggtgcagtggcgtgatctcggctcgctgcaacctccacctcccagccgcctgccttggcctcccaaagtgccgagattgcagcctttgcccggccgccaccccgtctgggaagtgaggagcctctctgcctggccgcccatcgtctgggatgtgaggagcccctctgcctggctgcccagtctggaaagtgaggagcgtctctgcccggccgccatcctgtctaggaagtgaggagcgtctctgcccggctgcccatcgtctgggatgaagtgaggagcgtctctgcctggccgcccatcgtctgagatgtggggagtgcctctgccccgccgccccgtctgggatgtgaggagcgcctctgcccggccgcgaccccgtctgggaggtgaagagcgtctctgcccggccgccccgtctgagaagtgaggagaccctccgcccggcagccgccccgtctgagaggtgaagagcgtctccgcccggccggccgccccgtccgggagggaggtgggggggtcggccccccgcccggccggccgccccgtccgggaggtgacgggcgcctctgcccggccgccgctactgggaagtgaggagcccctctgcccggccaccacccggtctgggaggtgtacccaacagctcattgagaacgggccatgatgacaatggcggttttgtggaatagaaaagggggaaaggctagctgacagtttgtctattttattagtcgtttcaaaaaaaaaaaaaagccaaaaaacacctgctttaggggctgggtgggagggtccagtccagggtagaaaactgggttagttgagagtcggcagatgaagccagtgtgagccgaaggaaaggagcggcggaggcggctcagcggactcagccctgccaaggagaattcctagggcgggacctagagttttccgggccccatcttccgacgtcgccgccccggatgtcatcttatcctcctttgtctccgcctcccccctctcctcctcccgcgctgggctcgcggtgcctggttcctcttggagccgcttcttccgccgccgccgccgccgccgccgccgccgccgccactcggttcatcctcctgcaccagatggccaatcgagtgatcaggctgtacacagtgagccattatcgcactccatgggtctttttgttgctggtgcttatggccttcccatcatgtgttccctgtcgatgtgcactttctggtatggatagacacaggacacctctgtatgacctccctattgagcaaaagatgtatggagaatcaaaaattgaacacagtatgacatacattggccttatattgttaaagccatggagaaccataaggatgagcttaccaccatttctgtactggttggaactttcagaagagccagagacagaatatgagcaagacacagaagctacagtcttttgtaacctaactatgaaagtgacatctcatcatttttgccatggctcatttgttacaagcaagtcgctgggtccaacacaagaggagggatttacaagagggtgaatattgaagagatggtattccactgttttctacctttctgtgttgtagatttttaaaa

SEQ ID NO: 466451 - DNA, 3057 bp, Homo sapiens
tttttttttcttatgatatttttgtttgcttttgatatcaggccagctagccgcctttccacggggtagagtataaacagcaaacaaaaccgctttggtaccgggaggaaaaaggggaaaggagtcgagtcaaaacaccgtctcttaagttcctcaagatcaacccagggggaagggtcctccaccggaaagggccggattgccttcacaggaagggaaagtcactccggagctcgcagacgcgaatgccaccacagagttccaaggcggctgccagagcgtcggccgtcagttagcacctccccctccttcccagagctgtagctaagcaaccatcgggctccgggagagtctaggctcagctgctgtattagtgcctctagcggggaactatgagcgctgcaaaaccctatcaccatttttaccctcccctctctccaccccctttgcccccgcccacctcttcgccacttcggctcctccctcttctcgctccgtctatctctctctctctctctctctccgcccccccaccccccgcgtctctctctctctctctctctctctctctctctctctctctctctttttcctctctctctctctctcttctctctctctctctcactcactcactctctctctccctctccctctcctctccttcctcctccgcctcctcagctcttgggctagaatatctatgggtcgaaacgtgatgcgatgaattcgagagagagcgaaactaggacgaggagtgcggcggaagcggcgggactcccgggcatgggggcttcaccacaatagaggcagcgcccccacccgcccccgccagcccctccggagcgaagcccccaaaccccctcgggaaaaggatggcggcagcacctacccagatcgaagccgagctgtattacctgatcgctaggttcttgcagtctggaccctgcaacaaatccgctcaggtgctagtgcaggagctcgaggagcatcagctgattccgcgccgcttagattgggaggggaaagagcaccgaagaagcttcgaggatctggtggcagcaaatgcacacattcctccagactacctccttaaaatttgtgagagaattggtcctttactagataaagagatccctcagagtgttcctggggtacagacattattaggtgttggtcggcagtctctgctacgggatgccaaagactgtaagagtacactatggaatgggtctgcttttgcggctctgcatagaggcagacctccagaactacctgtaaattatgtgaaacctccaaatgtgggtgctgtctctcaaggcttccgttggctaggaaagggaaatcccctgaccccttgcacttccggcgtgaggcagtgccccaccctgcttccactcgccctccgagggctgcacccactgtccaaccagtgccaaagaaatgaaccagctacctctgttggaaatgcagaaatcacccatcttctgcatcgatcacgctgggagctgcagaccggagctgttcctatttggccatcttggaacagaatccacatgttttgtgttttaagagtggctgtagcatttgatgttcccactagccatgcattagtgatctagtttctctgcatccttgcctgcatttggtgttgtcaaagttttttattttagcttttcttgtgcatatgtagtgaaatatctcattgtggttttgatttgcatttccttgctggctcctgtatagtcagggacttaggaaaacttgcttcatcaacatggtccttagttttgttatatgtaaaatgagaagttgcattaagaatttatctttaacgtccattcaaggtttagcacaattctgtaagagattctagttcaaagagagaaaggcaaaacatgtttgcttgtaaactacttccgagagcctcagaaatggtgattatcccctcaatcttaactataaagttggtttgtatctttgaggtttgcatctttttattgccaaagtcagctgtatttttttgtctcttgcatttttttatcttgagaattaaaggacacaaagctcagttacattttaaatgtaaattctgatgaaaatttcattaggatatagtaaatgagtagaaatattgtttctaattgtacctgtgggcaaatgtgtcttcatgtggttgagtcaaatgcttatgatttctacaaaaatgggcctttctaatgcactttaaatttggattctgctattgatatctgtgtcccaataagaaatgatgtgatgtggagtatagatttcataaaaaatactgattttatctcagtatggaaccgttttttgacagattgacaaatagacaaggaagactcttaaatacctaagaaatctaattcaaatttattctaattaaatatgtaaaatattaaaccttaagtttagtataaaatgataactgctttacacctgattatcactttttgtctttcctcagtacctaacaatttttggcatctttgcctgctaattcaaattttttctgattaaatatgtaaaatattaaaccttaagtttagtataaaatgacagttgctttacacctgattaccactttttgcctttcctcagtatttaacaatttttgacttctttgcctgtcatataattgcttcagtgtgtttcagcataggcttcttgtgggtctttttattttggtctaataatctatttttcatgcatgaagataatagaaggttacaaaatcaaagtacaaaaattagtagcatttctgtacaccaaaagtgagcaagctaagataaaatcaagaagccaataatagctacaaaaaaacccccaaaatctaggaatatatttaaccaaggaggtgaaagatctctacatagaaaactacagaacacttaggaaattgtagatgacacaaacaagtagaaaaatagcctgtgctcatggactgtaaaaaacaatattgttaaaatgatcatactgctgaaagcaacctacagattcagtgtaatctccatgaaaataccaatatcattttca

SEQ ID NO: 466452 - DNA, 979 bp, Homo sapiens
tttgcatagtaacgaggagctaaatgttaatcaccaagacaatggggaaaatgtctccaggtcatgtcagacagctttgtggaagccccttccatcacaggcccagagacctaggaggaaaaaatgatttcctgagccaggtcccaggcccccttgctgtgtgtagcctagggacttggtgccctgtgtcccagctgctccagccatggctaacagggcccaaggtacagctcaggctgtggcttcagaggatgcaggccccaatccttggcagcttccacgtggtcttgagcctgcgggtacacaaaagccaagaaccgaggtttggaaaccactgcctatatttcagaggatgtatggaaacacctgaacgtccacgcagaagtttgctggaggagcagggccctcatggagaacctctgctagggcagctgcggaaggcggcgccatcggtcgccatggaaatcgcggcggatgggcggatcctgggcaggttggctgggtcgggctgcccgggcgacgccggagttgcagttggaggctgcgggaatacaaagtgacactgactgccgggtaactgtctctcaggacatttgtgctttgagtctctgcaactctggaccatctctgcaggctaaaagatgtgcctgttgctaagaggaggagccctgcagcaggaatccggtgccagctgacctggaacaacctgatctccagaaagcatccctgttatactcaaatgggccttccagatgagccctggatccagcctttctttgactatgaacctaaacgtaagaaagagaagtttcttgactccctaaaaacgagtcataatgctttctgaaactgagtctcttctgcttctggaaactgagtcttagtgcaaagaaatccctctgtattttcttgatttccatcttgattctctattttaaagataaaatagctgttgctttgtgtctgtgtagagtgtggc

SEQ ID NO: 466453 - DNA, 1035 bp, Homo sapiens
tgaactcaacaaataattgagatgctctgcaataagctctatattagaaaaaactcaaggttccagggatcagaggatagaatgatcaattctataagaggtggtggctgtaacggaataccatacagtgggtggcttataaacaacagaaatgtattgctcacagttctagaggctgggaagtccaagattaaggcagcagtagattcagtgtctagtgagggccccttcctggccccacctccaaataccatcacattgaggatttggtttcaacatgaacttggagaggacacaaacattcagactctagaaagccttactcaacatttgaaaattgaacttgatcctttgggcaacaggaaggaacatgatgagataaagactttagaatgataatccgaggttagaggacatgagaaaaatgcctaatgcagcacaggatacagattctccaaaaaactttaattgacctttcaacttccctttctcccttaaagaaagcagggctctgaatccccaagacaaagtgcatccagtattatatactgagaagagaaaatgaaccaagaataaggttctaccatggtgttgatatcagtacagtatccacagatgggagaaaaaaattcatctgccaaccatggctgtcagaactgcaagcatggggttaactcactgtccttcacaaataccctgccccataccaacctggcctgtctttccatcgcaagagtgacggtcaaatatggctgaacaggagcaatttcatatgaattacttcttagattaactgagcaaacaagattgcaacttgctaaaagccaaagtacttccacttccttcaaaagcaaccacttatgactgatttctgctcattaagccagactctcggaagatctctccttggcaatactttactagtttaaaggagccactggcaaaatatacttcaaagtaagcttccctggattggtcttccacaatgcagctgtctcactgattcatcctggcccctgcccactcctgtccatg

SEQ ID NO: 466454 - DNA, 1759 bp, Homo sapiens
tcatggcataaggcagagcaggagcaggcatctcacaggatgagaaggagccatagatgtagagagcatggactctggagccagccaggctgtttaaagttgggcaagtcaccttgcctctctggtcctcagtgtcctgatctacaaaatgggcaaaataatggcacttacatcttaaggcttttgtgtagaggaaacacattgatacacatggaaagtgcacagaacagtgcctggcacatagagtggaactggtggctttataagaaaaggaagagagacctgagtgagcatgctcagccccctcgacatgtgatgtcctttgccacctcagtactctgcagaatccccgccggcaagaagtccctgaccagatgcagcccctcaaccttggacgtttcagcctccacaactgtacttctgtcaagtccaaatcaagcagaatgggttcacttgtaagcaaaccacagaagggatcagccaccaacccaacagatgaacaacttgacttgctttccaatggagcccagcatttgaagctgtgataattgtcagtttaaatgttagctgtctatgtcctccaacagctcagagactcagagttgatgcgctggattctactgcaagttgcgtcttgataaacatagttactatgtgagccagcaaattccatttctagatatatacccaagagaaataaaaactcatgttcacaggaatgcttgtacacaaatgatcatagcagcatcattcataatagccaaagtgggagcaaaccaaatgtccatcaagcaatggatggataaacaaaatgtgatccagtcatacaatggaatattattcagccattaaaagaaatgaaatactgatctgtgctcaaacatggatggaccttgaaaacattaggctaaatggaaaatgccagacacagaagataggacacataatcagacacatgttgtatgattccatttatatgaaatgtacagaatgggcaaatccacagagacagaaagcagatgaatggtttccaggggctggggggagagggatgaagaatgactccttaatgggtgcagggtttcttgtagggtgaagaaaatattctaaaattgattttataatggtgattgcccaactctgtgaatgtactagaaaccacaggtagtacattttaaaatggttaagtggtaaatgtcttttttaaacattttattatcactatatatatcataaaagttattattttgaccactattaagtatgcaattcattgacattaagtacatttacaatattgtgcaactgtcaccaccatccatctccagaactttctcatcatcctaaactgcaactccatacccattaaatacttgctattactccctcccttcccccagcccctggagatttgttttgttttgttttgttttgagatggcatctcagtctgtcacccaggttggagtgcagcagtgcaacctcagctcactgcaacctctgcctccagggttcaagcaattctcctgcctcagcctcccgagtagctgggattacagggacacttgtgattgcatttagagttgacctggataatccaagatactctccccatctcaagacccttaactcaatcacatctgacagttacttttggcatataagaaagtaaagtttgaggaataagttgagggatcaaggataatatgcagttagaaggacaaccaaagtgtgaccgtaagtcagtgtgcctggggttc

SEQ ID NO: 466455 - DNA, 2383 bp, Homo sapiens
agggcccaccctgatggcctcctctacccttaattaccctttagatgcagtcattgacgtggtgacatcacgttttccctggtggcctgagcagggacacatgagggatggacattcttcttgtcctggctgtgctgtgggcccctccctctctccctctccttcctgcctgtgggtggtggtgggaggcaggggtgcggaatctaacctggctgccctgccctctgcctcgtgacctcaggggggttgggggctcctcttttgctcgcagcaggcaccccttgctcatctcctatggttgttgccttgtgggcaccccctctcccccgcagtggggccatctcattgcccttccccagtcgcgctaaggtgggctttgcctggaccttcacggtgcccctggaggctccagggtgtccctcaggtgcctgaggctgagtggcagtgtcgttcctgttcccagtgccccctcctacagtcgccgctgcagtgtctgtgtgtgggtcctggggagttttgagggggccgaggcggaaagtgaggcaccccctcccacacgggctgctgtgtgctccaggactgattgggacacctgccccctgctcccctttgccagtgagcacaggacatctgaggggatctgcaatgggaggggtctccacctgcagggaggaggcgctgtctgcagccacagcctgtggagcctgcagagctgctcaagtcaatgcacacccatgttggtctgctctgctgcattaccgacccttcaaggaggtggcctctcgtaatcacccacccaacaggagacagcaggagagtgagaaggacaaagtaagatcgctgctgcagatagagcggggctggcagatgactgatgtgggccccttgttgtacctccatctccataaagttgttctaggccatgtgggagtctcagaatcgctggtgctggtgcaggtgcagtgtggagagcctgtggaatgtcgtccgctcacagaccagcctgtgggggcagccggctggtcctcaggaaggccagggtgctcagaacagagattgccattccctgctgcactcctgccagcctccctgaggcgaggcacatcctgacgacagcccatgcgcatcagatgcctcctccatgggagtcaccaagggaaatccattctttccctgagacctctgtatgtcttgccaaggctccatgcacaggctgaacatgaactaagtctggcaagaaaaatgaggccgtggaaagcctgggagccattagtggagagcctcttaccaatctgtggaaatggctagcataattattaaatgaccttggaaggttggtggcaaactgatggaattattctgttaaataagagtgtgtccatattactgacattttatcatcaagaaaatggatatagaaaatatttaggggattgttaaaattagtgattatggcaatatggttttgtgaataaaattttgatttatgaagtattcacaaaaattatttcaaagatatttctttgaacagcaaaggtcaggagaagatttgaaaattaattagaaaaaattcctacagatcttcaatgtagaggccataatcaaaaaggaaagtttcttcggtagtatgttcgatacatcatttaattttaaaaattatcctgaagaagaaaagatccttaatgattactgtctaaacaaatttatagatcactgtttaaagtaaataagagcgaatattttcaaatgtgataaaataacacaagtgactggtgataaaatttgaaattatgcttaatctccttggctgtgatcttatgtatataaagttaaatttaaatatatgttcatatattgattacaaaatccagaataaatgtcattttattttaaaatagcacctttgtgtacaatgccatagcatttgtattattcagatggtttgtcagttaccttcatcttttttcctctctaagattgttttacatatgggactatttccccctccaaatagtcctaaatctaaacattttgcttcttgtccaaataaataaaaataatccagacatccaatttaaaaaattgtttctttcctagactaccttgtacaggaaatatcaccaagattctttgtcactccatcttccagatttgggttaaagaaaatggggtgattcacaacagatgtgagaattatgaacctcaaaggttgcccagttccttcctatttccccctgttcctaaaatgacagagcacttaggttttccctgcatttgggtaactggctgactgcaggctgtggaccttggccagatgggaggctgtagtgacagaggctggatgagaagccaggttccctctaacacccctaccccccacccc

SEQ ID NO: 466456 - DNA, 1350 bp, Homo sapiens
cattgatattaacaagaaaagtgctgttaggacaaataagtttgagaagtaggtttaacaaaatgaaagagtgtgacctcaccaattatcttcaggttcattctttcgattatgtgtatgaacttcagatggagagtgctgtagacaccaaggctctcttcttggccatgggtcagggagggtatcttcaggggctttctcagcctttctgtcgccaggaagtttcaatcctccagacaaagaaggagtcagcacgtaagccggactgtctaggaaaacctccccttcctgtgtctggaggtgttgaaaaaaataattcaacaatgctgcccctgctggccaccagtgtaccatgcaataattccatggcccctgccacagcccaggaaatggaggaaatggccaggcaggtcatcactggtatttggagacttgtggttgaacaggatcgagggatccattcccgcagtcactggtatttggagacttgtggttgaacaggatctctggaatgaatatctcagtggatgccaggcacgatgtttataacgttatattcactcacttataaagtactttcttaaatattttagctcctctacaaggatgtataatccttgaagcaggagctgttcccacccaagaaaatgaaaatctcagtcattaagtacacaaacacgggtccagattgcttggtttcaaatcttggttctgctactggccagctgtgtgatccaagaaaagctactcgacttctctgtgtcttcatctgctcatctgtcaaatggatatatgagtagtcctacttcatggagttgttgcgaggaatccattagtacctctcctagtgcctgcagccacgcaatacatatttgaaaagtaagtggaaatctgtcaagtgtaagttactgtgtggatattggtgtgatgcacagagaagaggaagcactggaagatgatcatggaagggagagaaggcaagcttgcaaaatcagcattggctatttaaataatatctgcctatgatgctgtcaaggaaaaatgttgtggagccgttggaaacgtgacattgaagctcaaaacagaggcctgaggggattgattaatttcccagagccgccataataaggtaccacaaactaggtggtttaaaacaataaacatttattgtatcacagttctggtggccagaagtctgaaatcagctacaatctgatttttcttgtgtttacagcaaaactgaaaagatttttttatattcatcattttcacatccttaccttccattttctcttgaacacacaacaattagacttagttgctgctgctccatagaaactgttcttgtca

SEQ ID NO: 466457 - DNA, 1134 bp, Homo sapiens
aataggagttattctataaaaaatgagcagcagcagattagtttgggatgcatcttcaggggatgctgaaacaacaacagcatttggtttcctctacacccctgtcatccgtcccccacaagcccagggagtgggagggccagagctctgggacatcctcctggcaagcttcaatatagctgtggaagtctgcagtctacaagagcctactatagacattctacaaccaagcagaatcatggaacagccgacttcaagcaccaatggggagaagaggaagagcccctgtgaatccaataacaaaaaaaatgatgagatgcaggaggcaccgaacagggtcttagcccccaaacagagcttgcaaaagacaaaaacaatagaatatctaacaataatagtgtattactacaggaagcatacgaaaataaattcaaatcaactggagaaggaccagtcccgagagaactccatcaatcccgtccaagaggaggaggacgaaggcctagactcagctgaaggatcttcacaggaggacgaagacctggactcatctgaaggatcttcacaggaggacgaagacctggactcatctgaaggatcttcacaggaggacgaagacctggactcatctgaaggatcttcacaggaggacgaagacctggactcatctgaaggatcttcacaggaggacgaagacctggacccacctgaaggatcttcacaggaggacgaagacctagactcatctgaaggatcttcacaggagggtggggaggactagtcaaacatggagaaaccaaattggacaaatcctcactaccaatggcgatgattacaataaaatcaagtttgaggagctgatgaccgtgtatatctctgcctgttgtctgatggtgggaaggaagggaagggaagaggtaggcatttgagaagggaaggatatgagatcctgtagggttggcggacagacccacaggttgacagtttcccagacattgtaaataaggcctgggggaggacttattcctagagacaaattttcttcttaaaattttatctaacaggagaggaagaaaaggacttggtgtttggagcatgtgaatatgtagaagggcatttaaaaagatctgtatt

SEQ ID NO: 466458 - DNA, 4037 bp, Homo sapiens
tgaccccgtggagtagaaagtttctctctctctctctctctgtgtgtgtgtgtgtgtgtgtgtgtgtgtgtgtgtgtgtgtgtgtgcgcgcgcgtgcgcgcatggggaatgcaagaaggtttggaccataagagatggagggaacaaaacctcacaaagacggcttttaatgaagaaatgggtcaggatatgttagctgagctaattcaggttatcatcctggctgctgatttactatgcaaagattctgatgaatcaccagtggccagggaaaggaatgtgattgtgcacacaaacccagacccctccaacactgtcaataggatatccggaaccagggactctgagtgccaaaccgaggatattctgattgctgccccatccagaaggagaatcagagctcaaaggggtcaaagcattgcagcttccctttctcattctgctggcaacatttctgccctagcagacaaaggtgacaccatgtttactcctgcagtgagcagccgcacaagatctcggagccttccccgggaaggtaatagaggtggggatgctgagcccaaagttggcgctaaaccctcagcatatgaagagggagagtcttttgtgggtgaccatgaaagaacccctaatgatttcagtgaggctccaagcagcccgagtgcccaggaccaccagcctactttgggcctggcctgctctcaacatcttcacagcccccagcacaaattaagtgagaggggaaggtcacgtctgtcccgaatggctgctgactctggcagctgtgacatctcctccaactcagacacgtttgggagccccatccactgcatctccacggctggcgtcctccttagcagccacatggaccagaaagatgaccaccagtcatccagtggcaactggagtgggagcagctccacgtgcccctcgcagacctcagaaaccatccctcctgcagcttctcctccactcactggctcttcacactgtgactcggagttgtcactaaacacagcccctcatgccaatgaggatgccagtgttttcgtgacagagcaatacaatgaccacttggataaagtgagaggccatcgggcaaactcctttacctccactgttgcagacctgctggatgatcccaacaacagcaacacaagtgacagtgagtggaattacctacaccaccaccatgatgcctcctgccgccaggattttagtcctgagcgtcccaaggcagacagcctgggctgcccaagcttcacaagcatggccacttatgacagctttctggaaaagtctccatcagacaaagcggacactagctctcacttttcagtagacacggaaggatactatacctccatgcactttgactgtggtctcaaaggtaataagagctatgtctgtcactatgcagccctgggcccagagaatggccagggtgtaggggcttcccctggtcttccagattgtgcctggcaggactacttagaccacaagaggcagggaagaccaagcatctctttcaggaaaccaaaggcaaagccgaccccacctaaacgtagctcatcattgaggaagtctgatggaaacgcagatatttctgagaagaaagaaccaaagataagcagtggtcagcacctgcctcacagttccagggaaatgaagctgcctcttgatttcgccaacacgccttctcgaatggaaaacgccaatcttcccaccaagcaggaaccttcttggataaaccagagtgaacaaggcattaaggaacctcagttagatgcttcggatattccaccattcaaagatgaagttgccgaatccacacactatgcagacctctggctcctaaatgacttgaaaacaaatgatccttatagatctctatctaattcaagcaccgctacgggtaccacagtcattgaatgcatcaaatctccagagagctctgaatcccaaacatcacaatcagaatcaagagccaccaccccatctcttccttctgttgacaatgagtttaaactggcttcaccagaaaagctggctggcttggcatctccatcaagtggctattcaagccagtctgaaacgccaacatcctctttccctacagctttcttttcaggtccattgtctcccggaggtagcaaaagaaaacctaaagtcccagaaagaaaatcctcactacagcaaccctctttaaaagatggaactatatcactgagtaaagaccttgaacttccaattatacctcctacccatcttgatctaagtgctcttcataatgtcttgaacaaaccattccaccaccgtcatccactgcatgtttttactcataataagcagaacacagtaggagaaacactgaggtcgaatcctccaccgtcccttgcaattacaccaacgatcctgaaatctgttaaccttaggtccatcaacaagtctgaagaagttaagcaaaaagaagaaaacaatacagatctcccttatttagaggaaagcacactcacaacggctgccttgtctccaagtaagattaggccgcatacagcaaataaatcagtatctcgtcaatactccactgaagacaccatactgtcctttttagactcttctgcagttgagatgggaccagataaactacatttagaaaaaaactctacttttgatgtgaagaatcgctgcgatccagaaaccataacatcagctggtagcagtcttctagattcaaatgtcacaaaagaccaagtgcgtacagagactgagcctattccagaaaacacgccaaccaaaaactgtgcttttcccacagaaggatttcagagggtctctgctgcccgcccaaatgatttggatggtaaaataatacaatatggacctggtccagacgaaactctagaacaggtacagaaggcaccctctgcaggtctggaggaagttgcacaacctgaatctgtggatgtaatcacatctcagtcagactcaccaactagagcaacagatgtaagcaatcaatttaagcatcaatttgttatgagccgccaccatgacaaagtgcctggtactatcagctatgaatcggagataacatctgtaaattcattccctgaaaaatgttccaagcaggaaaatattgcttcaggtatttcagccaaaagtgcctctgataacagcaaagcagaggagacccaaggaaatgtggatgaggcttcattgaaagaatcatcaccgagtgatgactccatcatttcaccacttagtgaagactcccaagctgaagcagagggtgtgttcgtgtctccaaacaaacctcgaacaactgaggatttatttgcagtcattcacagatccaagaggaaagtacttggaagaaaagattccggggacatgtctgttcgaagcaaatcgagagctcccctcagcagtagcagcagcagcgccagttccatcacttcacccagcagtaatgtgacaacccccaacagccagaggtctcctggtctcatataccgaaatgccaaaaagtccaacacatccaatgaagagtttaagctgttactgctcaagaaaggcagtcgctcagattctagttaccgcatgtctgccactgagatcctgaagagccccatactgcccaaacctcctggggagctcacagcagagtcccctcagagcaccgatgatgcccatcaggggtcacaaggggctgaggcattgtccccactctctccatgctccccacgagttaatgcagaaggcttttcctcgaagagctttgccacctcagcatcagcaagggttggacgttctcgggcccctcctgcagccagcagcagccgctacaatggtaataaagatttaaaactatgaagaaggttacagtgtaactattttggtactagaaccagttcatgctggccgaaacgacaatggtttatggacttgcatccattttgtatttttgtaatatttgtaaatatgaactttttaaattgctgcaaagatggtttcttttgtaagatgttttcaac

SEQ ID NO: 466459 - DNA, 1845 bp, Homo sapiens
cagctgactacactctgcaactgactgatggcacattgcataaagaaacgcgaacccagcagcactcctgccagcggcaattctgagtgctcatttccactttgccaagacattacatgggaaggcatgtgcgtttaagggcatccaattgtttctgtatcagaacagcagcaacatcccgggcaggcctttcctctggagttcacgtgtaggtcgtactgacacacaacatggcctaaatggaccatggaggaggaagggaccccaaatccaggccaaatgggagcagggttgtcctcaggaggaccccagctagaagactttctctggaacccacggtgcctctcactaaagtgccccaacgttggcacaacacctaccgaattgttgttgctgactctctatgcccatgattcaaccagaacaacattgattcgttaaaaggtgcatgaataaacttgactctggaaacaacaacagaactgtaaaaagatgaatttgtgtctttcaaactactaagttcattgtcatttgttacagcagcaagaggaagctgcaatataccctctgaccccctccttagccacctgcatttcagcctcaggagagcctaaaactagagccctgtttccgtcaagtattgctgggacatactggagatctgaaaatgttgttagccaataactaaggagaataccagggaactaaacagtctgacttgcaaagaacaaattctgctccctccccaccagcttgttccctttccatatgttgtctccagatactgacattctaacacattcagaacaacctatattaacacaaaagctacttcaggaaaaattaaaatacttacaagctctaacttttttcattcaaaatgaaaatagctttaccgggccctaggcagataatgtatgtttgtacagcatagagaactattagaattgagcaattcccatggggaaactggcatgttcagactctaaattaacatttggaagagttgcacagtagtaactgagaggcagctttctaatcttttgttaaagttcataaagagtgtctatgcccatttctcatttaaactttaaaacagtccaaagttaatgttattgagatgcctgctttacagctgggaacaacgaggctcttccaagattacagaaggggttagtgacttggattagactagatcagtttggtctgtttagtgcaatgttgtcatgtcgtctgagcacctgctatgtgccaggaacagttttggtcccaggtaggcagacagatatgggggccatattgccctctgccctgcacagactgtgtgggtatctcccaggcctatggggtcccccactttgttactctgagcagagtaaactgtgcagctctcagcagttccaagggggcagtttccctggaaccgacctcccactagaaccctcatggagcccccggcacggaccttagacctacctcacccacccacaggagcactgggactttgggataaggaaggggacttttcctctaagcctgtgggatctccttgaggaatccacctgcactcatcctaacccatctatgaaataaaaatcaaaagcagcgttcaagtaaatggggcccattcacaactgggggccatgaggaggactcatgcattaccttctttttataaccacagacatcttcatgttaaaaagagaaaaatcgaaacagagtaaacccagtcccttctgcctgctgggctccttccagggacctgcctttcccccccagtgacaggtgatacctgccccggcccccagttgatgtgacctctgccctagttggtgtgaccttcac

SEQ ID NO: 466460 - DNA, 2437 bp, Homo sapiens
gtggagaacgactgagctcctctgtgctttggtgacatggaaatggtccttccctctgcctctgagaagctgggctggaccaacccccatccgttcaccctttcgtttactcaaaaaatgcctgtgggtaccacagcaagcaaacagatgaaccccgccctggtggagatggtggactattggaggacacaggcagagaactggaagttacaacgtggggagactggatttgttggactggatgtagtattgggtgttgggttgtggggagatgcagagaaagtcaaagacaactctagggcttcaggtttggacaaatggtggagggagatgctgtccctgagacacagaaagaaaaagaaggtagttggtcttatacagaagaaggtctgtggtctcatgggaaggccatgtaaattgcacagagaagttgcatatttgggtctagagcagaagtcagcaaactctgaaaatggccaaggagaggatgttttttgtcttgcgggttgtacaatccttgctacaactactcacctccactgttgcagctggaaagcagtcacagatgatgtgtaaatcattggatgtggctgtattccagtaaaactgatttaccaagatggcacattgcataaagaaacgcgaacccagcagcactcctgccagcggcaattctgagtgctcatttccactttgccaagacattacatgggaaggcatgtgcgtttaagggcatccaattgtttctgtatcagaacagcagcaacatcccgggcaggcctttcctctggagttcacgtgtaggtcgtactgacacacaacatggcctaaatggaccatggaggaggaagggaccccaaatccaggccaaatgggagcagggttgtcctcaggaggaccccagctagaagactttctctggaacccacggtgcctctcactaaagtgccccaacgttggcacaacacctaccgaattgttgttgctgactctctatgcccatgattcaaccagaacaacattgattcgttaaaaggtgcatgaataaacttgactctggaaacaacaacagaactgtaaaaagatgaatttgtgtctttcaaactactaagttcattgtcatttgttacagcagcaagaggaagctgcaatataccctctgaccccctccttagccacctgcatttcagcctcaggagagcctaaaactagagccctgtttccgtcaagtattgctgggacatactggagatctgaaaatgttgttagccaataactaaggagaataccagggaactaaacagtctgacttgcaaagaacaaattctgctccctccccaccagcttgttccctttccatatgttgtctccagatactgacattctaacacattcagaacaacctatattaacacaaaagctacttcaggaaaaattaaaatacttacaagctctaacttttttcattcaaaatgaaaatagctttaccgggccctaggcagataatgtatgtttgtacagcatagagaactattagaattgagcaattcccatggggaaactggcatgttcagactctaaattaacatttggaagagttgcacagtagtaactgagaggcagctttctaatcttttgttaaagttcataaagagtgtctatgcccatttctcatttaaactttaaaacagtccaaagttaatgttattgagatgcctgctttacagctgggaacaacgaggctcttccaagattacagaaggggttagtgacttggattagactagatcagtttggtctgtttagtgcaatgttgtcatgtcgtctgagcacctgctatgtgccaggaacagttttggtcccaggtaggcagacagatatgggggccatattgccctctgccctgcacagactgtgtgggtatctcccaggcctatggggtcccccactttgttactctgagcagagtaaactgtgcagctctcagcagttccaagggggcagtttccctggaaccgacctcccactagaaccctcatggagcccccggcacggaccttagacctacctcacccacccacaggagcactgggactttgggataaggaaggggacttttcctctaagcctgtgggatctccttgaggaatccacctgcactcatcctaacccatctatgaaataaaaatcaaaagcagcgttcaagtaaatggggcccattcacaactgggggccatgaggaggactcatgcattaccttctttttataaccacagacatcttcatgttaaaaagagaaaaatcgaaacagagtaaacccagtcccttctgcctgctgggctccttccagggacctgcctttcccccccagtgacaggtgatacctgccccggcccccagttgatgtgacctctgccctagttggtgtgaccttcac

SEQ ID NO: 466461 - DNA, 2274 bp, Homo sapiens
cctacccccacctcccaccttaaagcaccttataccacggaaggctctcagcctcttctttcctctgcgaacgcgctgagcagcgattgaaaacgttttggtcctctgcaggtttgaacagggctagcaggtctctctccggatttctagggctatgggggcgcattctggggtctctgcgcaagaccagctctcagctctctctcctttcctcggactctggagcgggagcgggcctttccctcgggtcgaccacgccgtaggggacgccgtgaaaagagccgtcgcgcccgctgcctcctgcccgctgcgcagagggctccgcccgtagaggtcaacttccctcacccttttctctctcctgcttgccctccctccgcccggcccaggcgcttccagccccagactgtggccactggctgaggagtgcgagtcggctgcgctgccctgagcctaatccctcttccgggcccagacccgaggtccgcgctcctgggcagtggggaagctttagtgagcaggcttttctctccgcagcaaacttgtagccagaccagatgggccgcccagctctctcgggactaggcaggtgcggatgagttaatttttccgcattacaaagaaagatgacccagcccgcccttggactctcttttcccaaaatctcccaaccaaacccgcggcgttcatgcctggctttaagacgccaagataactctcttgttttggcattgtcgcaatgtccaaatcggtcaaaggagtgggataaggtgaaaggaccaggtagcagttccgcaccacgactttggagccaaagaaaaacccaggccgaaaaagcgagccttgatgtctttgttctgccttggcctgcaggggttgggaacaaaggagaggagctaagaggatgcaccaaagtagccgcgccctccctgcctggcgctgtccgcggtgctgaccgtggcccttttctctctccaaacataaggtcctcagccgcggattttagtgcttacttggtcaccaaagggacgtgcaatggactcaagtgtgggcctcgaggcttaactaggaaggggtgggtcggggacccaccaggtgaaacagggcaggagcccatgcagcttgccaccttcggccaggccttgcagcccggcagccttagtagacgggaacagcttgacccgttgagatactcaaggacaaccctccagggaaatagtatgtttccttcctgggaacaagatgctagcgcggtgcaccgggaggtatctggtgtcaacaatgccagagcgccctctgctgcctcaaagaggcaggacaccaccaggctgctgcctcgcagtttgatcttggactgccacgctagcactgagcaaggctctgtgggcatgggacccactgagctatgtgtgggatataatctcctggtgtgccatttgctaagacctttgaaaaagcacagtatttgggtggcagtgacccaattttcccagtacagtctgtcacggcttcccttgtctaggaaagggaaatcccctgacccctgtgcttcctggatgaggcgatgccccaacatgctttggctcgccctccatgggctgcacccactttctgaccagtcccaactagaggaaccaggtacctcaattggaaatgcagaaatcacctgtcttcggcatcgatcacgctgggagctgcagaccggagctgttcctatttggccaccttggaacggaccccacaactttcatactgattgttaagatgggtatagaatctggattagaaataacgtctttacaaaattttgagtgtattattccattgttttcttgcttccactgttgttgagaaatccaaaatagtttttaccccagatcctttgtttttgatattttttctctttctctagaaacttataggatcttgctttctcttcacaattctgaaatttcaaaatgatggcctttgttgtaggtcaatttttattcaaagttttcaaattttattgtgttgggcacttggtagacactttcaaactgtcaatttatgtctttcaggtctaggatgtttttgtgaattattttattgatgatttgtttctctttattttctatattgtctttttctggaatttctgttattgggatactagaatttctaaaaagtttctttaattgtctatatttttctgtttcattatttcttgctttactttctgggagattttatcaactttttatttttgcattttgactttttaatttcaaagca

SEQ ID NO: 466462 - DNA, 780 bp, Homo sapiens
acgccaaaagacatccagctagcacgccgcatacgtggagaacgtgcttaagaatccactatgatgggaaacatttcattctcaaaaaaaaaaaaaaatatcttcttcctgtcattggtagtactgaacgttagatatttttttccatggggtcaaaagagcaaggtggaagaattaaagaaaaaggaacacatgcatgagatattcaatgagatactaaggagaatcaacaggactaagccaacgggccatgaaagtaggaatggggtaaatagaactgctgctgttagaaatgtctgttgggcagagattgtggtggtgcccagggctgttgaggattttaattttccatttttattttatactcatttttccaattcatttccacttttgagcatgcccacagggacaccaagtttagagcaggctctacttgccagaaacttccttcatgtattaacttcaaaatctggccttagtggaaaaactgagttcagagaaatgacgaacgatttggtgactgctatgaaagaagtctgagaagttagcacatgtttggcagaatggactgaaactctgcagagtgaaaatctcagacctgaagttgtcttcatgaggaatttaaatgctaccatcatctccaatatttatgttaatgcaggcttcattgcacttgaaagttcagaaatttgagcatcaaaatgcaaagataccatagacatgaaataaaaatagtcacaaggatatttatatctaataaagttcaacaaccaagttatc

SEQ ID NO: 466463 - DNA, 629 bp, Homo sapiens
ccttctctctgaagatctgctagcagtgaatgcccaattcttctggactcatgaaccgtcgtgatgccattgccaaaacagatgccactgtggtggcattactgaagggagctggtgccattcctcttggcataaccaactgtagtgagttgtgtatgtggtatgaatccagtaacaagatctatggccgatcaaacaacccatatgatttacagcatattgtaggtggaagttctggtggtgagggctgcacactggcagctgcctgctcagttattggtgtgggctctgatattggtggtagcattcgaatgcctgctttcttcaatggtatatttggacacaagccttctccagacttcagctgtgaatccatctggtcgatgtcttttgtgcattggtgctccaggctgcagaccttccctgcactcaccattgaaggacataagtgtaagcccacaggtccagctttgcctttgcctcagagaatgcatggttcgggatcctgcagattgcacaaccccatccaccacttgaggcacctgagcactcttcctagggaactgagatttggcctaaacaccctgcaactaccacgtcaactggcttctacttggaagtgttagttg

SEQ ID NO: 466464 - DNA, 1862 bp, Homo sapiens
gggcaggggcaaaatggcaccagcctctttgctaaaacataacaagagtcacctttgctccagttcccaacaagttccttatctccatctgagaccacctcagcctggactttattgtcaatatcgctatcagacttttagtcaaagccattcagtaagtctctgggaagttccaaagtttaccacattttcctatcttcttctgagccttccaaactattccaacctctgcctgttacccagttccaaagttgctaccacatttttgggtatcttttcagcaataccccactcctggtaccaagttactgtattagtccgttttcatgctgctgataaagacatacctgagactgggaagaaaaaaaggtttaatgaacctacagttccatgtgactggggacacctcacaatcatggtggaaggtgaaaggcacgtcttacatgttggccgacaagagaagagagcttgttcaaggaaactcccccttatataaacatcagatctcatgagacatatttactatcatgagagcagcacaggaaagacctgcccccatgattcaattacctcccactgggtccctcccacaacaagtgggaattcaatatgagatttgggtggggacacaaccaaaccatattaaagcccatttttgttctcaggactagcttatgatctagttgggaagaaaaaaagttcacataatatggtccataagcaatgccagttggtagtattatttagagctattgagaaagggaagctctcttcctataagggctggtttttgagctggcagcaggtagacatagagtgtggtgagcactttgctatcatagggaaggagctatcattcaggaaagcaaagtccagcaatgaagagaagtgaattaaatggacaaaacagattgctgtggaacggtttgtgattgctattttgaaaacctggtcatatatttttagcctgcaaaacctctgctttgacacatttcctcatggggacacactgcagctgctgaaagaagggaagtcccagcactgctttctcaccatggaacagcaggagaggaaagccttttgaattctagccatgataaccctaaagtttacatggccacagactccagctttgccaggagaactttatttctgacacggattgtaacctgcagactgggaaacagagagcctctggctgagaccaaaagcaagcacttcaaaggaggaagagtggaacaggagttttatgctaaatggactggctaaatgtttatatttaacaggttacaggaagatgcatatttaacagattacaggaagatctatgactgttcatgaaatggggcctcacgcaggcataagcaaacatgcatgttacatatgtcccatatccactttggggtggaaacttaacattaaaatgtagtaaaattaggttttgtatctcaaaaggtgaaacttaggacacaaagtgtttagtgtgcagcttccataaactgagcagaactaatctgtagttggtggtcatttatcaggaagggatgctttgtgaaacctgtcagctgctatataaagactgcaaaaatgaaggggaggctggctctggcctcaggtggtttgttgaagtcagctgaggactgagttccattctttgttttccagggctggtttctgtttaactctcaggaaaaaaaaaaaaaaaaaaaaaaaaaaaaaacattctggcaatgcatgtggtcaaatcaagggtagagagatatgcagatgttcctgtgttattaggaacagagcatttctcaatagagctcatagatcagaaagtagcctgtgagttcccctttatcttacctgcaatagga

SEQ ID NO: 466465 - DNA, 2344 bp, Homo sapiens
aggtgatagtcccttcgtgtttgccaagatgtgtccagagttggttccttctggtgggttcctggtctcactgacttcaagaatgaagccacgggccttcatgctgggtaaaggccctgctggacaagcagttggagtgagaatcaagacagccggaccacaggaccagacccaccaggatccacatgacagtggatctgaaacttcatcaaacagtaagaggaaaaaggcattttctctagaagttcaaatactctcactagatgaaaaaattaaattggacagcacagaaacaaagatcctaaataaatctcaaattgaagccattgctgcctcattaggactacagtcagaggacagtgctccacctacagaggaaactgcctatggaagatcactaaaagtggcactgggtattctgaatgagagaacaaatttgagtcaagcaagcacttcagatgaagaggagatcactatgctgtctcaaaatgtaccacaaaaacagtccgattcaccccctcataaaaaataccggaaggatgaaggtgacttaccagggtgtcttgaggaaagggaaaactcagcatgcttgttagcatcttcagagagtgatgattccctgtatgatgataaatcacaagcacccacaatggtcgatactattccaagtgaagtggaaacaaagtcattacaaaactctagctggtgcgagactttcccttcactttcggaagataatgatgaaaaagagaacaagaataagattgatatctcagcagttatgtctgtgcattctgcagtcaaagaggaaagtgcatgtgttaaagatgaaaagtttgctccacctttgtcacctttgtcatcagatatgctcattatgcccaaagctttgaaagaagagagcgaggatacctgcctagagaccctggctgttccctctgaatgctctgctttctcagagaatattgaggatcctggagagggtccctcaaatccatgcttagataccagccagaatcaaccttccatggaatcagagatgggggctgcagcatgccctgggagttgttcaagggaatgcgaggtttcatttagtgcctctaaccctgtctgggattattcacatcttatgagtagtgaaagaaattttcagagactggattttgaagaacttgaggaagaaggtcaagcctctgacaagtcattgcttccaagtcgcattaatctttctctattagatgatgatgaggaagacgaagaacttccacgcttcattttacattatgagacacatccgtttgaaacaggaatgatagtctggtttaaatatcagaaatatccattttggccagcagtgataaaaagtatcagacgaaaagagaggaaagcaagtgtgctttttgttgaggcaaacatgaattctgaaaagaagggcattagagtaaattttagaagattaaagaaatttgattgtaaagagaaacaaatgctagtggacaaagccagggaggattatagtgagagtattgactggtgcatctcactaatttgtgactacagagttagaataggttgtggttctttcacgggctctttgcttgagtattatgctgctgatattagttacccagttaggaaagaaacaaaacaggatactttcaggaacaaatttccaaagctgcataatgaagatgccagggaaccgatggctgtaacttcccagaccaagaaaatgtccttccaaaaaattctccctgaccggatgaaggctgctcgggaccgagccaacaagaacctggtggacttcattgtgaatgcaaagggaacagagaaccatcttctggccattgtaaatggcacaaaaggatccagatggctgaaatcatttttgaatgcaaataggttcacaccctgtattgaaacatactttgaggatgaagatcagttggatgaagtggtgaaatatttacaagaagtctgcaatcaaatagatcaaataatgccaacttggataaaagatgataaaattaaatttatcctagaagttcttctgccagaagcaattatttgttcaatttctgctgttgatgggttagattacgaggcagctgaagcaaagtatctaaaaggaccatgcttaacatgaaactgtctgcatttctacctgttagacaatggttgctcttgggctcttgttatacagtcatatggctacacgtttatgtaaagtttgcaaaagtttggtgttttgatttataataaaactgttatattattcaccttggatttttacttcatcctacttgaaattgtgcagctacataagtggtgtttctccaaattt

SEQ ID NO: 466466 - DNA, 1688 bp, Homo sapiens
tcagatctatggggaatggtcgatttctccctaaggatgtcagagtgtgtgtagctgccaacgtgggcatcaatattgaagtacctgacaagtgtcctaggagcccatactttatctggaagaaatatccagattatgacagtaaggccaaagacaggagacagatgatcaaagtggtaaaggcaccaacagttccatcttatactttgccaacatctgtagttccatgggtaattgaccaaactgattttggaatgcttggaagtcacttgaagcaactggacccaaatggtttccttatgccaaagccacacatcacccagatgcattcaagatcacggagactccttttgttataccttgtgtctgccatattctaccacgctgccaaattctactatgaggaattaccagaaatgcaaaccaatacctggtaggataccagagaaagcttagagatgcttacaggagagaattaactggtctatctaccttcatggacaagcactctgcacgcatgtggagtcacacaccgaatgctccaggcaacctctcagggggagagagaggtggttcaatcaaccaagacacactaaaaattcagggtatttctgaagatttaactcctaggaatttccacatcactgtcttccctgctgggcctgggaagaagcaaacaggcaacaccacaaggctatcttgaaagaattttggttttgggataaagcccaaaggcgagcctgcaaaccttaagccgtcacattcagaagatacagaagtagcaaaggtgtggagcccaagaccactccctggtgagcttcctgaggctcacctccatctgatgatctgcttcctggaaatcccatccatcctctgacagttagaaacatgtgattcacttgttcagtgaacatgctagtcaagctgctgttctaacatgaaatgggggccaagcacaggagtgtcttcagtaggaactgtacctccagaacttcaatttctacagaagattcaccgactgttcccccaaaaaacagtcctgaaatcatgcctaggagttaaagtgactaagaatgcagcacaggacccctgcacagataggccaggtagccaaaggttgccaatcattgcattactgatgctaaggattttattacttgaagaaaaccaggaataggctatttgcaaagattctaactcttgggaattcccatatcactatcttccaagatgccaggtgagccgtggaaaagcagacattcccatgagaccattttgaaagttgtcttgttcttggaataaagcccaaagatgaacctgtaagctgtgagatgttatgttctaaggacagtcaggcatgttgcagagcataagaatgatataaatggagtctggggactcaagggaagggggtgagggatagaaggctacacattgggtatagtttatactgctcagatgacaggtgcaccaaaatctcagaataaccactgaagaactcatccatgtaaccataaaccacctgttccagaaactaccaaaattttaaaaagggaagagtgctctacctgccacctactctttgtacttttctttctaaatatggtgttactagtgaaccatatttaagccatgcccacttttctcattcctttttaccatttcctttctcagtcctagcctctgca

SEQ ID NO: 466467 - DNA, 2398 bp, Homo sapiens
  misc_feature (2)..(5): n is a, c, g, or t
  misc_feature (12)..(13): n is a, c, g, or t
annnnctctttnngaaagtaggtcaaaagtgggggagagggcgaggccctttgacccccaggagtcacgcacgcatgccaagcgctactgcgcagccgcggagacgtggtccaggctcctgcccgggcctcattgtgcctcggacaacgagtgtacgcagttaccacacagttaccaagcagttacctcagagccgcggcgcagacgtaggcctcaggtctcgggcctcaggtctcgggcctcagagccagaccccgccatctcacgatgtcagagaggacccaggaacaggattttgttattataactgtcgacgacagtgatgataacaatgattgcagtattgagatggtggaagtttctgaaacagcagataattccactaatgacatagcagatgattccacttatgtcacagcagataatcccactgatgacacagccacacaaccaaattttccaggcggcaatgatggccatcaccgtccactccaaatgtcatatgggtctggctctgtcacccaggctggagtgcagtggcatgatcacagctcactgcagcctcaacctcttggactcaagcaattcttccacctcagccttcccagtagctgggatgacaggcgcacgccaccatgcccagtagcccatggtgaccaaatagtttcacagataaaccacccagtacatttaagaagatacagttacaactcagaggaagtggattttccaaaaagaggaagattctatactccagaggtacagtctagcatatcaccaccagcggaaaggcaggaaacccatgcctgggccagccctgctgtaacatctcttgagtcagcagcatgtcatgaactgcaggaagcagacctcagtgagagtttatcatatcccagaattgtctcctcaagttcattacagcagtatgtcgcacaaggtggctcatttccttgtttcggtatgccatggaactttatcagtggaggtgctgaaagtaccaatgctgtcatctcatttgccaatgctactacagcagtacctatggcagttctgtcacgaagagaatccagtctggcaaataaccctggtgtggtgaattactctgctctaccagaaaatgaaaatgtgggcccaggtagagccttgtcatctttctgcttccatcccaatttggctccagaggctgggaagttcaaaagcaaggtgccagccggtttgtgtggtgagggctgcatcctctgcaagagaggagcactgtgtcctcacatggcagaagcactgttacctctgaatattttggtaaaagtagacaccaacacggaaaacagcgtcaacacaatgaatcgctcaactttattggacagtgacagtggccaggattcttcctcatcatctgtctgtatccctcccaagtatggctatcttggtgatccaaaaagaaatgtcagagtacttaaaatccatttgctggccgtacaaaatatggccaaacctaagcaagcagcctgctacttggttcgtattttgttctccaaggaaatcctgattagcagctcagtggatatccatttgaaagacagccaatccctcgacccgaacaaaatggctgcattgagagacagagctacaaaatcctccaaggagcagcaggtcatgacagcttgcggaagaagccacccctttccttctttccagataaaaactgttcgcaaaaataaaaaacgtaccaaccgtgttgcatcggcatctgcagatagaaatgaccaaaggggcagagatggtggtgaaggctgttcttggatgtttcagccaatgaataactccaaaatgagagaaaagaggaacttgcagccaaacagtaatgctatccctgaaggaatgcgagaaccttccactgataatccagaggaacctggtgaagcatggaagttcctccaagaaaactacccaatttgtgatctctcggaaaatggaagagactggaagtcgtgtgtgacctccatcaacagcggtatccgtagccttagacatgacgtcagaagggctgaagccaggtctcagtcgcttccagcagtgacccctccagagctggagcaggagtcaaagccaggagatcccgacgccactgacccaagcacctgaacggcagctgccaaactttttttttttttttaactgttaagactattttttttgaagttatccattttatttctttctttatcacccatctcatgttctcattttcttttgccttttgaccatttatattgctgatacgatgttttctgcaaggctaattgtctttcctttgccaagaatatagtaaatgcatgataaatatttatcttgtggaataatgttcactacatatttgagggttgtattagtctgtttt

SEQ ID NO: 466468 - DNA, 5168 bp, Homo sapiens
ggaacgtccccgccccccgccccgggtgcatgcatggtggaaactccggcttgcagcgaaacagagcgctgcgcgcgggcgcgcagggagcctcgcggcccgggttgtttgtgtgcgcggacgtcaaagggggggcgcagataaagtgtggaaaccgggatgacttggaggggggaggggcaggaagccccaggagaacaaagctcctggccgtcggcctccaaagagtcgcagaagtgaccgccactggctcgtgcacaggcggaagcgggggagggcgggggacgccaggcctaaagcgcctcgtgggtttagagaactcagagagggcaccgggtgggggtgggaagaagactcaacccgtagctaaatgtttggcctttggctattttttaaggaaacgaatctcagggaggtcggggcgcgggggatgggggcatcatcgcgcctcggagatgggaagcgagttcccctccgctttctgggaaaagccttgtctcccttctttcccctccccccatcctgctgagggtttgcgttgacccatctctccgctcgggaccggcaggaggacggagccgcaggggctgaccgcggcccagaggctgcccaggggtcgcgctgctgccggcctgcgcttccgcactcccgggttcggtgcgtcgcctctcgcggcagcgcctcgcttcttccagactgtaattccacactcccgcaagcgctggggctgcggaatcgtttgagggagttggaactgcatcagatgagcacgccgggagacacgaaaattggacacgtggagaattagccctgctggagaagcgctgggtgcagactcaaacaatggtttccagcgccgaagctgaggcatcaccttccccacctccaccctcaaatggcagctgcctctatatacagcgggcacaccccttcactacccaccccctcccccaaagcctggttagggacctatgtgggctgcacgctctggagccccttgcccggacacaaaccctaggtgggcctgggctgcccgctgagtagctcattgcgcctgggatcccctgggatttagaagtatagggctctctatttttccctaggaaggtcctgtctcaaagatgccacccccaaaaattaatgtgtaaaaacccaaccaagctccagtctctgtgtcctttggcaaatctatctttcctagggcatactttcctaagctgctgggaccttgccccccatctgatgagccatacgcaggtggtctggcctcttcagagcagcttcctttagttattgtcttctccagaggccccatcctccacggcagccctaatcttagccccccagcctctctgagcccccatcccacccccacactgcgctgagctggcagcagccacagctcccccaggcagttcctctctcactgcgcggcctgtgcatctcgctggggcacacactccgcacagaagctccctcgcctcctggagctggtttcctcttacaggctccccttagagctgctggtgctgtgacaacgcctgcatctctgtgtctccctgcagcgctgcgagctgtgaatctgccttctcttcccttcctgcaaaggtcaagctgcctccttctctcgcagggccgcagttcagttctggcctgcagagcttctacactgcaacttgaatatgggaatggggtgggcatcgtgcaagggagcagtcacactcaagccaggaggcagggacaaaagggtgtgcgattcagggagggaaacactgaggacaaccctcagaaagcagtgcaggatttgcagctaaagactcaaaagagggagagaaaacgaggaaaaggctgttactaggtcgtgagtcctgaagtgtaggcctttctcctcccaccccgtgggttgccctaggggaaggccagaagaggcctcaggtgtctgcactgtgtcctgtgcagttcctagggccatgcacttccggtgaggctgcactttactccaagcaggagtcagaagcatggaattcagtggccgcaggagctcaagtcggctgcagccctttcaaagagggaccccgaagaggcctttctgccaccccagccccagagaggctatgaggctctacaagcagcagagagaatgatacggagaaaaatgagaggaaacgctattaaacttgcttcctctaaagagcgctacccaccgttttctctgaactgtacctaaaaagtcaggagagaactcgttaacttttgtttggtttaacattgccagcttcaagtcaaccgtaggccccccgaaggttttgtaaaatatttaatctagctcagacaatttcctgcagtccctaaccagaccaccccacttactgagccgctgccaaaaaggatgcttgactgcagactggcaaccagaggccttccagtcgcctggctggccttgacctccactcgaggcgccaggaaagacccttcccggaatcccgagagaccaagacctgggtaatcctggaggtctaaacccgtgaggaagcccaagaaatggagttaaagacccttttcgcacaaccgattgttgtctgtgtgaccttctgcggcccttgccctctctgaaccctctaaaatgggcatgaggatgtctcaccttcctctgggtgttatgcattttgaagcgtgggcactatgggagaggctgacgctctgtgttccccagcgccctccactcccaccccttcactgttttcttcgacattatctccctagagaacacagcaagcaggagcgggatccttcgactcggctgactctcaactccttccaaacgtgaggctgacggggagaactcctgctctgcccagtttccattcccgcctccagaataacgagccgaaaacatgtgtactgtaaataaagcctgtctaaataaagcactcgggtaaaggctaccgagaaaacactccgcatcgctctgtgctcagagcgtgagtcagcttcccagccccgggggaacaatggggaccttgccaagggtccccttctgtcgacccctgacggcccccaggcccgtttgggtggcgggagtgccggcaccctgggaccttcgggcccgaggttcgggagggctaagggcgctccaggcgaccagggttggggtccagccccaggattagcgcggccaggaatccctctgcccgcagctgccgcggaggggttgagggttaaacagacaccgggcagaggagcgagcctgccggctgcggccggcgcggcgcggcgcggggagaggacgggagggaagagggcgcacgctacctagcctcccgacgagaagacgtctcctccccacgtcaggccgggctctcgcccactcggctggccgcctctgctccctggcctctcaagtctcagcggaaagaaacgtagcggctgccaaaagcaccccactccttttattgtccccataagcctatacacgtacactagccacccccccaacacacacacacaacacgcacacgtgtgcgggagactcgaggatgccctgcctccatcgctcacagagtgagtaccaaggccgagcgaaacggcacccctttggtggaagacacagtgttgggaccagtggtggcctccgcgctacgtcttctatcgcaacctctgggtttcctttgcagaactgcataccccagagcagaggccatgtggagacctgcggcttggtcccgactggtgcagtggcctctgctctggtgtgggctggcggtttccccgcgcccggtgaccttaagggggtttccggagtcgcgcagccagcccttcctcccagcttctccggccaaggccgctctcggccgcccagcctggtcgggctcggctagtcggctcctcgccccgggcaggagtgcggttggtgaaagcactcggggcctcacccacgctctgtgcacacgcgccccgccggggcgggagccggagccgcgctccaacagcccgaaattgccaaatggtcgctgggcagggttggggatagactttgggaaccgggtttgagctggagaagacgaggaaaacgagtgaaacgggagaggcggggtggggtgacggctcataaatcatccagccccaccctcgggcctcagtgcagaggcgccctagccccacgaggaagaggaggttcacccagccactcctggccgacctctgagctctccgggagccagcgccccaccctaggctcaggccgcgctaggaccagctcccggcccagatcgtaaaccacccgccggaatcggcggaaagccgcccttggacacagcgcgcatccgcccaaggggaagtttatttatagcttgtaaacgtaaaggaaaccagaccgcgctacctcgccgcgctccggctgcttcgctccccacctgcccaccaggagggcgcgacgggtggagggaggtggggtttggttctgtgccccccctcccccgctcccgctccgctgccaggggagaacagggtcctaagaggctggcaagccttacattcctctcgggacgcctatccagtgccatgaaagccggagggggcggaggacagggcccgggcaccggagtggttagggtgggggtggccgagctggcccacttggcacggaagggcaggcaggccaggcgacgcggcgcgagattccacagctcccgctccggaccgggggaaatcctggagtgccagagagcccggggagggggcgctccgggagcctctccttgaaaggcgggatgctttccccgttcctcccgcgcacgtgtcctcagcagagcaggcaagcgctgcgcgcctggggctgcgatcctcgggtgacagcgactgagagcgcgccctctccacccccacccccgccgtcgccgcctctcctggggagctccagtctccagggtgcgctcggggcaggccccaagagccagagaaacggaaaagtgccggggaggcgattaggaagagaagacattaaaaagcccagccctgaaagacaggcagccgagctgaaaaagacgcctgcgaacccccaccccgccgcccctcgcctactgcgcccagacggcccctccttgtcccggctgagcgcacccacccccggcctcggccggggcgaattcgtgtgtgtgtgtgtgtgtgtg

SEQ ID NO: 466469 - DNA, 1660 bp, Homo sapiens
gagtcaaagaagattattttggaagtttaaggtttaatgactgccctattggatttcagatagcatggggcctcggggttccgggccgcgctgtgctatgaagcaggtcaatgagctgaaagagaagggcaacaaggccctgggcgtggaaaacatcgacaatgccttacagtgctactctgaagccattaagctggatccccacaaccacgtgctctacagcaactgttctgccacctatgccaagaaaggagactaccagaaggcttacaaggacggctgcaagaccgtcgacctaaaagaacgatgcctacaagaagaaagactgacagccttgaagcattacgacaaagccaaggagctggaccccagcaacatgacttacattaccaatcaagcagcggtatactttgaaaagggcgactacaataagtgttgggagctttgtgagaagtccattgaagtggggagagaaaacagagaagactatctacagattgccaaagtgtgtgctcgaattggcaactcctacttcaaagaagaaaagtacaaggatgccatccatttctataacaaatgtgctcaagaaatgccagcaggcagagaaaatcctgaaggagcaagaacggctggcctacataaaccccgacctggctttagaagagaagaacaaaggcaacgagtgttttcagaaaggggactatccccacgccatgaagcattatacggaagccatcaaaaggaacccgaaagatgccaaattatacagcaatcgagctgcctgttacaccaaactcctggattccagctggcactcaaggactgtgaagaatgtatccagctagaaccgaccttcatcaagggttatacacggaaagccgttgccctggaagcgatgaaggactacaccaaagtcatggatgtgtaccggaaggcgctagacccggactccagctgtaaggaggcggcagacggctaccagcgctgtatgatggcgcagtacaaccggcaccacagccccgaagatgtgaagcgacgagccatggccgaccccgaggtgcagcagatcatgagtgacatagccatgcaccttatcctggagcagatgcagaaggaccccccaggcactcagcgaacacttaaagaatcctgtaatcgcaaagaagatccagaagctgatggatgtgggtctgattgcaattcgacaatgacttgtccatccccgcttcccttcgccctcatgcggaaagaggagcggggaccgcggcaagcagcacggagcggaagggagagcagggggagagaaggcctcacctctctgtatttatacgtaagcccagggaaaacacggagatttgtacctgcgctgttcgtgctgccgctgcctctgggccctctcagcacatacatggtctcttcacagctgcccttgagttcagtgtctcctttccctgcccccagtggctgtctcagttgctctcccatagttggttattttttatttggggcagtgggcatgtatagggaggggagggggttcttcccagcctcaggtcccagctgtctcacgttgtttattccgcgtccccttctccaataaaacaagccagttgggcaaggttattaaaaaaaaagaaagaaagaaagaaagaaagaaata

SEQ ID NO: 466470 - DNA, 4050 bp, Homo sapiens
  misc_feature (2)..(2): n is a, c, g, or t
  misc_feature (9)..(9): n is a, c, g, or t
  misc_feature (11)..(13): n is a, c, g, or t
  misc_feature (21)..(21): n is a, c, g, or t
gnaccttgntnnntttctcangataccatctttcatctttacagtcatggccctcttctatgctctcatagcaagcactctgtgcattcttccatcttggtacatggttcagtggcctggtggccgaatcctgcatcgccatgagctagacaccttccttgcacaggcagtgtctacccagctttatgaaccagatcgactccaagaactcaagattgagaaactggatgcccgagggatccagcttgctgccctcttcatgagtggagtcgacacagctctgtttgctaatgatgcctgtggccagccagtcccttgggagcattgctgtccatggatttactttgatggcaagctgttccagagcaagctaattaaagcaggccgagagcgagtatctctggttgagctctgtgatggccagaagaagtttgcagacctttgtactagaggtatcaggatctccaatcttggatatgggggagaaggtctccatccaatcccaccccaaggaggaaaactggagattgctgggatggttgtgggccagtgggctggcagcagatcctccaggggccgaggatccttcggcatgcaagtggtttctgtcggtgggccaggaaaggggcatggaaaagaacagactggtagaggatccaagggacacaaaaaaggaaataagcaaggctcttcagatggagtttctaaatccctggagcttcatcaaggtcggtctcgctcccaggtaaatggaaacagtggcgcattgatcaaggaagagaagagtgatcatcgtcttccagctccatcacaatgtgccttatccagagacagcaatgagtgtaataatggtaaccgctacctccctatgaataatagggagaagaaccacttacaagagcaaaagctagaaactgtggcacaacggaaagaggactgataagctgaagatggcttcaccaaaccaggaagagggaaaaacttttacttttctgattttaggcccaagctagaggaggatataaatgcttaccctagatttctccaggattttggtgggatgtcctattgtgtccatcttttccccttccctgcctgtttctgggacttcagattcagtggtctgtttctggagaagttctggtcaaagatgaatggcagtaagactaggtcctagtctcaaattgaagatatagcaccaatagtttatttatctcctctgggagcctagtaaggcagtagctgtcagaaattgggtatcatcacataaggtcctatagaaaagctctagctttggtttttctgagcatttataatgatactcattatcaaagacttatatgataaacctatgaggttgtggggacagctgtggcctcctgaggtttttttttgttttttttttttctctatgaagtggtatctacctcttcttcactccttccaacttacctacccctggattttgtaccaccacctctagctttggcctgacaatcagataggtagatgttttcagaaaagtaaggtagtattggttattttaatttttattttttattttatacacttcaaaaaaactatcaatggcctttgtactgggggattcaagtgaatcagaaaagtactgggcagatttttcctgcctctcaaccagtgcattgtttgtaaaatagaagatgtggcacagttcattcactccctattgcccacaccatgaaagggtgggaatcagtgtaatgaacttgagaattgaggcttccagcctcatatacctccttttgggctttgtgatattcttgcccaagaagtaccatttctacagaaatacaactgactaatcttctagcagggttctttttgaaaaaccccatgcaccttaacccacagcaggtccttggtgatttttgcccagacaaccagaaggctatttgcttactgcccacttacaatgaccagatcataggaaattgaaaacagtgtcagactatttagtcctaatctgtcccagattaagagaatccatgattttcagggggagggagccctgcaatgccttgacccctgcccagatacttcttacataaaccaaagaaaaatgacaagagtgtacatctaaccagacagaagtagaaacaaagtatagaaaaacctcctctttggaatcagctcccttaatgtggtcccccttctcttggacctgcccaacctttcacaacgtcttgaaggaagcacttggacttaaaattgctaagatattttttgcagttgctatttctgtgcatcttgaatctatctgacacaatcaaatgacagtattgttaactctcacaccattaagaaaatttcttattttgtaggcattcactgtgagaggtaaaattgctgctttggcagattccaaattccctgcctttttggcccacctcaccacaaaagctccatagtttattaatttaacttctttatttgaatgtcctaaaggcacctttgtcttgacatttcccaaactgaacccatcctttctgtgcaagcctgtgcctctccatcagtgacactactttctactcaattgcctaaaccacagactgacctgggagtgaactgtcttagacttgtccctcacttctcaaatccagttgatgaaaacatctgttgataacacccaaccatttttctatttctcacatctgtttcctcatttctgtcctggctcctgtggcttagtggaggcctcatcgtgtcttacttggactgttgcagttgctccccgtcttactccttaactgggcaattttaagcaacattttatgtctaagtgtatgtacctttttccagtgaaagggcccataccttttttcaggttcttaaaggaatctgtgacacaaaaggatgttaagaaccattgctttaatccaccatgcttagtagcttctaaagtgtccctctaacatgctgctcccctgactccacggtcccttcatgatctggcacctgaccacatctcagctcatttactacctccgtactccagccataataaaatgcatcccatacacattgagctgtcaatatccatttcttctcacttgcttgtaccattgctaaaattcctttctccctttgtttctggtgcagacttaacttattgccccaagattcagctcgtgtctttatgattctttttctgatccccaattcggtgatgagtatagactcatcacagccagcccctctagtgctttgctgcatctttgcccctagattacacttgtgagcagtgactgtgcttaaccatctctgtgttcttggcacctactgcacagcacacacttagtaaatgtttgatgaataagtcaagaacagctaaaacacttttgaataagtcctttggtacaaagcagatttcagactttgaaggcagaggatatggtggcaaaaactcaggaagattgagtatgaggtttcagccctggatggtattcacttaaatgtgttttaaaattgagctctgagtcacctttgagcaatagagggatgctttgagcagagtctgaagccaggactctagggcattctttactgcttctgctgagtgactctagctgggcttggcctctctaaccactttgtgccttgtgtgtacagattctaaaaggaaacagctgagcctcaaggtgagcactagaggcctgctgaagcttgtaaacactttatccttaaatgaaaaattatttgtaacatcttttgtcttatatgggttcattatagctacagatgtcttttcctggcctttgatctttgagtgttgggactgtgaaaagttaatagaaggaaatatttagcatctggctttttaaaatgaatttattgcagacctattaggtaccaggcatagtactaaactctcatacattatttcttatccttaaacaactctccaaactagctctttttgttattcaggtctcagctcctgtcaccttctctgagaacccttccttgactaccttatctaaaatagactgctttcctttcaaatcattctct

SEQ ID NO: 466471 - DNA, 1173 bp, Homo sapiens
  misc_feature (1)..(1): n is a, c, g, or t
  misc_feature (26)..(26): n is a, c, g, or t
  misc_feature (28)..(28): n is a, c, g, or t
  misc_feature (40)..(40): n is a, c, g, or t
ncctagacgcaactgctctcttaatntnccaccgctacanctattgtaaaaggggttgagttcttgacttgattctccacttggtcgctgttggtatatagaagagctactgatttgtgtacattaatcttgtatctggaaacgttgttgaattattttatcagttctcagagctttctggaggagtccttagagttttcaaggtcctgcaggggcagtccacttccttcatagagtctgtggatcctcttgggattgctggtttgttcttgcagtcgatctggagctaaaattcaccatgcgagcctccacacactgctctgtctggagctgcaatctagtcctgcttcccatccgccatgatgatctctaccctcccaagagagaatttaattcagggaactgattatacaagagatggagaagccaaacaggagaattggagaacccaacagttttcaacatgaggaagtcactctcaactctaggctggaaagacaaagagaggagacagtgttattggagcccaggtgttgggttccataggatctcatgtcatggcgggctaatttgatgggcctagagtcatgaataatatgtagccattgaaggaaagccccacctgatgcagaagatggagaaaaactgtccgctccatcctcctgggttctaatctcctgtttttctgcctgttggttgaaccaagatggccacaaaatgttagctagtctaggaattgcaatcttcaggggtcagcctgtgtatattatgaggcacagcagaggataaatgagggatagctctcagggcaaataaatccattacaagcaaccactttgacagattaaatgagagtaatcatagctaaactgatatagaaaagtgttgaataatctatcccatctccatcccacatctttccaagcccaggctaggttaagcattcttttttgtgcttctacctccctttgtgttccccctctcaatatagcattaatttacaagctgtgtttgatagtttacttgtctgtatccttcatttgacaataaactctatgtgtgcaaagactatgtcatgtctcccactgtatccacagtgtctacatattgcttgaagtacagtgtgcactgtaaatatttgttattgaatcatttgatttgccaatgattctg

SEQ ID NO: 466472 - DNA, 3721 bp, Homo sapiens
cgtcttgctgataaaataggctgcagaaaggagccagccaaaagccaccaaaaccaagatggcaacgagagtgacctctggtcgtcctcactgctccagtcagcttggattagcatgctgccagagctctaaggttagaagcaaaaccaagataagccttacatcagggatgtcaaatccagaccatgcagtcacttcttcctccaaaacacctgaatcaggacattcttcaccatggagcctggacaaggcctcagaaaccttcttaagtcagtgctccaggcgaccactaaaagtcaagactggtggagtcaatagtggtggaaacagcagaagctacagttgtcatggcagtggctgcagccccaaaaaagagggggtgctccatatggggccagcactgggaccaaggtggacattcacttacctgtccatccccaaagcccatccctctgccatctacacgaatagctactctctgacttgaattttgggacagagctaaggatgagctaaattattgacttggatgcaaaacactactactttacaaatcattgttggactgagtgtttaccccagttttaaagttcattctatcacacagaaacaattgattttattaaagccagtttgctttttgcaaaattgtgtaacagctgtttcaacataaagcacttgaagcacaaatattagataagcacatgtacagaagggaatggggtgtcagaaataaaatgatttagatatggtacttaaggaatattgaagtatgataaaataaatccttgttatgaatcatttctgagacccatagagatagatttgtgcctatgatatgccatatctcacactttgttgcgtctcccatagagcccagcacctagcatattctctttaatactggagtgctcagtaaaggtccggagctatacaaatagaaacatattctatgttcatggattggaagactcaatattgtcaaggtgttatttcttcattacttcatctatagcttcaatgcaaactctatcaaatgccaagtaaacattttgcagctatctcaagctgccaataaaatttgtacagaaatgctaataatttagagtagcctaaataactttgaaaaagaacaaagctgtaagatactatcagatttcaagatttattataaagctgcattaggcaatacagcatagtattgccacaaagaactccttgaaccaccactgcactgcacattcgttagcagttcctgggccaaatacattgttgatgttgtgagttgtctccgctgccttacgacccatttggaactcaaatgagaaaattgctctaatttgctttttgtctaacatcatttctgtagtctaaaataaacattaaataaacaacaagtaatatgtattttgcaaatattttctcccagtctgttgcttgtcttgtcatcttcttaaaagagttatttgcagagtaaattttcattttcatgaggcacaacttataaatcatttctcttatggatcatactttggtgtgaagggtgagaactctgccaagccctagatcctacagatttattcctacttattttttctaaaagttttataatttttcattttacagttaagttcatgatccattttagctaatttctgtataagttttaatgtttaggccagtgttcccttttttgccagtgaatgtccaaatactcaggtactatttattgaaaaagctcttcattccctattaaattgcttttgtacatttgtcaaaaatcacctggacatatttgtgtgggtctatttctgagtaggtatttctattccattgacctgtgttactatccctccaacagtctcatacagtgttcattactgtagctataaaataattcttgaaaatgaggttgactgatttttaccagttcatcctttttttcaaaattattttggttattctagtcctttgctttgccacttgaaattttataaccatcttgtctgtatttacaaaaaatcctggtgagatttttatggtaattatattaaaaatagatatcaatttggggaaaattggcgcctttaatatgttgtcttccaacccatgattataatatgtctctatatagatctggttttacttctttcagaaatgtttcatggctttcaacttggggattttgcacacatttgttatatttatatctaaatattttaatttggggtgctattgcaaattatattttaaaaattttaaatcccaaccattgattgctggtatatagaaaagcaattgacttttgtatattgaccttgtattctgcaacattgttagccttcttatcagttaagggagctttttgtagattcacttatgctttgaaaatagacaaacatgtctgcaaataaatatagttttatttcttcctttccaatatgtatgcctttttaaaaattttcttaatgcactaagacttccagcataggatagtagtgaagtgttttgtagttttccttgtagaggtctttggattccttggttaggtgtattcctaagtattttattttattttatttttgcagctattgtaaaaggggttgagttcttgacttgattctccacttggtcgctgttggtatatagaagagctactgatttgtgtacattaatcttgtatctggaaacgttgttgaattattttatcagttctcagagctttctggaggagtccttagagttttcaaggtcctgcaggggcagtccacttccttcatagagtctgtggatcctcttgggattgctggtttgttcttgcagtcgatctggagctaaaattcaccatgcgagcctccacacactgctctgtctggagctgcaatctagtcctgcttcccatccgccatgatgatctctaccctcccaagagagaatttaattcagggaactgattatacaagagatggagaagccaaacaggagaattggagaacccaacagttttcaacatgaggaagtcactctcaactctaggctggaaagacaaagagaggagacagtgttattggagcccaggtgttgggttccataggatctcatgtcatggcgggctaatttgatgggcctagagtcatgaataatatgtagccattgaaggaaagccccacctgatgcagaagatggagaaaaactgtccgctccatcctcctgggttctaatctcctgtttttctgcctgttggttgaaccaagatggccacaaaatgttagctagtctaggaattgcaatcttcaggggtcagcctgtgtatattatgaggcacagcagaggataaatgagggatagctctcagggcaaataaatccattacaagcaaccactttgacagattaaatgagagtaatcatagctaaactgatatagaaaagtgttgaataatctatcccatctccatcccacatctttccaagcccaggctaggttaagcattcttttttgtgcttctacctccctttgtgttccccctctcaatatagcattaatttacaagctgtgtttgatagtttacttgtctgtatccttcatttgacaataaactctatgtgtgcaaagactatgtcatgtctcccactgtatccacagtgtctacatattgcttgaagtacagtgtgcactgtaaatatttgttattgaatcatttgatttgccaatgattctg

SEQ ID NO: 466473 - DNA, 3027 bp, Homo sapiens
ggagactgcggcgcagcagcgactagtgggagtccgatgtgggagaggggctgcggccaccgccaccgccgccgccaccaggaaggcggaggacgcaggagccaagagcaagggacgccgccacggtcatcttcgcctgccccgccgccctcttagagacactcattgcctatggatcatcctctcccagcttttgcaagcaccgggctgctcgcccgctgattttcctcctccataggctcactgcggaggcaacggcgaggtgtccgatttgtgcacttgaggcccgcaatccgggacggtggggaatctgcgcctcctggccgggcatgaagaccccgtttggaaaggcagctgcagggcagcggtccaggacgggcgctggccacggcagtgtgtctgttaccatgataaagaggaaggctgcacacaagaagcataggagccgacccacctcccagcctcgggggaacatcgtgggctgcagaattcagcacggatggaaagatggagatgaacctctaacacagtggaaaggaaccgttctggatcaggtacctgtaaatccctctctgtatcttatcaaatatgatggatttgactgtgtttatggattggaacttcacagagatgaaagagtgtcatcacttgaagtccttcctaatagagttgcatcatctagaatcagtgatacacacttggcagaaataatggttggcaaagcagtggaacatatttttgagacagaggaaggttccaaaaatgaatggagggggatggtcttagctcaggcacctgtcatgaacacatggttttacattacctatgagaaagatcctgtattatatatgtaccagctcttagatgattataaagatggtgacctccgcatccttcaagattccaatgattctcctctggcagagagggagccaggagaagtcatagacagcctggtaggcaaacaggtggaatacgccaaagacgatggctccaagagaactggcatggtcattcatcaggtagaagcaaaaccctctgtgtacttcatcaaatttgatgatgatttccatatctatgaacagctgttcttcatgggtgactgctgtgaaaccaacaggatggcctcttttctatttaatcctaagagtgggcataaggtaacagctccactcaaagctgttttaaatgaacaaaatattggactttgtgaacaaatatgatactttttctttctgcaattattggctagcaatcttattttactaaatctatactgacaaatttaatttggtccatttatttgagtttaaagactatttcaaactctccccagtgaaacagtcatgggccattgctatcctcaaaagaactaaatatataaatagcagctttcctcaaaaaagatgataaagtcttcttttccctttagagcataaatttcagtggcaggtaaaactattttagcaacaatatgctcacttcttccatgatatgtttttcttccctactaagttgaaagtttttctcagtttccatagccactcacaagtttttctctacctaactgaagttgccctcttctgctggtcattaggacattaacttttagaatgatttctgtttcagcctcttgttttgaaggcaggcttttaatttcctcagagaaattgcaatggaacgaaaatttgttctctcttttacatatgtacacttgtataagagatgtaatgtttttaaataaaatttttaattcatgcaaaagcatgtctctaacagtgtgaaggttataaagattaataatagtagaaatatccctgtaccaatcacacagaataattctagtcagatacagtttttgtaaggacaaaaaagaaaatagatctaaaaaggtaaataagagagatcattgcatagtcctttacagtttaacaaaggttgtttagaaaggacccgctccatacttatccgattctccattttccactgaatttcctttccaaacaatgtgcagtattctcaatatctatcaaaattccataaaagttatgactgccaatttatacaaactgtccaccaagatgttttctcccaaacgtcgcattctggagccaagccattaaagacttggactgtgacacagttttcattatgagaaccatacacattggtgtaattaccctcacctcccatttactaccctataaagggaatccctatggccttaggcttacacacacatctaggagctctaaggaccaggaaaagttaaaagtggaccaaccactcaataaggtggctcttcagacccttcagtgcctaccacgagggggaacaattccacaggaaatggcttaggcagagtcatcccaaacctaagctgcctctactggctagaaatcaactgtggagttccaaccaacagtaaccagccagccgtaccccaggctttcattctcataaaagactaaacttctgtaaacccaaaataaaattctaaggcccccccaaccatctgaatggacatcctcctctgccagggcactctaaaatttaacctgaaagactggttcaggatatggcagaaagtggggggatcggacctacctcattataccctccaacattaacataaacacagaccttaaatatgataagaaacattctaatgtattctctctgaagccatctacctggaggcaccatcaggatgatgaaactttggtgtctacaacctcttactataacccagacatcgcattttattgataataaccagttgccaatcagaaaatttttaaatctacctataaattgaaagcacccccccttccagttgtcctgcctttctggaccgaatcaatgtgtatcttaaatgtatttaaatgatgtctcatgtcttctaaaatgtgtaaaatcaagctgcaccccaaccgccttgggcacatgttctcaggatatcctgagggctgtgtcacaggccatagtcacttatatttgtctcagaataaatcttttcaaatattt

SEQ ID NO: 466474 - DNA, 2690 bp, Homo sapiens
ggagactgcggcgcagcagcgactagtgggagtccgatgtgggagaggggctgcggccaccgccaccgccgccgccaccaggaaggcggaggacgcaggagccaagagcaagggacgccgccacggtcatcttcgcctgccccgccgccctcttagagacactcattgcctatggatcatcctctcccagcttttgcaagcaccgggctgctcgcccgctgattttcctcctccataggctcactgcggaggcaacggcgaggtgtccgatttgtgcacttgaggcccgcaatccgggacggcatgaagaccccgtttggaaaggcagctgcagggcagcggtccaggacgggcgctggccacggcagtgtgtctgttaccatgataaagaggaaggctgcacacaagaagcataggagccgacccacctcccagcctcgggggaacatcgtgggctgcagaattcagcacggatggaaagatggagatgaacctctaacacagtggaaaggaaccgttctggatcagctcctttgaataaacctgcccaccaccaagaacccatacatgactttcttttcattgtatcaaagtaatgtgtccaccggtgtgagcaccagcaactcacttcttcctcagacatctctaaagctggacaagattttgagggacaatatggtttccttcaccccacaccaatgttatgaatgagaccagcagaccaacagcaaacacctagaaggaacagctgttcttcatgggtgactgctgtgaaaccaacaggatggcctcttttctatttaatcctaagagtgggcataaggtaacagctccactcaaagctgttttaaatgaacaaaatattggactttgtgaacaaatatgatactttttctttctgcaattattggctagcaatcttattttactaaatctatactgacaaatttaatttggtccatttatttgagtttaaagactatttcaaactctccccagtgaaacagtcatgggccattgctatcctcaaaagaactaaatatataaatagcagctttcctcaaaaaagatgataaagtcttcttttccctttagagcataaatttcagtggcaggtaaaactattttagcaacaatatgctcacttcttccatgatatgtttttcttccctactaagttgaaagtttttctcagtttccatagccactcacaagtttttctctacctaactgaagttgccctcttctgctggtcattaggacattaacttttagaatgatttctgtttcagcctcttgttttgaaggcaggcttttaatttcctcagagaaattgcaatggaacgaaaatttgttctctcttttacatatgtacacttgtataagagatgtaatgtttttaaataaaatttttaattcatgcaaaagcatgtctctaacagtgtgaaggttataaagattaataatagtagaaatatccctgtaccaatcacacagaataattctagtcagatacagtttttgtaaggacaaaaaagaaaatagatctaaaaaggtaaataagagagatcattgcatagtcctttacagtttaacaaaggttgtttagaaaggacccgctccatacttatccgattctccattttccactgaatttcctttccaaacaatgtgcagtattctcaatatctatcaaaattccataaaagttatgactgccaatttatacaaactgtccaccaagatgttttctcccaaacgtcgcattctggagccaagccattaaagacttggactgtgacacagttttcattatgagaaccatacacattggtgtaattaccctcacctcccatttactaccctataaagggaatccctatggccttaggcttacacacacatctaggagctctaaggaccaggaaaagttaaaagtggaccaaccactcaataaggtggctcttcagacccttcagtgcctaccacgagggggaacaattccacaggaaatggcttaggcagagtcatcccaaacctaagctgcctctactggctagaaatcaactgtggagttccaaccaacagtaaccagccagccgtaccccaggctttcattctcataaaagactaaacttctgtaaacccaaaataaaattctaaggcccccccaaccatctgaatggacatcctcctctgccagggcactctaaaatttaacctgaaagactggttcaggatatggcagaaagtggggggatcggacctacctcattataccctccaacattaacataaacacagaccttaaatatgataagaaacattctaatgtattctctctgaagccatctacctggaggcaccatcaggatgatgaaactttggtgtctacaacctcttactataacccagacatcgcattttattgataataaccagttgccaatcagaaaatttttaaatctacctataaattgaaagcacccccccttccagttgtcctgcctttctggaccgaatcaatgtgtatcttaaatgtatttaaatgatgtctcatgtcttctaaaatgtgtaaaatcaagctgcaccccaaccgccttgggcacatgttctcaggatatcctgagggctgtgtcacaggccatagtcacttatatttgtctcagaataaatcttttcaaatattt

SEQ ID NO: 466475 - DNA, 2716 bp, Homo sapiens
ggagactgcggcgcagcagcgactagtgggagtccgatgtgggagaggggctgcggccaccgccaccgccgccgccaccaggaaggcggaggacgcaggagccaagagcaagggacgccgccacggtcatcttcgcctgccccgccgccctcttagagacactcattgcctatggatcatcctctcccagcttttgcaagcaccgggctgctcgcccgctgattttcctcctccataggctcactgcggaggcaacggcgaggtgtccgatttgtgcacttgaggcccgcaatccgggacggtggggaatctgcgcctcctggccgggcatgaagaccccgtttggaaaggcagctgcagggcagcggtccaggacgggcgctggccacggcagtgtgtctgttaccatgataaagaggaaggctgcacacaagaagcataggagccgacccacctcccagcctcgggggaacatcgtgggctgcagaattcagcacggatggaaagatggagatgaacctctaacacagtggaaaggaaccgttctggatcagctcctttgaataaacctgcccaccaccaagaacccatacatgactttcttttcattgtatcaaagtaatgtgtccaccggtgtgagcaccagcaactcacttcttcctcagacatctctaaagctggacaagattttgagggacaatatggtttccttcaccccacaccaatgttatgaatgagaccagcagaccaacagcaaacacctagaaggaacagctgttcttcatgggtgactgctgtgaaaccaacaggatggcctcttttctatttaatcctaagagtgggcataaggtaacagctccactcaaagctgttttaaatgaacaaaatattggactttgtgaacaaatatgatactttttctttctgcaattattggctagcaatcttattttactaaatctatactgacaaatttaatttggtccatttatttgagtttaaagactatttcaaactctccccagtgaaacagtcatgggccattgctatcctcaaaagaactaaatatataaatagcagctttcctcaaaaaagatgataaagtcttcttttccctttagagcataaatttcagtggcaggtaaaactattttagcaacaatatgctcacttcttccatgatatgtttttcttccctactaagttgaaagtttttctcagtttccatagccactcacaagtttttctctacctaactgaagttgccctcttctgctggtcattaggacattaacttttagaatgatttctgtttcagcctcttgttttgaaggcaggcttttaatttcctcagagaaattgcaatggaacgaaaatttgttctctcttttacatatgtacacttgtataagagatgtaatgtttttaaataaaatttttaattcatgcaaaagcatgtctctaacagtgtgaaggttataaagattaataatagtagaaatatccctgtaccaatcacacagaataattctagtcagatacagtttttgtaaggacaaaaaagaaaatagatctaaaaaggtaaataagagagatcattgcatagtcctttacagtttaacaaaggttgtttagaaaggacccgctccatacttatccgattctccattttccactgaatttcctttccaaacaatgtgcagtattctcaatatctatcaaaattccataaaagttatgactgccaatttatacaaactgtccaccaagatgttttctcccaaacgtcgcattctggagccaagccattaaagacttggactgtgacacagttttcattatgagaaccatacacattggtgtaattaccctcacctcccatttactaccctataaagggaatccctatggccttaggcttacacacacatctaggagctctaaggaccaggaaaagttaaaagtggaccaaccactcaataaggtggctcttcagacccttcagtgcctaccacgagggggaacaattccacaggaaatggcttaggcagagtcatcccaaacctaagctgcctctactggctagaaatcaactgtggagttccaaccaacagtaaccagccagccgtaccccaggctttcattctcataaaagactaaacttctgtaaacccaaaataaaattctaaggcccccccaaccatctgaatggacatcctcctctgccagggcactctaaaatttaacctgaaagactggttcaggatatggcagaaagtggggggatcggacctacctcattataccctccaacattaacataaacacagaccttaaatatgataagaaacattctaatgtattctctctgaagccatctacctggaggcaccatcaggatgatgaaactttggtgtctacaacctcttactataacccagacatcgcattttattgataataaccagttgccaatcagaaaatttttaaatctacctataaattgaaagcacccccccttccagttgtcctgcctttctggaccgaatcaatgtgtatcttaaatgtatttaaatgatgtctcatgtcttctaaaatgtgtaaaatcaagctgcaccccaaccgccttgggcacatgttctcaggatatcctgagggctgtgtcacaggccatagtcacttatatttgtctcagaataaatcttttcaaatattt

SEQ ID NO: 466476 - DNA, 7493 bp, Homo sapiens
tccctatataattttacattagatgctatatgtggagagattctgccaagacagccatttgtcggtcagctcaggggaaaaccagttcagtcagttactttgtgttcaaagtttagcccaaggaacactgcttagcctcaggagcactcgaggtggcatagctctcaaaaaatgtaagaatgatgaggaagaggatctcaggactgaactcaaccttctgaggaagtactctttccacaaaaacattgtgtccttctatggagcatttttcaagctgagtccccctggtcagcggcaccaactttggatggtgatggagttatgtgcagcaggttcggtcactgatgtagtgagaatgaccagtaatcagagtttaaaagaagattggattgcttatatctgccgagaaatccttcagggcttagctcaccttcacgcacaccgagtaattcaccgggacatcaaaggtcagaatgtgctgctgactcataatgctgaagtaaaactggttgattttggagtgagtgcccaggtgagcagaactaatggaagaaggaatagtttcattgggacaccatactggatggcacctgaggtgattgactgtgatgaggacccaagacgctcctatgattacagaagtgatgtgtggtctgtgggaattactgccattgaaatggctgaaggagcccctcctctgtgtaaccttcaacccttggaagctctcttcgttattttgcgggaatctgctcccacagtcaaatccagcggatggtcccgtaagttccacaatttcatggaaaagtgtacgataaaaaatttcctgtttcgtcctacttctgcaaacatgcttcaacacccatttgttcgggatataaaaaatgaacgacatgttgttgagtcattaacaaggcatcttactggaatcattaaaaaaagacagaaaaaaggaccctcttgcactcacgagcttctgagattgccaaccagcagcagatgcagaccacttagagtcctgcatggggaaccctctcagccaaggtggctacctgatcgagaagagccacaggtccaggcacttcagcagctacagggagcagccagggtattcatgccactgcaggctctggacagtgcacctaagcctctaaaggggcaggctcaggcacctcaacgactacaaggggcagctcgggtgttcatgccactacaggctcaggtgaaggctaaagcctctaaacctctacaaatgcagattaaggcacctccacgactacggagggcagccagggtgctcatgccactacaggcacaggttagggcacctaggcttctgcaggtacagtcccaggtatccaaaaagcagcaggcccagacccagacatcagaaccacaagatttggaccaggtaccagaggaatttcagggtcaagatcaggtacccgaacaacaaaggcagggccaggcccctgaacaacagcagaggcacaaccaggtgcctgaacaagagctggagcagaaccaggcacctgaacagccagaggtacaggaacaggctgccgagcctgcacaggcagagactgaggcagaggaacctgagtcattacgagtaaatgcccaggtatttctgcccctgctatcacaagatcaccatgtgctgttgccactacatttggatactcaggtgctcattccagtagaggggcaaactgaaggatcacctcaggcacaggcttggacactagaacccccacaggcaattggctcagttcaagcactgatagagggactatcaagagacttgcttcgggcaccaaactcaaataactcaaagccacttggtccgttgcaaaccctgatggaaaatctgtcatcaaataggttttactcacaaccagaacaggcacgggagaaaaaatcaaaagtttctactctgaggcaagcactggcaaaaagactatcaccaaagaggttcagggcaaagtcatcatggagacctgaaaagcttgaactctcggatttagaagcccgcaggcaaaggcgccaacgcagatgggaagatatctttaatcagcatgaggaagaattgagacaagttgataaagacaaagaagatgaatcatcagacaatgatgaagtatttcattcgattcaggctgaagtccagatagagccattgaagccatacatttcaaatcctaaaaaaattgaggttcaagagagatctccttctgtgcctaacaaccaggatcatgcacatcatgtcaagttctcttcaagcgttcctcagcggtctcttttggaacaagctcagaagcccattgacatcagacaaaggagttcgcaaaatcgtcaaaattggctggcagcatcaggtgattcaaagcacaaaattttagcaggcaaaacacagagctactgtttaacaatttatatttcagaagtcaagaaagaagaatttcaagaaggaatgaatcaaaagtgtcagggagcccaagtaggattaggacctgaaggccattgtatttggcaattgggtgaatcttcttctgaggaagaaagtcctgtgactggaaggaggtctcagtcatcaccaccttattctactattgatcagaagttgctggttgacatccatgttccagatggatttaaagtaggaaaaatatcaccccctgtatacttgacaaacgaatgggtaggctataatgcactctctgaaatcttccggaatgattggttaactccggcacctgtcattcagccacctgaagaggatggtgattatgttgaactctatgatgccagtgctgatactgatggtgatgatgatgatgagtctaatgatacttttgaagatacctatgatcatgccaatggcaatgatgacttggataaccaggttgatcaggctaatgatgtttgtaaagaccatgatgatgacaacaataagtttgttgatgatgtaaataataattattatgaggcgcctaggcaagctatggcagagatggaagctgcaagcaagatggttatgatggaagtcgtggaaaagaggaagcctacagaggctatggaagccatacagccaatagaagccatggaggaagtgcagccagtgagggacaatgcagccattggagatcaggaagaacatgcagccaatataggcagtgaaagaagaggcagtgagggtgatggaggtaagggagtcgttcgaaccagtgaagagagtggagcccttggactcaatggagaagaaaattgctcagagacagatggtccaggattgaagagacctgcgtctcaggactttgaatatctacaggaggagccaggtggtggaaatgaggcctcaaatgccattgactcaggtgctgcaccgtcagcacctgatcatgagagtgacaataaggacatatcagaatcatcaacacaatcagatttttctgccaatcactcatctccttccaaaggttctgggatgtctgctgatgctaactttgccagtgccatctgtcataagaacagacttcgggtgtatcatctgacctggttgaggaacaagattttgaataatgatccagaaagtaaaagaaggcaagaagaaatgctgaagacagaggaagcctgcaaagctattgataagttaacaggctgtgaacacttcagtgtcctccaacatgaagaaacaacatatattgcaattgctttgaaatcatcaattcacctttatgcatgggcaccaaagtcctttgatgaaagcactgctattaaagtatttccaacacttgatcataagccagtgacagttgacctggctattggttctgaaaaaagactaaagattttcttcagctcagcagatggatatcacctcatcgatgcagaatctgaggttatgtctgatgtgaccctgccaaagaatcccctggaaatcattataccacagaatatcatcattttacctgattgcttgggaattggcatgatgctcaccttcaatgctgaagccctctctgtggaagcaaatgaacaactcttcaagaagatccttgaaatgtggaaagacataccatcttctatagcttttgaatgtacacagcgaaccacaggatggggccaaaaggccattgaagtgcgctctttgcaatccagggttctggaaagtgagctgaagcgcaggtcaattaagaagctgagattcctgtgcacccggggtgacaagctgttctttacctctaccctgcgcaatcaccacagccgggtttacttcatgacacttggaaaacttgaagagctccaaagcaattatgatgtctaaaagtttccagtgatttattaccacattataaacatcatgtataggcagtctgcatcttcagatttcagagattaaatgagtattcagttttatttttagtaaagattaaatccaaaactttacttttaatgtagcacagaatagttttaatgagaaatgcagctttatgtataaaattaactatagcaagctctaggtactccaatggtgtacaatgtcttttgcacaaactttgtaacttttgttactgtgaattcaaacattactctttggacagtttggacagtatctgtattcagattttacaacatggagtaaagaaacctgttatgaattagattacaagcagccttcaaaagaattggcactgggataagatttttcagaaaaagaaaaacatcggcaaactgtgtgtgatttttccaaagctatataaagaaccaaaggtttagtcaagaaacaaaaatcttaaagattattataacccagactaaggttgaacaacctgcatgcccagagaaaactatggcgacaaaggggaaaaggccaccactcgttttctcactgattcatgccaattaagcctacagttaaagaccagttttgttcttttcacccatttttaagctggttttctcctgataagaagaaaggaagaaagccccagacgcttggtttttctcagaacccccaaaagatgtgcaatagctgttgttacaaaccaccaaataatacagttgtgagcctgaatacaggactgaactcctatacacgtgtactgtagaatgagtattttttaataccttaaggtaggcgtcaaattctactccccaaagcagagatagattgatttatcaaaattattatctggccaacagtgtgactatcagacagcatcaaatatttgcccaatccaagattagactacacaaaagcttccttccagtattaaacaaaaagaattaaacataactatgaaaaaactttgctaatatctgtgtttttcagatttcattttttgtaaaatcagaaattaatctaaacatattcagtgataagttcatgtgtaacgacttaatgttaaaggttaaaaaaaagatttcacaaaatatacaactttcaccatatatataagcctgcaaaattagagtagtgaaagtcatgctagtccatcacccaaatatgttatagacgccatagacaggtgatgtttggtcacctatggtaactgctacctgatgaagagcataatttctgcatatccatcctcaataccatggtaaattctggggcaatagagaagcaacagaactgccacaaagtatacctcaatataattcctctagttctgcttctaaaatctgaggacagtgctagtgggaaaataattttcaaactacctggttaaccaaaatacaaaagcagctgactatgtgtgatttcataatagcacatttcttgacacttagtgctagaaatgaagatttggattttcctaacaacttacatcaagaatgtagtgtagctcattattgagaatttaggaaagcctgaatccattaattaaggaaataaatgtgactcacatttcttttactgtgacacaataatgtgatcctaaaactggcttatccttgagtgtttacaactcaaacaactttttgaatgcagtagttttttttttttaaaaacaaacttttatgtcaaattttttttcttagaagtagtcttcattattataaatttgtacaccaaaaggccatggggaactttgtgcaagtacctcatcgctgagcaaatggagcttgctatgttttaatttcagaaaatttcctcatatacgtagtgtgtagaatcaagtcttttaataattcattttttcttcataatatttactcaaagttaagcttaaaaataagttttatcttaaaatcatatttgaagacagtaagacagtaaactattttaggaagtcaacccccattgcactctgtggcagttattctggtaaaaataggcaaaagtgacctgaatctacaatgatgtcccaaagtaaccaagtaagagagattgtaaatgataaaccgagctttaaaggataaagtgttaataaagaaaggaagctgggcacatgtcaaaaagggagatcgaaatgttaggtaatcatttagaaaggacagaaaatatttaaagtggctcataggtaatgaatatttctgacttagatgtaaatccatctggaatctttacatcctttgccagctgaaacaagaaagtgaagggacaatgatatttcatggtcagtttattttgtaagagacagaagaaattatatctatacattaccttgtagcagcagtacctggaagccccagcccgtcacagaagtgtggaggggggctcctgactagacaatttccctagcccttgtgatttgaagcatgaaagttctggcaggttatgagcagcactagggataaagtatggttttattttggtgtaatttaggtttttcaacaaagcccttgtctaaaataaaaggcattattggaaatatttgaaaactagaaaatgatggataaaagggctgataagaaaatttctgactgtcagtagaagtgagataagatcctcagaggaaacagtaagaagggataatcattaagatagtaaaacaggcaaagcagaatcacatgtgcacacacacatacacatgtaaacattggaatgcataagttttaatattttagcgctatcagtttctaaatgcattaattactaactgccctctcccaagattcatttagttcaaacagtatccgtaaactaggaataatgccacatgcattcaatgggatcttttaagtactcttcagtttgttccaagaaatgtgcctactgaaatcaaattaatttgtattcaatgtgtacttcaagactgctaattgtttcatctgaaagcctacaatgaatcattgttcaaccttgaaaaataaaattttgtaaatcaaaaaaccaaacaaccacccccccaacccacccaaacaaaagacaacagcagctctcactaccacagaatacacaaacgacaagagaccacagcgccccgggaggcaaggggagagaaaaagaagaggacaaggagtaatgaggaaagtaatagaggggg

SEQ ID NO: 466477 - DNA, 4318 bp, Homo sapiens
ccgacgctcgggtttaaattcgtgcacgaggcaaggacattgccttttgcctcccgtcatgattctgaggcctccccagccatgtggaactgtttgaggcacagagctgtatatacaataacagtgaaattgatcccactactaattatgacaaaaatgatcttccacgtaaacaggtggtgaagctccttatggtcctgaccctacagttcctgtcccatgaccagggccagatcaccaaggagctgcagcagttcgtcgtcagtggcagccccatgcgagcacccgaggaagtcacaggtgcccaggccggagtgcagtggcgtgatctcggctcgctacaaccaccacctcctagcagcctgccttggccttccaaagtgctgagattgcagcctctgcccggccgccaccccgtctgggaagtgaggagcgtctctgcctggccgcccatcgtctgggatgtgaggagcccctccgcccagcagccgccccgtctgagaagtgaggagcccctcagcccggcagccaccccatctgagaagtgaggagcccctccacctggcagccaccccgtctgggagggctgtgaccgtctatgacaagccagcatctttctttcaagagacctctggacctgcagcaccaactcttcatgaagctgggcggcacgcactctccgttcagggcctgaacctgaggacccagacacggagcggtcggccttcatggagcgggatgctgggagcgggctggtgatgcgcctccgcgagcggccagccctgctggtcagcagcacaggctggacagaggacgaagacttctccatctgctggcagctttagaaagtagagtttgaacaactgactcttgatggacacaaccttccttctctcgtctgtgtgataacaggcaaagggcctccgagggagtattacagccgcctcatccaccagaagcatttccagcacatccaggtctgcaccccttggctggaggccgaggactacccccgcttctagggtcggtggatctgggtgtctgtctgcacacgtcctgcagtggcctggacctgcccatgaaggtggtggacatgttcgggtgctgtttgcctgtgtgtgccgtgaacttcaagtggcaggagcagaacccgaatctttctggggatagcttcacagatccaccgctgaggaggaaacagtgcagagcgagctgcccacagtgaggccctgctcctggtttacatgagctggtgaaacatgaagaaaatggcctggtctttgaggactcagaggaactggcagctcagctgcaggtgcttttctcaaactttcctgatcctgcgggcaagctaaaccagttccggaagaacctgcgggagtcgcagcagctccgatgggattagagctgggtgcagactgtgctccctttggttatggacacataactcctgggccagaggctaaaaccccgggacccctgctgtccttcccacagcttcttctcagagtctcagggcaaatcctttcgagcagcgcctcccagtggccagaagctgaaatgatggcagtagtgccacctggtgaatgaattggttctgtgacccgggaagctgtgcttggctctgatttcttttctggaggctcggaaacacttcctctcttcttctgttcttcacgccccatgcccctgctagcgtattactgttctgtgacttccctgtgacctctgcagtactcctcatcctgcgtttggtctccaggtgtcacctttctgccgtgttcctaacattttgattcctgtcttgaaaaaagcacctgctgcaccataagcccagggatgtggcagctgcagcgggcttggctttgtgaagaaccgagtgtgtccagggatgtggcagctgcagcgggcttggctttgtgaagaaccgagtgtgtccagggatgtggcagctgcagtgggcttggctttgtgaggaatcgagtgtgtccaccgatgtggcagctgcagcgggcttggctttgtgaagaaccgagtgtgtccaccgatgtgacagctgcagcgggcttggctttgtgaagaaccgagtgtgtccaccgatgtggcagctgcagcgggcttggctttgtgaggaaccgagtgtgtccagggatgtggcagctgcagcgggcttggctttgtgaggaaccgagtgtgtccagggatgtggcagctgcagcgggcttggctttgtgaagaaccgagtgtgtccagggatgtggcagctgcagcgggcttggctttgtgaagaaccgagtgtgtccagggatgtggcagctgcagtgggcttggctttgtgaggaatcgagtgtgtccaccgatgtggcagctgcagcgggcttggctttgtgaagaaccgagtgtgtccaccgatgtggcagctgcagcgggcttggctttgtgaggaaccgagtgtgtccagggatgtggcagctgcagtgggcttggctttgtgaggaaccgagtgtgtccagggatgtggcagctgcagcgggcttggctttgtgaggaaccgagtgtgtccaccgatgtggcagctgcagcgggcttggctttgtgaggaaccgagtgtgtccacagatgtggcagctgcagcgggcttggctttgtgaggaaccgagtgtgtccacgttggggggaacatcatacttgatacacacgtttttatttgcacaaagaaaatgctatttttggagccagagttttcatgtctgattgatggcgattttcttaagaaccagaactgctggcagaaagggagcacccacaagcttagatagccgatgtcttatcagagggcagtttgtggttcctgatttggaaattaacattctccaaacattccagtccaatgaaagttttatccgctttcccatataaaaactcttcccacgagagtgacttgattctcacaatcccgttggagtcgtgtgtgtctgccgatttgtctgctggcttgcaggggtgggcctgtgtccctggccaccgctggacctgtgggtttcagggctgggacccaggaccacaggcagagctctgttcaaccagagaggagaccgagtgtgctggcaggggcgaggggttttcggtggcccagccaaacaccaccttctctcaagggccctgtcctcatcccagaagtggttgttttcctcctgtggtctctgaaagacagaggcatggctctgggacagagccatgtggtgatgactgtaatgggagtatgcctgtctccaacaagagggctgtggctggaaggtcaccttaagaggcacccctgtcctttgatgtcaccctggaggcccagagtaactcttctggaagccccatcatgtccatgcccgacagcgtccattgttcccttttcccagagcccagagctgggtagagctgcaaggacaccgcctgcacagagtgcccggggctgggcattgcctgctgcaatgacaacatctggctggatggcagagagctgatggaccgtcgcgacgtcccagtccagctgggccactgtcaccctggggctgtctaagttggcagagatgtctgcctctaatgagaggccattgagaaggacattccctcggagcttctcgaggacctggctgtgacagtcgctgaagatgtatgcctggaggcggcacatcttgcagatggccaggcctgtgaggctggcgccactgccaagctctaggacagtcctggcgggaggaaaggggaccatgtctgtaactgcaccaggcaatgagaagcagctaactgttgacatgccaacagcttgcacgggcctcaagggtgtcacgtggcatgaaagacactcatctcaggccacacaggattccattcatcgaacattcctgagacaacggaattctggtgatggagcacaggtcagtggtggccaggggccagctctgtgtggaggggagagagagaaatctcaagggcgctttcacaggaacattaaacacgcaatagaatgtgttggcaaagcgctgtgtgatctctccctggggacgtggagccagttggaagtggaagccacagcagctgaaagcctgaccttcagatgtcgcagggtgcacctggatgagtcacaggaagaaggctagaagactgactcttggccgcattagtcctggctacttagaggccacctgggtcatgggccagctccctggttgcactggtcagccaggattgcactggttaccagggcagccatggcaccaaggtttgatgggcttgccatctaagtggaaatgcagaatgtgcccat

SEQ ID NO: 466478 - DNA, 3819 bp, Homo sapiens
gcttaggagaggccgggttaatcggccgaggcgcccatctgagaagtgaggagcccctccacctggcagccaccccgtctgggagggctgtgaccgtctatgacaagccagcatctttctttcaagagacctctggacctgcagcaccaactcttcatgaagctgggcggcacgcactctccgttcagggcctgaacctgaggacccagacacggagcggtcggccttcatggagcgggatgctgggagcgggctggtgatgcgcctccgcgagcggccagccctgctggtcagcagcacaggctggacagaggacgaagacttctccatctgctggcagctttagaaagtagagtttgaacaactgactcttgatggacacaaccttccttctctcgtctgtgtgataacaggcaaagggcctccgagggagtattacagccgcctcatccaccagaagcatttccagcacatccaggtctgcaccccttggctggaggccgaggactacccccgcttctagggtcggtggatctgggtgtctgtctgcacacgtcctgcagtggcctggacctgcccatgaaggtggtggacatgttcgggtgctgtttgcctgtgtgtgccgtgaacttcaagtggcaggagcagaacccgaatctttctggggatagcttcacagatccaccgctgaggaggaaacagtgcagagcgagctgcccacagtgaggccctgctcctggtttacatgagctggtgaaacatgaagaaaatggcctggtctttgaggactcagaggaactggcagctcagctgcaggtgcttttctcaaactttcctgatcctgcgggcaagctaaaccagttccggaagaacctgcgggagtcgcagcagctccgatgggattagagctgggtgcagactgtgctccctttggttatggacacataactcctgggccagaggctaaaaccccgggacccctgctgtccttcccacagcttcttctcagagtctcagggcaaatcctttcgagcagcgcctcccagtggccagaagctgaaatgatggcagtagtgccacctggtgaatgaattggttctgtgacccgggaagctgtgcttggctctgatttcttttctggaggctcggaaacacttcctctcttcttctgttcttcacgccccatgcccctgctagcgtattactgttctgtgacttccctgtgacctctgcagtactcctcatcctgcgtttggtctccaggtgtcacctttctgccgtgttcctaacattttgattcctgtcttgaaaaaagcacctgctgcaccataagcccagggatgtggcagctgcagcgggcttggctttgtgaagaaccgagtgtgtccagggatgtggcagctgcagcgggcttggctttgtgaagaaccgagtgtgtccagggatgtggcagctgcagtgggcttggctttgtgaggaatcgagtgtgtccaccgatgtggcagctgcagcgggcttggctttgtgaagaaccgagtgtgtccaccgatgtgacagctgcagcgggcttggctttgtgaagaaccgagtgtgtccaccgatgtggcagctgcagcgggcttggctttgtgaggaaccgagtgtgtccagggatgtggcagctgcagcgggcttggctttgtgaggaaccgagtgtgtccagggatgtggcagctgcagcgggcttggctttgtgaagaaccgagtgtgtccagggatgtggcagctgcagcgggcttggctttgtgaagaaccgagtgtgtccagggatgtggcagctgcagtgggcttggctttgtgaggaatcgagtgtgtccaccgatgtggcagctgcagcgggcttggctttgtgaagaaccgagtgtgtccaccgatgtggcagctgcagcgggcttggctttgtgaggaaccgagtgtgtccagggatgtggcagctgcagtgggcttggctttgtgaggaaccgagtgtgtccagggatgtggcagctgcagcgggcttggctttgtgaggaaccgagtgtgtccaccgatgtggcagctgcagcgggcttggctttgtgaggaaccgagtgtgtccacagatgtggcagctgcagcgggcttggctttgtgaggaaccgagtgtgtccacgttggggggaacatcatacttgatacacacgtttttatttgcacaaagaaaatgctatttttggagccagagttttcatgtctgattgatggcgattttcttaagaaccagaactgctggcagaaagggagcacccacaagcttagatagccgatgtcttatcagagggcagtttgtggttcctgatttggaaattaacattctccaaacattccagtccaatgaaagttttatccgctttcccatataaaaactcttcccacgagagtgacttgattctcacaatcccgttggagtcgtgtgtgtctgccgatttgtctgctggcttgcaggggtgggcctgtgtccctggccaccgctggacctgtgggtttcagggctgggacccaggaccacaggcagagctctgttcaaccagagaggagaccgagtgtgctggcaggggcgaggggttttcggtggcccagccaaacaccaccttctctcaagggccctgtcctcatcccagaagtggttgttttcctcctgtggtctctgaaagacagaggcatggctctgggacagagccatgtggtgatgactgtaatgggagtatgcctgtctccaacaagagggctgtggctggaaggtcaccttaagaggcacccctgtcctttgatgtcaccctggaggcccagagtaactcttctggaagccccatcatgtccatgcccgacagcgtccattgttcccttttcccagagcccagagctgggtagagctgcaaggacaccgcctgcacagagtgcccggggctgggcattgcctgctgcaatgacaacatctggctggatggcagagagctgatggaccgtcgcgacgtcccagtccagctgggccactgtcaccctggggctgtctaagttggcagagatgtctgcctctaatgagaggccattgagaaggacattccctcggagcttctcgaggacctggctgtgacagtcgctgaagatgtatgcctggaggcggcacatcttgcagatggccaggcctgtgaggctggcgccactgccaagctctaggacagtcctggcgggaggaaaggggaccatgtctgtaactgcaccaggcaatgagaagcagctaactgttgacatgccaacagcttgcacgggcctcaagggtgtcacgtggcatgaaagacactcatctcaggccacacaggattccattcatcgaacattcctgagacaacggaattctggtgatggagcacaggtcagtggtggccaggggccagctctgtgtggaggggagagagagaaatctcaagggcgctttcacaggaacattaaacacgcaatagaatgtgttggcaaagcgctgtgtgatctctccctggggacgtggagccagttggaagtggaagccacagcagctgaaagcctgaccttcagatgtcgcagggtgcacctggatgagtcacaggaagaaggctagaagactgactcttggccgcattagtcctggctacttagaggccacctgggtcatgggccagctccctggttgcactggtcagccaggattgcactggttaccagggcagccatggcaccaaggtttgatgggcttgccatctaagtggaaatgcagaatgtgcccat

SEQ ID NO: 466479 - DNA, 4300 bp, Homo sapiens
ccgacgctcgggtttaaattcgtgcacgaggcaaggacattgccttttgcctcccgtcatgattctgaggcctccccagccatgtggaactgtttgaggcacagagctgtatatacaataacagtgaaattgatcccactactaattatgacaaaaatgatcttccacgtaaacaggtggtgaagctccttatggtcctgaccctacagttcctgtcccatgaccagggccagatcaccaaggagctgcagcagttcgtcgtcagtggcagccccatgcgagcacccgaggaagtcacaggtgcccaggccggagtgcagtggcgtgatctcggctcgctacaaccaccacctcctagcagcctgccttggccttccaaagtgctgagattgcagcctctgcccggccgccaccccgtctgggaagtgaggagcgtctctgcctggccgcccatcgtctgggatgtgaggagcccctccgcccagcagccgccccgtctgagaagtgaggagcccctcagcccggcagccaccccatctgagaagtgaggagcccctccacctggcagccaccccgtctgggagggctgtgaccgtctatgacaagccagcatctttctttcaagagacctctggacctgcagcaccaactcttcatgaagctgggcggcacgcactctccgttcagggcctgaacctgaggacccagacacggagcggtcggccttcatggagcgggatgctgggagcgggctggtgatgcgcctccgcgagcggccagccctgctggtcagcagcacaggctggacagaggacgaagacttctccatctgctggcagctttagaaagtagagtttgaacaactgactcttgatggacacaaccttccttctctcgtctgtgtgataacaggcaaagggcctccgagggagtattacagccgcctcatccaccagaagcatttccagcacatccaggtctgcaccccttggctggaggccgaggactacccccgcttctagggtcggtggatctgggtgtctgtctgcacacgtcctgcagtggcctggacctgcccatgaaggtggtggacatgttcgggtgctgtttgcctgtgtgtgccgtgaacttcaagtggcaggagcagaacccgaatctttctggggatagcttcacagatccaccgctgaggaggaaacagtgcagagcgagctgcccacatttacatgagctggtgaaacatgaagaaaatggcctggtctttgaggactcagaggaactggcagctcagctgcaggtgcttttctcaaactttcctgatcctgcgggcaagctaaaccagttccggaagaacctgcgggagtcgcagcagctccgatgggattagagctgggtgcagactgtgctccctttggttatggacacataactcctgggccagaggctaaaaccccgggacccctgctgtccttcccacagcttcttctcagagtctcagggcaaatcctttcgagcagcgcctcccagtggccagaagctgaaatgatggcagtagtgccacctggtgaatgaattggttctgtgacccgggaagctgtgcttggctctgatttcttttctggaggctcggaaacacttcctctcttcttctgttcttcacgccccatgcccctgctagcgtattactgttctgtgacttccctgtgacctctgcagtactcctcatcctgcgtttggtctccaggtgtcacctttctgccgtgttcctaacattttgattcctgtcttgaaaaaagcacctgctgcaccataagcccagggatgtggcagctgcagcgggcttggctttgtgaagaaccgagtgtgtccagggatgtggcagctgcagcgggcttggctttgtgaagaaccgagtgtgtccagggatgtggcagctgcagtgggcttggctttgtgaggaatcgagtgtgtccaccgatgtggcagctgcagcgggcttggctttgtgaagaaccgagtgtgtccaccgatgtgacagctgcagcgggcttggctttgtgaagaaccgagtgtgtccaccgatgtggcagctgcagcgggcttggctttgtgaggaaccgagtgtgtccagggatgtggcagctgcagcgggcttggctttgtgaggaaccgagtgtgtccagggatgtggcagctgcagcgggcttggctttgtgaagaaccgagtgtgtccagggatgtggcagctgcagcgggcttggctttgtgaagaaccgagtgtgtccagggatgtggcagctgcagtgggcttggctttgtgaggaatcgagtgtgtccaccgatgtggcagctgcagcgggcttggctttgtgaagaaccgagtgtgtccaccgatgtggcagctgcagcgggcttggctttgtgaggaaccgagtgtgtccagggatgtggcagctgcagtgggcttggctttgtgaggaaccgagtgtgtccagggatgtggcagctgcagcgggcttggctttgtgaggaaccgagtgtgtccaccgatgtggcagctgcagcgggcttggctttgtgaggaaccgagtgtgtccacagatgtggcagctgcagcgggcttggctttgtgaggaaccgagtgtgtccacgttggggggaacatcatacttgatacacacgtttttatttgcacaaagaaaatgctatttttggagccagagttttcatgtctgattgatggcgattttcttaagaaccagaactgctggcagaaagggagcacccacaagcttagatagccgatgtcttatcagagggcagtttgtggttcctgatttggaaattaacattctccaaacattccagtccaatgaaagttttatccgctttcccatataaaaactcttcccacgagagtgacttgattctcacaatcccgttggagtcgtgtgtgtctgccgatttgtctgctggcttgcaggggtgggcctgtgtccctggccaccgctggacctgtgggtttcagggctgggacccaggaccacaggcagagctctgttcaaccagagaggagaccgagtgtgctggcaggggcgaggggttttcggtggcccagccaaacaccaccttctctcaagggccctgtcctcatcccagaagtggttgttttcctcctgtggtctctgaaagacagaggcatggctctgggacagagccatgtggtgatgactgtaatgggagtatgcctgtctccaacaagagggctgtggctggaaggtcaccttaagaggcacccctgtcctttgatgtcaccctggaggcccagagtaactcttctggaagccccatcatgtccatgcccgacagcgtccattgttcccttttcccagagcccagagctgggtagagctgcaaggacaccgcctgcacagagtgcccggggctgggcattgcctgctgcaatgacaacatctggctggatggcagagagctgatggaccgtcgcgacgtcccagtccagctgggccactgtcaccctggggctgtctaagttggcagagatgtctgcctctaatgagaggccattgagaaggacattccctcggagcttctcgaggacctggctgtgacagtcgctgaagatgtatgcctggaggcggcacatcttgcagatggccaggcctgtgaggctggcgccactgccaagctctaggacagtcctggcgggaggaaaggggaccatgtctgtaactgcaccaggcaatgagaagcagctaactgttgacatgccaacagcttgcacgggcctcaagggtgtcacgtggcatgaaagacactcatctcaggccacacaggattccattcatcgaacattcctgagacaacggaattctggtgatggagcacaggtcagtggtggccaggggccagctctgtgtggaggggagagagagaaatctcaagggcgctttcacaggaacattaaacacgcaatagaatgtgttggcaaagcgctgtgtgatctctccctggggacgtggagccagttggaagtggaagccacagcagctgaaagcctgaccttcagatgtcgcagggtgcacctggatgagtcacaggaagaaggctagaagactgactcttggccgcattagtcctggctacttagaggccacctgggtcatgggccagctccctggttgcactggtcagccaggattgcactggttaccagggcagccatggcaccaaggtttgatgggcttgccatctaagtggaaatgcagaatgtgcccat

SEQ ID NO: 466480 - DNA, 752 bp, Homo sapiens
gtggtgaagctccttatggtcctgaccctacagttcctgtcccatgaccagggccagatcaccaaggagctgcagcagttcgtcgtcagtggcagccccatgcgagcacccgaggaaggtgagtgagcacagacagatgggtcctggtgccctggagcagttcccgggtctcggctgccccaggtctcatagtgtggccatgctgggggaagcttaggtagtcacagtactggcctttttgggtgagtacactggtgacatgttactgtattcttgggctagtacactggtgacatgatgctatattcttgggtgagtacactggtgacatgttgctgtatccttgggtgagtacgctggtgacatgttgctgtattcttgggtgagtacactggtgacgtgttgctgtattcttgggcgtgtacactggtgacgtgttgctctatgcttgggtgagtacgctggtgacatgttgctgtattcttgggtgagtacgctggtgacacgttgctgtatgcttgggcgcgtacactggtgacatgttgctgtatgcttggatgagtacgctggtgacacgttgctgtattcttgggcgtgtacactggtgacatgttgctgtattcttgtgtgaatacgctggtgacatattgctgtattcttgggcgtgtacactggtgacatattgctatgttcttaggcaagtacattgttgacatgttgctgcattcttaggcaagtacgtgggtgatata

SEQ ID NO: 466481 - DNA, 757 bp, Homo sapiens
ccgacgctcgggtttaaattcgtgcacgaggcaaggacattgccttttgcctcccgtcatgattctgaggcctccccagccatgtggaactgtttgaggcacagagctgtatatacaataacagtgaaattgatcccactactaattatgacaaaaatgatcttccacgtaaacaggtggtgaagctccttatggtcctgaccctacagttcctgtcccatgaccagggccagatcaccaaggagctgcagcagttcgtcgtcagtggcagccccatgcgagcacccgaggaagtcacaggtgcccaggccggagtgcagtggcgtgatctcggctcgctacaaccaccacctcctagcagcctgccttggccttccaaagtgctgagattgcagcctctgcccggccgccaccccgtctgggaagtgaggagcgtctctgcctggccgcccatcgtctgggatgtgaggagcccctccgcccagcagccgccccgtctgagaagtgaggagcccctcagcccggcagccaccccatctgagaagtgaggagcccctccacctggcagccaccccgtctgggaggtgaggagcgtctccacccggcagccaccccgtccgggagggaggtggggggtcagcccccgccagccagccacccgtccgggaggtggggggcgctctgccggcgcccttctgggaagtgaggagcccttctgcccggccaccacgccgtctgggaggtgtacccaacagct

SEQ ID NO: 466482 - DNA, 4028 bp, Homo sapiens
ccgacgctcgggtttaaattcgtgcacgaggcaaggacattgccttttgcctcccgtcatgattctgaggcctccccagccatgtggaactgtttgaggcacagagctgtatatacaataacagtgaaattgatcccactactaattatgacaaaaatgatcttccacgtaaacaggtggtgaagctccttatggtcctgaccctacagttcctgtcccatgaccagggccagatcaccaaggagctgcagcagttcgtcgtcagtggcagccccatgcgagcacccgaggaagggctgtgaccgtctatgacaagccagcatctttctttcaagagacctctggacctgcagcaccaactcttcatgaagctgggcggcacgcactctccgttcagggcctgaacctgaggacccagacacggagcggtcggccttcatggagcgggatgctgggagcgggctggtgatgcgcctccgcgagcggccagccctgctggtcagcagcacaggctggacagaggacgaagacttctccatctgctggcagctttagaaagtagagtttgaacaactgactcttgatggacacaaccttccttctctcgtctgtgtgataacaggcaaagggcctccgagggagtattacagccgcctcatccaccagaagcatttccagcacatccaggtctgcaccccttggctggaggccgaggactacccccgcttctagggtcggtggatctgggtgtctgtctgcacacgtcctgcagtggcctggacctgcccatgaaggtggtggacatgttcgggtgctgtttgcctgtgtgtgccgtgaacttcaagtggcaggagcagaacccgaatctttctggggatagcttcacagatccaccgctgaggaggaaacagtgcagagcgagctgcccacagtgaggccctgctcctggtttacatgagctggtgaaacatgaagaaaatggcctggtctttgaggactcagaggaactggcagctcagctgcaggtgcttttctcaaactttcctgatcctgcgggcaagctaaaccagttccggaagaacctgcgggagtcgcagcagctccgatgggattagagctgggtgcagactgtgctccctttggttatggacacataactcctgggccagaggctaaaaccccgggacccctgctgtccttcccacagcttcttctcagagtctcagggcaaatcctttcgagcagcgcctcccagtggccagaagctgaaatgatggcagtagtgccacctggtgaatgaattggttctgtgacccgggaagctgtgcttggctctgatttcttttctggaggctcggaaacacttcctctcttcttctgttcttcacgccccatgcccctgctagcgtattactgttctgtgacttccctgtgacctctgcagtactcctcatcctgcgtttggtctccaggtgtcacctttctgccgtgttcctaacattttgattcctgtcttgaaaaaagcacctgctgcaccataagcccagggatgtggcagctgcagcgggcttggctttgtgaagaaccgagtgtgtccagggatgtggcagctgcagcgggcttggctttgtgaagaaccgagtgtgtccagggatgtggcagctgcagtgggcttggctttgtgaggaatcgagtgtgtccaccgatgtggcagctgcagcgggcttggctttgtgaagaaccgagtgtgtccaccgatgtgacagctgcagcgggcttggctttgtgaagaaccgagtgtgtccaccgatgtggcagctgcagcgggcttggctttgtgaggaaccgagtgtgtccagggatgtggcagctgcagcgggcttggctttgtgaggaaccgagtgtgtccagggatgtggcagctgcagcgggcttggctttgtgaagaaccgagtgtgtccagggatgtggcagctgcagcgggcttggctttgtgaagaaccgagtgtgtccagggatgtggcagctgcagtgggcttggctttgtgaggaatcgagtgtgtccaccgatgtggcagctgcagcgggcttggctttgtgaagaaccgagtgtgtccaccgatgtggcagctgcagcgggcttggctttgtgaggaaccgagtgtgtccagggatgtggcagctgcagtgggcttggctttgtgaggaaccgagtgtgtccagggatgtggcagctgcagcgggcttggctttgtgaggaaccgagtgtgtccaccgatgtggcagctgcagcgggcttggctttgtgaggaaccgagtgtgtccacagatgtggcagctgcagcgggcttggctttgtgaggaaccgagtgtgtccacgttggggggaacatcatacttgatacacacgtttttatttgcacaaagaaaatgctatttttggagccagagttttcatgtctgattgatggcgattttcttaagaaccagaactgctggcagaaagggagcacccacaagcttagatagccgatgtcttatcagagggcagtttgtggttcctgatttggaaattaacattctccaaacattccagtccaatgaaagttttatccgctttcccatataaaaactcttcccacgagagtgacttgattctcacaatcccgttggagtcgtgtgtgtctgccgatttgtctgctggcttgcaggggtgggcctgtgtccctggccaccgctggacctgtgggtttcagggctgggacccaggaccacaggcagagctctgttcaaccagagaggagaccgagtgtgctggcaggggcgaggggttttcggtggcccagccaaacaccaccttctctcaagggccctgtcctcatcccagaagtggttgttttcctcctgtggtctctgaaagacagaggcatggctctgggacagagccatgtggtgatgactgtaatgggagtatgcctgtctccaacaagagggctgtggctggaaggtcaccttaagaggcacccctgtcctttgatgtcaccctggaggcccagagtaactcttctggaagccccatcatgtccatgcccgacagcgtccattgttcccttttcccagagcccagagctgggtagagctgcaaggacaccgcctgcacagagtgcccggggctgggcattgcctgctgcaatgacaacatctggctggatggcagagagctgatggaccgtcgcgacgtcccagtccagctgggccactgtcaccctggggctgtctaagttggcagagatgtctgcctctaatgagaggccattgagaaggacattccctcggagcttctcgaggacctggctgtgacagtcgctgaagatgtatgcctggaggcggcacatcttgcagatggccaggcctgtgaggctggcgccactgccaagctctaggacagtcctggcgggaggaaaggggaccatgtctgtaactgcaccaggcaatgagaagcagctaactgttgacatgccaacagcttgcacgggcctcaagggtgtcacgtggcatgaaagacactcatctcaggccacacaggattccattcatcgaacattcctgagacaacggaattctggtgatggagcacaggtcagtggtggccaggggccagctctgtgtggaggggagagagagaaatctcaagggcgctttcacaggaacattaaacacgcaatagaatgtgttggcaaagcgctgtgtgatctctccctggggacgtggagccagttggaagtggaagccacagcagctgaaagcctgaccttcagatgtcgcagggtgcacctggatgagtcacaggaagaaggctagaagactgactcttggccgcattagtcctggctacttagaggccacctgggtcatgggccagctccctggttgcactggtcagccaggattgcactggttaccagggcagccatggcaccaaggtttgatgggcttgccatctaagtggaaatgcagaatgtgcccat

SEQ ID NO: 466483 - DNA, 2308 bp, Homo sapiens
tttatatgtgcaggcacgatttatcctggcctagcatgccttggttaggaaatgttttgggggatatcacacttcagactgaaaaaaaaatggccccagtacttactacgtgaataatgtcctttgtgcgacaacttgaacgctgtggtctgagggttccagtgttgcttggttagataagctgaggagtgagaagtaatcagaccttcacttggtgggcccgagtgtactgtgcagagactacttgtacctacaagacctgctactcgccaagggctgattgggagaataatggaatctgaaaatatggattctgaaaatatgaagacagaaaatatggaatctcaaaatgtagactttgagagtgtttcttcagttacagctctggaagccctctctaagctacttaatcctgaagaagaggatgattctgactatggacagacaaatggtttatctactattggagccatgggtcctgggaatattggaccaccccaaatagaagagctcaaagtcatccctgaaaccagcgaggaaaataatgaggacatctggaattcagaagagattccagaaggagcagaatatgatgatatgtgggatgttagagaaatcccagagtatgagattatattcagacagcaggtgggaactgaagatatatttttagggttgtcaaaaaaggactcctcaacaggttgttgcagtgaactagtggctaaaattaaattgccaaatacaaacccttctgatattcaaattgatatccaggaaacaatccttgaccttcgtactcctcagaagaagctgttgataactcttcctgagctggtggaatgtaccagtgccaaagcattctatatcccagagactgaaactcttgaaatcactatgactatgaaaagagagttagatattgctaatttcttctgaaactgcatgaaaaagataaaaagtagtaaaatggcattggtaacaattaaaaaactttgaaaaaaatgattgttttctatattctctttattattctgacatatttttgaaagggacaaaattcagttctagtgatattgtgaccatttacagtaaaggttgaatctttcattctgtcctccatgtcttttagcctctgtcatatttttcatctctctttgttcttaatactgggtaattttctcagatctattccccagtttaataattctcaggattctaatcttgccagtgattatgtccactgactccccctcatagtgaaatgagatagttccctttacaccttcacaggactcctgaaggcgttggctcatttactcagactgcagctctcaaccccttgtgggaggggggtgcacacaggttaaagtcctagaagtgaaattgctctatatgcacatttctaaatattttgataaatttagccaaattgcctgtcaaaaaggctcatattagtgcgcatttctttacaccctaagaaaccttgaataacatcatcctttttaatgatttacaacttaataaggaaaaataacattatatcatttttacaaattctataccttgacatacttagtgaggctgaacaatttaccatacatttattggctatttatgctcttgttttgaggtctatttattcttgtcttttgttaatttttctattagagtatttaattttttcttattgatttgtaaaaccttcttatatattaagaatagtaaagttagctatctgtaacatattttacaaacatttctcacaggactttttgtcttttaattctgtttagtatttttaatatgaagtttttatgttttgtagcatattcttaggttattcacttatttttattctggtggtattaagatttcatcttttacttttaactgtatccagctggaatttattttggaacaattaatttttggctttttaactctaaagttgaacattataaaatatgtttaaaacattcactgtcacactctgccttctcccatttaattttactatgaaatcatccataatttttgctgctagaagagcatttgatgatttgtaatatattataaagcaatggaatttgagtgcagtgcacttttagtcaattcccctgacaagataatttttaaatgtttctatttgactttaaaatacatttcacatatgtacatttcacacatacatgaataggtcttacactaaatttataccagtccgaatttcagaagcatcattattaacatccaacttgacagatgggaagcaaccagttttccttatcctgctaatctgtttaaacgc

SEQ ID NO: 466484 - DNA, 2097 bp, Homo sapiens
accctagcaacggagagacgccacgctctgcacagtctattttcggagcctagccagagacgggaaaactgaccaagataatggaatctgaaaatatggattctgaaaatatgaagacagaaaatatggaatctcaaaatgtagactttgagagtgtttcttcagttacagctctggaagccctctctaagctacttaatcctgaagaagaggatgattctgactatggacagacaaatggtttatctactattggagccatgggtcctgggaatattggaccaccccaaatagaagagctcaaagtcatccctgaaaccagcgaggaaaataatgaggacatctggaattcagaagagattccagaaggagcagaatatgatgatatgtgggatgttagagaaatcccagagtatgagattatattcagacagcaggtgggaactgaagatatatttttagggttgtcaaaaaaggactcctcaacaggttgttgcagtgaactagtggctaaaattaaattgccaaatacaaacccttctgatattcaaattgatatccaggaaacaatccttgaccttcgtactcctcagaagaagctgttgataactcttcctgagctggtggaatgtaccagtgccaaagcattctatatcccagagactgaaactcttgaaatcactatgactatgaaaagagagttagatattgctaatttcttctgaaactgcatgaaaaagataaaaagtagtaaaatggcattggtaacaattaaaaaactttgaaaaaaatgattgttttctatattctctttattattctgacatatttttgaaagggacaaaattcagttctagtgatattgtgaccatttacagtaaaggttgaatctttcattctgtcctccatgtcttttagcctctgtcatatttttcatctctctttgttcttaatactgggtaattttctcagatctattccccagtttaataattctcaggattctaatcttgccagtgattatgtccactgactccccctcatagtgaaatgagatagttccctttacaccttcacaggactcctgaaggcgttggctcatttactcagactgcagctctcaaccccttgtgggaggggggtgcacacaggttaaagtcctagaagtgaaattgctctatatgcacatttctaaatattttgataaatttagccaaattgcctgtcaaaaaggctcatattagtgcgcatttctttacaccctaagaaaccttgaataacatcatcctttttaatgatttacaacttaataaggaaaaataacattatatcatttttacaaattctataccttgacatacttagtgaggctgaacaatttaccatacatttattggctatttatgctcttgttttgaggtctatttattcttgtcttttgttaatttttctattagagtatttaattttttcttattgatttgtaaaaccttcttatatattaagaatagtaaagttagctatctgtaacatattttacaaacatttctcacaggactttttgtcttttaattctgtttagtatttttaatatgaagtttttatgttttgtagcatattcttaggttattcacttatttttattctggtggtattaagatttcatcttttacttttaactgtatccagctggaatttattttggaacaattaatttttggctttttaactctaaagttgaacattataaaatatgtttaaaacattcactgtcacactctgccttctcccatttaattttactatgaaatcatccataatttttgctgctagaagagcatttgatgatttgtaatatattataaagcaatggaatttgagtgcagtgcacttttagtcaattcccctgacaagataatttttaaatgtttctatttgactttaaaatacatttcacatatgtacatttcacacatacatgaataggtcttacactaaatttataccagtccgaatttcagaagcatcattattaacatccaacttgacagatgggaagcaaccagttttccttatcctgctaatctgtttaaacgc

SEQ ID NO: 466485 - DNA, 599 bp, Homo sapiens
aacatagctaggtagaggccgggtgttaatcggccgaggcggaagcggagcaaggtcgaggccgggttggcgccggagccggggccgcttggagctcgtgtggggtctccggtccagggcgcggcatgggcgtcctggccgcagcggcgcgctgcctggtccggggtgcggaccgaatgagcaagtggacgagcaagcggggcccgcgcagcttcaggggccgcaagggccggggcgccaagggcatcggcttcctcacctcgggctggaggttcgtgcagatcaaggagatggtcccggagttcgtcgtcccggatctgaccggcttcaagctcaagccctacgtgagctacctcgcccctgagagcgaggagacgcccctgacggccgcgcagctcttcagcgaagccgtggcgcctgccatcgaaaaggacttcaaggacggtaccttcgaccctgacaacctggaaaagtacggcttcgagcccacacaggagggaaagctcttccagctctaccccaggaacttcctgcgctagctgggcgggggaggggcggcctgccctcatctcatttctattaaacgcctttgccagcta

SEQ ID NO: 466486 - DNA, 565 bp, Homo sapiens
  misc_feature (38)..(38): n is a, c, g, or t
tgggtccaagattattgattaatttgggcaccgcgagngctcgagtccccccacaccactgcccggcctgcgggggagcacagacagcccgggccctcccggctgcaggtcccgggctttccccgcgcggttgccggctccgcccagaggagccgcgcccggcggaggggtaagaaaggcagggtcgcggcgtcaacgcggcggccgtctcgagtccagggcccgcgtcctccccgacctcccgacgccacctcacggcctcagggggactgggctcccggatctgaccggcttcaagctcaagccctacgtgagctacctcgcccctgagagcgaggagacgcccctgacggccgcgcagctcttcagcgaagccgtggcgcctgccatcgaaaaggacttcaaggacggtaccttcgaccctgacaacctggaaaagtacggcttcgagcccacacaggagggaaagctcttccagctctaccccaggaacttcctgcgctagctgggcgggggaggggcggcctgccctcatctcatttctattaaacgcctttgccagcta

SEQ ID NO: 466487 - DNA, 605 bp, Homo sapiens
  misc_feature (38)..(38): n is a, c, g, or t
tgggtccaagattattgattaatttgggcaccgcgagngctcgagtccccccacaccactgcccggcctgcgggggagcacagacagcccgggccctcccggctgcaggtcccgggctttccccgcgcggttgccggctccgcccagaggagccgcgcccggcggaggggtaagaaaggcagggtcgcggcgtcaacgcggcggccgtctcgagtccagggcccgcgtcctccccgacctcccgacgccacctcacggcctcagggggactgggctcccggatctgaccggcttcaagctcaagccctacgtgagctacctcgcccctgagagcgaggagacgcccctgacggccgcgcagctcttcagcgaagccgtggcgcctgccatcgaaaaggacttcaaggacggtaccttcgaccctgacaacctggaaaagtacggcttcgagcccacacaggagggaaagctcttccagctctaccccaggaacttcctgcgctagctgggcgggggaggggcggcctgccctcatctcatttctattaaacgcctttgccagctaaaaatataaacatacaaagaaatagaaaaagtcgtatcga

SEQ ID NO: 466488 - DNA, 1169 bp, Homo sapiens
  misc_feature (38)..(38): n is a, c, g, or t
  misc_feature (437)..(437): n is a, c, g, or t
tgggtccaagattattgattaatttgggcaccgcgagngctcgagtccccccacaccactgcccggcctgcgggggagcacagacagcccgggccctcccggctgcaggtcccgggctttccccgcgcggttgccggctccgcccagaggagccgcgcccggcggaggggtaagaaaggcagggtcgcggcgtcaacgcggcggccgtctcgagtccagggcccgcgtcctccccgacctcccgacgccacctcacggcctcagggggactgggctcccgggaaaccgccggccacctggcggacgaacacaggcagtggcgggcagtggagacgccagggaccaccgcgctgagagcgatcactcatccgccagccccgccccgcgagccccgccccgcgagccccgccccgcagccccgccccgcgagccccgcnccgcgagccccgcaccgccggccccgcaccgccagccccgcgagccccgccccgccccgcgcgctcctcgcattggccgagtccccgcggccacaccccctaccagattggggccgctattggacgctgcggccgcggccaatcggagccgctcttgctgcgacgcagcggtcggaagcggagcaaggtcgaggccgggttggcgccggagccggggccgcttggagctcgtgtggggtctccggtccagggcgcggcatgggcgtcctggccgcagcggcgcgctgcctggtccggggtgcggaccgaatgagcaagtggacgagcaagcggggcccgcgcagcttcaggggccgcaagggccggggcgccaagggcatcggcttcctcacctcgggctggaggttcgtgcagatcaaggagatggtcccggagttcgtcgtcccggatctgaccggcttcaagctcaagccctacgtgagctacctcgcccctgagagcgaggagacgcccctgacggccgcgcagctcttcagcgaagccgtggcgcctgccatcgaaaaggacttcaaggacggtaccttcgaccctgacaacctggaaaagtacggcttcgagcccacacaggagggaaagctcttccagctctaccccaggaacttcctgcgctagctgggcgggggaggggcggcctgccctcatctcatttctattaaacgcctttgccagcta

SEQ ID NO: 466489 - DNA, 1128 bp, Homo sapiens
  misc_feature (38)..(38): n is a, c, g, or t
  misc_feature (396)..(396): n is a, c, g, or t
tgggtccaagattattgattaatttgggcaccgcgagngctcgagtccccccacaccactgcccggcctgcgggggagcacagacagcccgggccctcccggctgcaggtcccgggctttccccgcgcggttgccggctccgcccagaggagccgcgcccggcggaggggtaagaaaggcagggtcgcggcgtcaacgcggcggccgtctcgagtccagggcccgcgtcctccccgacctcccgacgccacctcacggcctcagggggactgggctcccgggaaaccgccggccacctggcggacgaacacaggcagtggcgggcagtggagacgccagggaccaccgcgctgagagcgatcactcatccgccagccccgccccgcgagccccgcnccgcgagccccgcaccgccggccccgcaccgccagccccgcgagccccgccccgccccgcgcgctcctcgcattggccgagtccccgcggccacaccccctaccagattggggccgctattggacgctgcggccgcggccaatcggagccgctcttgctgcgacgcagcggtcggaagcggagcaaggtcgaggccgggttggcgccggagccggggccgcttggagctcgtgtggggtctccggtccagggcgcggcatgggcgtcctggccgcagcggcgcgctgcctggtccggggtgcggaccgaatgagcaagtggacgagcaagcggggcccgcgcagcttcaggggccgcaagggccggggcgccaagggcatcggcttcctcacctcgggctggaggttcgtgcagatcaaggagatggtcccggagttcgtcgtcccggatctgaccggcttcaagctcaagccctacgtgagctacctcgcccctgagagcgaggagacgcccctgacggccgcgcagctcttcagcgaagccgtggcgcctgccatcgaaaaggacttcaaggacggtaccttcgaccctgacaacctggaaaagtacggcttcgagcccacacaggagggaaagctcttccagctctaccccaggaacttcctgcgctagctgggcgggggaggggcggcctgccctcatctcatttctattaaacgcctttgccagcta

SEQ ID NO: 466490 - DNA, 1495 bp, Homo sapiens
  misc_feature (38)..(38): n is a, c, g, or t
  misc_feature (437)..(437): n is a, c, g, or t
  misc_feature (1276)..(1276): n is a, c, g, or t
tgggtccaagattattgattaatttgggcaccgcgagngctcgagtccccccacaccactgcccggcctgcgggggagcacagacagcccgggccctcccggctgcaggtcccgggctttccccgcgcggttgccggctccgcccagaggagccgcgcccggcggaggggtaagaaaggcagggtcgcggcgtcaacgcggcggccgtctcgagtccagggcccgcgtcctccccgacctcccgacgccacctcacggcctcagggggactgggctcccgggaaaccgccggccacctggcggacgaacacaggcagtggcgggcagtggagacgccagggaccaccgcgctgagagcgatcactcatccgccagccccgccccgcgagccccgccccgcgagccccgccccgcagccccgccccgcgagccccgcnccgcgagccccgcaccgccggccccgcaccgccagccccgcgagccccgccccgccccgcgcgctcctcgcattggccgagtccccgcggccacaccccctaccagattggggccgctattggacgctgcggccgcggccaatcggagccgctcttgctgcgacgcagcggtcggaagcggagcaaggtcgaggccgggttggcgccggagccggggccgcttggagctcgtgtggggtctccggtccagggcgcggcatgggcgtcctggccgcagcggcgcgctgcctggtccggggtgcggaccgaatgagcaagtggacgagcaagcggggcccgcgcagcttcaggggccgcaagggccggggcgccaagggcatcggcttcctcacctcgggctggaggttcgtgcagatcaaggagatggtcccggagttcgtcgtcccggatctgaccggcttcaagctcaagccctacgtgagctacctcgcccctgagagcgaggagacgcccctgacggccgcgcagctcttcagcgaagccgtggcgcctgccatcgaaaaggacttcaaggacggtaccttcgaccctgacaacctggaaaagtacggcttcgagcccacacaggagggaaagctcttccagctctaccccaggaacttcctgcgctagctgggcgggggaggggcggcctgccctcatctcatttctattaaacgcctttgccagctaaaaaaaaaaaaaaaaaaaaaaaaaaaaaaaaaaaacaaagggggggggggctcaaaaaatttaccccggaggggcccacattttgacggtgtacgcgctttcttgtncaccggggggcccaataaggggaggcgattttaacagcaagaaagggggcggagttttaaaaagcgtgggaggggcgaaactgtgtcacggggaacacttggggaagggacccctattggcggggggggcacaatcggggccaatatcctcgcagggatttaacgcctgaggaaaataaacttcggcggtatatgcgtggacacaaggaatattggcag

SEQ ID NO: 466491 - DNA, 1294 bp, Homo sapiens
  misc_feature (38)..(38): n is a, c, g, or t
  misc_feature (437)..(437): n is a, c, g, or t
tgggtccaagattattgattaatttgggcaccgcgagngctcgagtccccccacaccactgcccggcctgcgggggagcacagacagcccgggccctcccggctgcaggtcccgggctttccccgcgcggttgccggctccgcccagaggagccgcgcccggcggaggggtaagaaaggcagggtcgcggcgtcaacgcggcggccgtctcgagtccagggcccgcgtcctccccgacctcccgacgccacctcacggcctcagggggactgggctcccgggaaaccgccggccacctggcggacgaacacaggcagtggcgggcagtggagacgccagggaccaccgcgctgagagcgatcactcatccgccagccccgccccgcgagccccgccccgcgagccccgccccgcagccccgccccgcgagccccgcnccgcgagccccgcaccgccggccccgcaccgccagccccgcgagccccgccccgccccgcgcgctcctcgcattggccgagtccccgcggccacaccccctaccagattggggccgctattggacgctgcggccgcggccaatcggagccgctcttgctgcgacgcagcggtcggaagcggagcaaggtcgaggccgggttggcgccggagccggggccgcttggagctcgtgtggggtctccggtccagggcgcggcatgggcgtcctggccgcagcggcgcgctgcctggtccggggtgcggaccgaatgagcaagtggacgagcaagcggggcccgcgcagcttcaggggccgcaagggccggggcgccaagggcatcggcttcctcacctcgggctggaggttcgtgcagatcaaggagatggtcccggagttcgtcgtcccggatctgaccggcttcaagctcaagccctacgtgagctacctcgcccctgagagcgaggagacgcccctgacggccgcgcagctcttcagcgaagccgtggcgcctgccatcgaaaaggacttcaaggacggtaccttcgaccctgacaacctggaaaagtacggcttcgagcccacacaggagggaaagctcttccagctctaccccaggaacttcctgcgctagctgggcgggggaggggcggcctgccctcatctcatttctattaaacgcctttgccagctatacggtgtttgttttttggcctcaggtcatggcaaagtgtgcagcatgacagatttcagtgcaggcacctaagccgagttctcatgcagactcggcgctgtgaacctctttggaggtcatcttcc

SEQ ID NO: 466492 - DNA, 1297 bp, Homo sapiens
  misc_feature (38)..(38): n is a, c, g, or t
  misc_feature (437)..(437): n is a, c, g, or t
tgggtccaagattattgattaatttgggcaccgcgagngctcgagtccccccacaccactgcccggcctgcgggggagcacagacagcccgggccctcccggctgcaggtcccgggctttccccgcgcggttgccggctccgcccagaggagccgcgcccggcggaggggtaagaaaggcagggtcgcggcgtcaacgcggcggccgtctcgagtccagggcccgcgtcctccccgacctcccgacgccacctcacggcctcagggggactgggctcccgggaaaccgccggccacctggcggacgaacacaggcagtggcgggcagtggagacgccagggaccaccgcgctgagagcgatcactcatccgccagccccgccccgcgagccccgccccgcgagccccgccccgcagccccgccccgcgagccccgcnccgcgagccccgcaccgccggccccgcaccgccagccccgcgagccccgccccgccccgcgcgctcctcgcattggccgagtccccgcggccacaccccctaccagattggggccgctattggacgctgcggccgcggccaatcggagccgctcttgctgcgacgcagcggtcggaagcggagcaaggtcgaggccgggttggcgccggagccggggccgcttggagctcgtgtggggtctccggtccagggcgcggcatgggcgtcctggccgcagcggcgcgctgcctggtccggggtgcggaccgaatgagcaagtggacgagcaagcggggcccgcgcagcttcaggggccgcaagggccggggcgccaagggcatcggcttcctcacctcgggctggaggttcgtgcagatcaaggagatggtcccggagttcgtcgtcccggatctgaccggcttcaagctcaagccctacgtgagctacctcgcccctgagagcgaggagacgcccctgacggccgcgcagctcttcagcgaagccgtggcgcctgccatcgaaaaggacttcaaggacggtaccttcgaccctgacaacctggaaaagtacggcttcgagcccacacaggagggaaagctcttccagctctaccccaggaacttcctgcgctagctgggcgggggaggggcggcctgccctcatctcatttctattaaacgcctttgccagctactatagtgagtcggattaaagttcacgggcgcgcggttacaaggtccgggcggggcccgtgcgtaccaatttatcgctgcagaatccccttcgcagctgcgttggagagccggacgatgcctccacgt

SEQ ID NO: 466493 - DNA, 1136 bp, Homo sapiens
  misc_feature (38)..(38): n is a, c, g, or t
  misc_feature (437)..(437): n is a, c, g, or t
tgggtccaagattattgattaatttgggcaccgcgagngctcgagtccccccacaccactgcccggcctgcgggggagcacagacagcccgggccctcccggctgcaggtcccgggctttccccgcgcggttgccggctccgcccagaggagccgcgcccggcggaggggtaagaaaggcagggtcgcggcgtcaacgcggcggccgtctcgagtccagggcccgcgtcctccccgacctcccgacgccacctcacggcctcagggggactgggctcccgggaaaccgccggccacctggcggacgaacacaggcagtggcgggcagtggagacgccagggaccaccgcgctgagagcgatcactcatccgccagccccgccccgcgagccccgccccgcgagccccgccccgcagccccgccccgcgagccccgcnccgcgagccccgcaccgccggccccgcaccgccagccccgcgagccccgccccgccccgcgcgctcctcgcattggccgagtccccgcggccacaccccctaccagattggggccgctattggacgctgcggccgcggccaatcggagccgctcttgctgcgacgcagcggtcggaagcggagcaaggtcgaggccgggttggcgccggagccggggccgcttggagctcgtgtggggtctccggtccagggcgcggcatgggcgtcctggccgcagcggcgcgctgcctggtccggggtgcggaccgaatgagcaagtggacgagcaagcggggcccgcgcagcttcaggggccgcaagggccggggcgccaagggcatcggcttcctcacctcgggctggaggttcgtgcagatcaaggagatggtcccggagttcgtcgtcccggatctgaccggcttcaagctcaagccctacgtgagctacctcgcccctgagagcgaggagacgcccctgacggccgcgcagctcttcagcgaagccgtggcgcctgccatcgaaaaggacttcaaggacggtaccttcgaccctgacaacctggaaaagtacggcttcgagcccacacaggagggaaagctcttccagctctaccccaggaacttcctgcgctagctgggaaaggcgtttaatagaaatgag

SEQ ID NO: 466494 - DNA, 1059 bp, Homo sapiens
ggggaaacctaggctaggtacgagggctggcggaagcggagcaaggtcgaggccgggttggcgccggagccggggccgcttggagctcgtgtggggtctccggtccagggcgcggcatgggcgtcctggccgcagcggcgcgctgcctggtccggggtgcggaccgaatgagcaagtggacgagcaagcggggcccgcgcagcttcaggggccgcaagggccggggcgccaagggcatcggcttcctcacctcgggctggaggttcgtgcagatcaaggagatggtcccggagttcgtcgtcccggatctgaccggcttcaagctcaagccctacgtgagctacctcgcccctgagagcgaggagacgcccctgacggccgcgcagctcttcagcgaagccgtggcgcctgccatcgaaaaggacttcaaggacggtaccttcgaccctgacaacctggaaaagtacggcttcgagcccacacaggagggaaagctcttccagctctaccccaggaacttcctgcgctagctgggcgggggaggggcggcctgccctcatctcatttctattaaacgcctttgccagctaaaaaaaaaaaaaaaaaaaaaaaaaaaaaaaaaaaaaaaaaaaaaaaaaaaaaaaaaagagggggaccggcgacaaaaaaaaaaattaacaagagaggggagcaagaaatataaaaagataaccaacacatatcgtgtagcacgagaggaaagcaccaataaaagagagggcagatattaattaaacacaacagacgagaagcgcgaagataatataaaaaaagagtgaaaagaggagaaaaaaatagtgatccgtgagagaacataactggaggaaaagacaccccccaaacgacgggaggcgaggacacaaaccagtgagaccacacaaactcccaagaaaaaatatagacgacctgcggaggaacaaaataaaacactacagagcgataacaaggtgtcaacaacaagggaaaaacgaacgccagaaaaaaaatatgacacaagaaaaaaaaataggaaaattaagc

SEQ ID NO: 466495 - DNA, 584 bp, Homo sapiens
ttagcgctagtacgaggcctgcgtcggaagcggagcaaggtcgaggccgggttggcgccggagccggggccgcttggagctcgtgtggggtctccggtccagggcgcggcatgggcgtcctggccgcagcggcgcgctgcctggtccggggtgcggaccgaatgagcaagtggacgagcaagcggggcccgcgcagcttcaggggccgcaagggccggggcgccaagggcatcggcttcctcacctcgggctggaggttcgtgcagatcaaggagatggtcccggagttcgtcgtcccggatctgaccggcttcaagctcaagccctacgtgagctacctcgcccctgagagcgaggagacgcccctgacggccgcgcagctcttcagcgaagccgtggcgcctgccatcgaaaaggacttcaaggacggtaccttcgaccctgacaacctggaaaagtacggcttcgagcccacacaggagggaaagctcttccagctctaccccaggaacttcctgcgctagctgggcgggggaggggcggcctgccctcatctcatttctattaaacgcctttgccagcta

SEQ ID NO: 466496 - DNA, 1212 bp, Homo sapiens
  misc_feature (38)..(38): n is a, c, g, or t
  misc_feature (480)..(480): n is a, c, g, or t
tgggtccaagattattgattaatttgggcaccgcgagngctcgagtccccccacaccactgcccggcctgcgggggagcacagacagcccgggccctcccggctgcaggtcccgggctttccccgcgcggttgccggctccgcccagaggagccgcgcccggcggaggggtaagaaaggcagggtcgcggcgtcaacgcggcggccgtctcgagtccagggcccgcgtcctccccgacctcccgacgccacctcacggcctcagggggactgggctcccgggaaaccgccggccacctggcggacgaacacaggcagtggcgggcagtggagacgccagggaccaccgcgctgagagcgatcactcatccgccagccccgccccgcgagccccgccccgcgagccccgccccgcgagccccgccccgcgagccccgccccgcgagccccgccccgcgagccccgccccgcgagccccgcnccgcgagccccgcaccgccggccccgcaccgccagccccgcgagccccgccccgccccgcgcgctcctcgcattggccgagtccccgcggccacaccccctaccagattggggccgctattggacgctgcggccgcggccaatcggagccgctcttgctgcgacgcagcggtcggaagcggagcaaggtcgaggccgggttggcgccggagccggggccgcttggagctcgtgtggggtctccggtccagggcgcggcatgggcgtcctggccgcagcggcgcgctgcctggtccggggtgcggaccgaatgagcaagtggacgagcaagcggggcccgcgcagcttcaggggccgcaagggccggggcgccaagggcatcggcttcctcacctcgggctggaggttcgtgcagatcaaggagatggtcccggagttcgtcgtcccggatctgaccggcttcaagctcaagccctacgtgagctacctcgcccctgagagcgaggagacgcccctgacggccgcgcagctcttcagcgaagccgtggcgcctgccatcgaaaaggacttcaaggacggtaccttcgaccctgacaacctggaaaagtacggcttcgagcccacacaggagggaaagctcttccagctctaccccaggaacttcctgcgctagctgggcgggggaggggcggcctgccctcatctcatttctattaaacgcctttgccagcta

SEQ ID NO: 466497 - DNA, 1638 bp, Homo sapiens
  misc_feature (38)..(38): n is a, c, g, or t
  misc_feature (437)..(437): n is a, c, g, or t
tgggtccaagattattgattaatttgggcaccgcgagngctcgagtccccccacaccactgcccggcctgcgggggagcacagacagcccgggccctcccggctgcaggtcccgggctttccccgcgcggttgccggctccgcccagaggagccgcgcccggcggaggggtaagaaaggcagggtcgcggcgtcaacgcggcggccgtctcgagtccagggcccgcgtcctccccgacctcccgacgccacctcacggcctcagggggactgggctcccgggaaaccgccggccacctggcggacgaacacaggcagtggcgggcagtggagacgccagggaccaccgcgctgagagcgatcactcatccgccagccccgccccgcgagccccgccccgcgagccccgccccgcagccccgccccgcgagccccgcnccgcgagccccgcaccgccggccccgcaccgccagccccgcgagccccgccccgccccgcgcgctcctcgcattggccgagtccccgcggccacaccccctaccagattggggccgctattggacgctgcggccgcggccaatcggagccgctcttgctgcgacgcagcggtcggaagcggagcaaggtcgaggccgggttggcgccggagccggggccgcttggagctcgtgtggggtctccggtccagggcgcggcatgggcgtcctggccgcagcggcgcgctgcctggtccggggtgcggaccgaatgagcaagtggacgagcaagcggggcccgcgcagcttcaggggccgcaagggccggggcgccaagggcatcggcttcctcacctcgggctggaggttcgtgcagatcaaggagatggtcccggagttcgtcgtcccggatctgaccggcttcaagctcaagccctacgtgagctacctcgcccctgagagcgaggagacgcccctgacggccgcgcagctcttcagcgaagccgtggcgcctgccatcgaaaaggacttcaaggacggtaccttcgaccctgacaacctggaaaagtacggcttcgagcccacacaggagggaaagctcttccagctctaccccaggaacttcctgcgctagctgggcgggggaggggcggcctgccctcatctcatttctattaaacgcctttgccagctaaaaaaaaaaaaaaaaaaaaaaaaaaaaaaaaaaaaaaaaaaaaaaaaaaaaaaaaaagagggggaccggcgacaaaaaaaaaaattaacaagagaggggagcaagaaatataaaaagataaccaacacatatcgtgtagcacgagaggaaagcaccaataaaagagagggcagatattaattaaacacaacagacgagaagcgcgaagataatataaaaaaagagtgaaaagaggagaaaaaaatagtgatccgtgagagaacataactggaggaaaagacaccccccaaacgacgggaggcgaggacacaaaccagtgagaccacacaaactcccaagaaaaaatatagacgacctgcggaggaacaaaataaaacactacagagcgataacaaggtgtcaacaacaagggaaaaacgaacgccagaaaaaaaatatgacacaagaaaaaaaaataggaaaattaagc

SEQ ID NO: 466498 - DNA, 1333 bp, Homo sapiens
  misc_feature (38)..(38): n is a, c, g, or t
  misc_feature (437)..(437): n is a, c, g, or t
tgggtccaagattattgattaatttgggcaccgcgagngctcgagtccccccacaccactgcccggcctgcgggggagcacagacagcccgggccctcccggctgcaggtcccgggctttccccgcgcggttgccggctccgcccagaggagccgcgcccggcggaggggtaagaaaggcagggtcgcggcgtcaacgcggcggccgtctcgagtccagggcccgcgtcctccccgacctcccgacgccacctcacggcctcagggggactgggctcccgggaaaccgccggccacctggcggacgaacacaggcagtggcgggcagtggagacgccagggaccaccgcgctgagagcgatcactcatccgccagccccgccccgcgagccccgccccgcgagccccgccccgcagccccgccccgcgagccccgcnccgcgagccccgcaccgccggccccgcaccgccagccccgcgagccccgccccgccccgcgcgctcctcgcattggccgagtccccgcggccacaccccctaccagattggggccgctattggacgctgcggccgcggccaatcggagccgctcttgctgcgacgcagcggtcggaagcggagcaaggtcgaggccgggttggcgccggagccggggccgcttggagctcgtgtggggtctccggtccagggcgcggcatgggcgtcctggccgcagcggcgcgctgcctggtccggggtgcggaccgaatgagcaagtggacgagcaagcggggcccgcgcagcttcaggggccgcaagggccggggcgccaagggcatcggcttcctcacctcgggctggaggttcgtgcagatcaaggagatggtcccggagttcgtcgtcccggatctgaccggcttcaagctcaagccctacgtgagctacctcgcccctgagagcgaggagacgcccctgacggccgcgcagctcttcagcgaagccgtggcgcctgccatcgaaaaggacttcaaggacggtaccttcgaccctgacaacctggaaaagtacggcttcgagcccacacaggagggaaagctcttccagctctaccccaggaacttcctgcgctagctgggcgggggaggggcggcctgccctcatctcatttctattaaacgcctttgccagctaaaaaaaaaaaaaaaaaaaaaaaaaaaaaaaaaaaaccccggggttttttggggggggggaaaaaggggtatggaaggggctgggaagttgttcgggaccccgttttttggtcagggggaaatcgggggggcccccaaaggggggcgattaattcgaaacgcggt

SEQ ID NO: 466499 - DNA, 1209 bp, Homo sapiens
  misc_feature (38)..(38): n is a, c, g, or t
  misc_feature (437)..(437): n is a, c, g, or t
tgggtccaagattattgattaatttgggcaccgcgagngctcgagtccccccacaccactgcccggcctgcgggggagcacagacagcccgggccctcccggctgcaggtcccgggctttccccgcgcggttgccggctccgcccagaggagccgcgcccggcggaggggtaagaaaggcagggtcgcggcgtcaacgcggcggccgtctcgagtccagggcccgcgtcctccccgacctcccgacgccacctcacggcctcagggggactgggctcccgggaaaccgccggccacctggcggacgaacacaggcagtggcgggcagtggagacgccagggaccaccgcgctgagagcgatcactcatccgccagccccgccccgcgagccccgccccgcgagccccgccccgcagccccgccccgcgagccccgcnccgcgagccccgcaccgccggccccgcaccgccagccccgcgagccccgccccgccccgcgcgctcctcgcattggccgagtccccgcggccacaccccctaccagattggggccgctattggacgctgcggccgcggccaatcggagccgctcttgctgcgacgcagcggtcggaagcggagcaaggtcgaggccgggttggcgccggagccggggccgcttggagctcgtgtggggtctccggtccagggcgcggcatgggcgtcctggccgcagcggcgcgctgcctggtccggggtgcggaccgaatgagcaagtggacgagcaagcggggcccgcgcagcttcaggggccgcaagggccggggcgccaagggcatcggcttcctcacctcgggctggaggttcgtgcagatcaaggagatggtcccggagttcgtcgtcccggatctgaccggcttcaagctcaagccctacgtgagctacctcgcccctgagagcgaggagacgcccctgacggccgcgcagctcttcagcgaagccgtggcgcctgccatcgaaaaggacttcaaggacggtaccttcgaccctgacaacctggaaaagtacggcttcgagcccacacaggagggaaagctcttccagctctaccccaggaacttcctgcgctagctgggcgggggaggggcggcctgccctcatctcatttctattaaacgcctttgccagctaaaaatataaacatacaaagaaatagaaaaagtcgtatcga

SEQ ID NO: 466500 - DNA, 1115 bp, Homo sapiens
  misc_feature (38)..(38): n is a, c, g, or t
  misc_feature (437)..(437): n is a, c, g, or t
tgggtccaagattattgattaatttgggcaccgcgagngctcgagtccccccacaccactgcccggcctgcgggggagcacagacagcccgggccctcccggctgcaggtcccgggctttccccgcgcggttgccggctccgcccagaggagccgcgcccggcggaggggtaagaaaggcagggtcgcggcgtcaacgcggcggccgtctcgagtccagggcccgcgtcctccccgacctcccgacgccacctcacggcctcagggggactgggctcccgggaaaccgccggccacctggcggacgaacacaggcagtggcgggcagtggagacgccagggaccaccgcgctgagagcgatcactcatccgccagccccgccccgcgagccccgccccgcgagccccgccccgcagccccgccccgcgagccccgcnccgcgagccccgcaccgccggccccgcaccgccagccccgcgagccccgccccgccccgcgcgctcctcgcattggccgagtccccgcggccacaccccctaccagattggggccgctattggacgctgcggccgcggccaatcggagccgctcttgctgcgacgcagcggtcggaagcggagcaaggtcgaggccgggttggcgccggagccggggccgcttggagctcgtgtggggtctccggtccagggcgcggcatgggcgtcctggccgcagcggcgcgctgcctggtccggggtgcggaccgaatgagcaagtggacgagcaagcggggcccgcgcagcttcaggggccgcaagggccggggcgccaagggcatcggcttcctcacctcgggctggaggttcgtgcagatcaaggagatggtcccggagttcgtcgtcccggatctgaccggcttcaagctcaagccctacgtgagctacctcgcccctgagagcgaggagacgcccctgacggccgcgcagctcttcagcgaagccgtggcgcctgccatcgaaaaggacttcaaggacggtaccttcgaccctgacaacctggggaacttcctgcgctagctgggcgggggaggggcggcctgccctcatctcatttctattaaacgcctttgccagcta

SEQ ID NO: 466501 - DNA, 982 bp, Homo sapiens
cggccgcatcgtttgacagatcgacaatgcccgtcttgctgctgatgactttagaagatcgaggctctcaagaaggagctgctcttcatgaagaagaacaacgaagaggaagcaaaaggcctacaagcccagattgccagctctgggttgaccgtggaggtagatgcccccaaatctcagaccttgccaagaacatggcagactcccgggcccaatatgacaagcttgctcggaagaaccgagaggagctggacaagtactggtctcagcaaatcgaggagagcaccagagtggttaccacacagtccgccaaggttggagctgctgagatgacgctcacagagctgagacatagagtccagtccttagagatcgacctggactccacgagaaatctgaaggccagcttggagaacagcctgagggaggtggaggcccgctatgccctgcagatggagccatcattgttattttcaaagattatctttgggagagtttgggagatatcatacttacatgtctttgagggcaagcaagttgttgtatgctggtttgcttattaaatcaggtaggcagttgttgcctacagaatgctcttggctccaggcatcagatggaggattgcagttacttacaggagaccagagctgaggaggaggaagaggaagaggaggagttcatcttgctatctcagggatggcataggtggaaaaaatcgacatggctacttgcatacacagaatacatcacaaataaacaatttttgttcagttagcatcaatttaactctaattttaatcaaaatgtatttagacaagagctatatattttctaagtgaatttaaatgtactgaaaaacaaaacaaatgataacgcgccaaataatatgcccgtattccagtgaacataatttaatggaattttcctcagttggcagctggattgacttataatcctcgctgtggtaaggtttttcaaagca

SEQ ID NO: 466502 - DNA, 804 bp, Homo sapiens
  misc_feature (791)..(791): n is a, c, g, or t
cggccgcatcgtttgacagatcgacaatgcccgtcttgctgctgatgactttagaagatcgaggctctcaagaaggagctgctcttcatgaagaagaacaacgaagaggaagcaaaaggcctacaagcccagattgccagctctgggttgaccgtggaggtagatgcccccaaatctcagaccttgccaagaacatggcagactcccgggcccaatatgacaagcttgctcggaagaaccgagaggagctggacaagtactggtctcagcaaatcgaggagagcaccagagtggttaccacacagtccgccaaggttggagctgctgagatgacgctcacagagctgagacatagagtccagtccttagagatcgacctggactccacgagaaatctgaaggccagcttggagaacagcctgagggaggtggaggcccgctatgccctgcagatggagcagctcaacgggatcctgctgcaccttgagtcagagctggcacagacccgggcagagggacagcgccaggcccaggagtatgaggccctgctgaacatcaaggtcaagctggaggctgagatcgccacctaccgccgcctgctggaagatggcgaggactttaatcttggtgatgccttggacagcagcaactccatgcaaaccatccaaaagaccaccacccgccggatagtggatggcaaagtggtgtctgagaccaatgacaccaaagttctgaggcattaagccagcagaagcagggtaccctttggggagcaggaggccaataaaaanttcagagttcaaa

SEQ ID NO: 466503 - DNA, 3605 bp, Homo sapiens
gtacctcagttgtccccatcatcatggagacccaaaaggatgaagctgctcaggccaagggagctgcagcctctgggagtacccgtgaacaaacagcagaaaaaggagccaagaacaaggcagctgaggcgacagaaggaccaacctcagagccatcctcatccggcccaggtaggctgaagaaaactgccatgaaactctttggtggcaagaagggtatctgtactctgcctagtttctttggagggggacggagcaaaggttctgggaaaggcagctccaagaaaggtctcagcaagagcaagacccacgatggcctgagtgaagcagcccatggccctgaagatgttgtcagtgaaggaactggcttctccctgcctttgcctgagttaccctgccaatttcccagctctcagagtgcccatggggctttggagacaggctccagatgtaagacatctgtggctggagccacagagaaagctgtggctgagaagtttccctctatgcccaagccaaagaaaggcctaaaaggcttttttagcagtatccgccgtcaccggaagagcaaggtcactggggctgagcaaagtgagccaggggccaaggggcctgagagggtcagagccaggcctcatgagcacgtgagctcagcccctcaggtgccctgctttgaggagaccttccaagcccctagaaaggaaaatgctaacccccaagatgcccctgggccaaaagtttctccaacaccagaaccttctccaccagctactgagaaaatggcctgtaaagatccagaaaaacccatggaggcctgtgcctcagcacatgtgcaacccaagcctgcccctgaagccagtagcctagaggagccccatagcccagaaacaggggagaaggtagtagcaggagaggtaaacccacccaatggccctgtgggggacccactgagcctcttgtttggggatgtgacatccctgaaaagctttgattcattgacaggttgtggtgacataatagcagaacaggacatggacagtatgacagacagcatggcctctgggggccagagagcaaaccgagatgggaccaagcgaagttcctgcctggtgacctaccaaggaggtggggaggagatggccttgccagatgatgatgacgaggaggaagaagaggaagaagaggtggaattagaggaggaagaagaggaggttaaggaggaggaagaagatgatgacttagaatatctgtgggaaactgcccaaatgtatccacggcccaatatgaacctgggctaccatcccaccacatccccaggccaccacggctacatgctccttgacccagttaggtcttatcctggcctagcccctggggaacttttgactcctcagagtgaccagcaagaatccgcccccaatagtgatgaaggttattatgactccaccacacctggatttgaggatgattcaggtgaggccctggggcttgtccgcagggattgtctaccccgagacagctacagtggagatgccctatatgagttctatgagccagatgacagccttgagaactctccacctggagatgactgcctttatgacctccatggtcgaagctctgagatgtttgaccccttcttaaactttgagccctttttgtcctcccggccacctggggcaatggagacagaggaagaacggctagtgaccatccagaaacagttgttgtattgggagcttcggcgggagcagcttgaggcccaggaggcacgtgcccgagaagctcatgccagggaggcccacgccagggaggcctatactcgagaggcttatggcagggaagcctatgccagggaggcccacacttgggaagctcatggcagggaggccagaacccgagaagcccaggcccgagaggttcgttgtagagagactcaagtccgagagacccaggcccggcaggagaagcccgtcttagagtatcagatgaggcccttaggcccatcagtgatgggcctggcagcaggggtatcagggacctctcagatttcccaccggggaattacctcagctttccccaccactgcaagcagcgagccagactggagggacttccgtcctctggagaagcgttatgaaggaacctgctccaagaaagatcaaagtacctgcctgatgcagctcttccagagtgatgccatgtttgagccagacatgcaagaagcaaattttggaggatctcccaggagggcctaccctacttattcaccccctgaagatccagaggaagaggaggttgagaaggaagggaatgccactgtgagtttctcacaggccctggtagagttcaccagcaatgggaacctcttttccagcatgtcctgcagctctgactctgactcatctttcactcaaaacctccctgagctgcctcccatggtgacctttgacatcgctgatgtggaacgggatggggaaggcaagtgtgaagagaatcctgagttccacaatgatgaagatcttgcagcctccttggaagcctttgagctgggctactatcacaaacatgccttcaacaactaccatagtcgattctaccaaggcctgccctggggtgtgagcagcctccctcgatacttgggactgcctggcctgcaccctcgacctccacctgctgctatggccctcaacaggagaagccgctctctcgacactgcagagaccctggagatggagctctccaattcccacttggtccagggctacctcgagtctgatgagctgcaggcccagcaggaagattcagatgaggaggacgaagaggaggaagaaggagaatggagccgagacagtcccctttccctctatactgaacccccaggggcctatgattggcctgcttgggctccctgtcctcttccagtggggccaggtcctgcctggataagccccaaccagttggacaggccttccagccagtctccatataggcaggcaacctgttgcatacctcctatgaccatgtcaatatcactatcagtgccagagtcaagggcacctggggaatctgggcctcaactagctcgtccctcacacctacacctgcccatgggcccttgctataacctccagccacaggcctcccagagcatgagggccaggcctcgagatgtgctgctgcctgttgatgagcccagttgctcttccagttctggaggcttcagccccagccctctaccacaggccaagcctgtgggcatcacccatggcattcctcagctgcccagggtccggcctgagcacccccagcctcagcccactcactatgggccttccagccttgacctgtcaaaggagagggctgagcaaggtgcctctcttgccaccagctactcctccactgccatgaatggaaacctagccaatgtaggggaaagatagaaaatgagggtccatttatcacagccagcaagaaaggggatttcagaccatgcagagcttaaggtatctcagtttcttaaaagggaaaactcccttctcaagcctcccaacacaaaatgttccttaagccttgcccatcccatcatttggactctgtaataa

SEQ ID NO: 466504 - DNA, 3188 bp, Homo sapiens
ggctaatgatggtgttgttgatttcctagaacgagtacatcggccaacatgacgagaggcgtgcgaactgcagtggtgactatgaagaaagcagctgtctggaccgacagtcgctactggactcaggctgagcggcagatggactgcaactgggagctccataaggaagttggcaccactcctattgtcacctggctcctcaccgagattcctgctggagggcgtgtgggttttgaccccttcctcttgtccattgacacctgggagagttatgatctggccctccaaggctctaacagacagctggtgtccatcacaaccaatcttgtggacctggtatggggatcagagaggccaccggttccaaatcaacccatttatgccctgcaggaggcattcacagggagcacttggcaggagaaagtatctggcgtccgaagccagatgcagaagcatcaaaaggtcccgactgccgtccttctgtcggcgcttgaggagacggcctggctcttcaaccttcgagccagtgacatcccctataaccccttcttctattcctacacgctgctcacagactcttctattaggttgtttgcaaacaagagtcgctttagctccgaaaccttgagctatctgaactccagttgcacaggccccatgtgtgtgcaaatcgaggattacagccaagttcgtgacagcatccaggcctactcattgggagatgtgaggatctggattgggaccagctataccatgtatgggatctatgaaatgatacccaaggagaaactcgtgacagacacctactccccagtgatgatgaccaaggcagtgaagaacagcaaggagcaggccctcctcaaggccagccacgtgcgggacgctgtggctgtgatccggtacttggtctggctggagaagaacgtgcccaaaggcacagtggatgagttctcgggggcagagatcgtggacaagttccgaggagaagaacagttctcctccggacccagttttgaaaccatctctgctagtggtctgaatgctgccctggcccactacagcccgaccaaggagctgaaccgcaagctgtcctcagatgagatgtacctgctggactctggggggcagtactgggacgggaccacagacatcaccagaacagtccactggggcaccccctctgccttccagaagtgctccctgctgcttccccggggatatttcaggccactgacaaggcctcagcccaagctgagcctcatcctattctggaaacatcgagggctggccagctggggcagaggcgagggcattgtctctgtgcaccagagggccctgggggtggagcagcgagctgccgtcatgctgcatgcagcaggccgactatggggcagacattgtgctggaaacacagagaggggaacaaaatgctgtccaggtctccaggagctcacagaggcatacacccgtgtgctgataggaaatattgacctgtccaggctcatctttcccgctgctacatcagggcgaatggtggaggcctttgcccgcagagccttgtgggatgctggtctcaattatggtcatgggacaggccacggcattggcaacttcctgtgtgtgcatgagtggccagtgggattccagtccaacaacatcgctatggccaagggcatgttcacttccattgaacctggttactataaggatggagaatttgggatccgtctcgaagatgtggctctcgtggtagaagcaaagaccaagtacccagggagctacctgacctttgaagtggtatcatttgtgccctatgaccggaacctcatcgatgtcagcctgctgtctcccgagcatctccagtacctgaatcgctactaccagaccatccgggagaaggtgggtccagagctgcagaggcgccagctactagaggagttcgagtggcttcaacagcacacagagcccctggccgccagggccccagacaccgcctcctgggcctctgtgttagtggtctccacccttgccatccttggctggagtgtctagaggctccagactctcctgttaaccctccatctagatggggggctcccttgcttagctcccctcaccctgcactgaacataccccaagagcccctgctggcccattgcctagaaacctttgcattcatcctccttctccaagacctatggagaaggtcccaggccccaggaacacagggcttcttggccccagatggcacctccctgcaccccggggttgtataccacaccctgggcccctaatcccaggccccgagataggaaagccagctagtctcttctcttctgtgatctcagtaggcctaacctataacctagcacagactgctacagctgctcccctcccgccaaacaaaaccccaagagagcaatgcccctaccacccaagggtgccatggtcccgggagagcccaaacctatcaccacctgttgggcatagccagagctgttcccacccagccagggcatgaaacatcaaccccccacatgtgaacccatcattcctaaaccctgggtaggctccatgccaagtaacagcagagggagttaagccataggaatttggctgtggagtaagagggaatgcggtgaggcactctggaatatgaccctaccagaggttggagaacaaacttgggcagccggaacccgtcactattctagacttccctggcattcgaggagccctttgaactttccaaagtgcagccacagctacaatgctgttaaatcctcccacattcttggatgccccttcaccttgtgtggacagtgtctggtttctccattttacagacaggaaaactgagcttcagacagggggtgggctttgcctaaggacacacaaatttggttgggagttgatggggccagatgagccagcattccagctctttcacccttcagcaacatgcagagtccctgagcccacctcccagccctctcctcattctctgaacccactgtgtgcttgcatccagaggctccagccctgaccaagccttactgagtatccaaagatgggcctctgtttgctaaataatttgctccctcacctgctcaccccacaaagacaggtactactaataaaattaaagtcatcatcaccctcatcatcatcaccatcatcatcatcat

SEQ ID NO: 466505 - DNA, 519 bp, Homo sapiens
tctaggagaatgagagctcagaatactacgaagctttgctacaattgaaggagtggcttatagactccagctccatatgctgatgacaatatttttgaagccatcaaatcaatcctatactcactgagaggctcaagaagagtgagatggcatccattgagaatgaagaccaccttggtaaaaaagaacagagactttacatctttgtaccgagatgctgctgacaaagcttgtggacaataagtcatgggtgatcaaccaaaactgagccttagaaatacagggttcatttagaaataagtatttttttctttaaggttcttaggcagaaaaggattggcaaaaataaatagaacttctttgctgagaattatgctctactgaatcattttcagtcatacctccataaacaactttgttttaaagccccagacactgtctgtgaagcccagaacaattgctttgctgtcccttcaggaacagcaactgctgcctctaccaacaatttggttagctatg

SEQ ID NO: 466506 - DNA, 1133 bp, Homo sapiens
agctcaatgcgtcttcctattactctgcatatcttatgtcttccatccaaaaagaatcaacttatcagataaataaccacctcatgaactaagatgaatcatgttccggcttttgtcctcctgctgctcttgcctaaggacaacagaagagacacgaaggaatgtgaccatccctatcattggcttgaacaactctggcaaaactgttcttgtggaggcattccaaaaatgagccatgttcagccatcagaaaccttgaaagaagaaaccatcagcccatagttgaaggactgcgctggctattagctgtcattgatacttgccaactaccacctacctcgagcatctcaatctccaagaataacacaggctctggagaaagatgctcatcacacagcttctccaccagaacaggaatgtcaaaggagaaaagacagcatctagaacaatgctcaatcgaagctaagcctctaaagtcaatcctacagagaaagtaaaagaaagtaacagagaaagtaaagagaaaaacagagggaaaccaaaagaaacagttgatatccctcccttagcaaacaggttcatctccagaactatcaggactacccggtttttaaatttccatttgataatatttctacactccccatacaactccacctactctaatatcacatccctgagaacccctgttgttcctgtatatctatattctagccatcaaatcaatcctatactcactgagaggctcaagaagagtgagatggcatccattgagaatgaagaccaccttggtaaaaaagaacagagactttacatctttgtaccgagatgctgctgacaaagcttgtggacaataagtcatgggtgatcaaccaaaactgagccttagaaatacagggttcatttagaaataagtatttttttctttaaggttcttaggcagaaaaggattggcaaaaataaatagaacttctttgctgagaattatgctctactgaatcattttcagtcatacctccataaacaactttgttttaaagccccagacactgtctgtgaagcccagaacaattgctttgctgtcccttcaggaacagcaactgctgcctctaccaacaatttggttagctatg

SEQ ID NO: 466507 - DNA, 1383 bp, Homo sapiens
agctcaatgcgtcttcctattactctgcatatcttatgtcttccatccaaaaagaatcaacttatcagataaataaccacctcatgaactaagatgaatcatgttccggcttttgtcctcctgctgctcttgcctaaggacaacagaagagacacgaaggaatgtgaccatccctatcattggcttgaacaactctggcaaaactgttcttgtggaggcattccaaaaattacttcccagtaagacagaccattgcatgaaatcggaactgactacacttttgttagatgagtatgaactttccatctatgacctgaatggagacctgaagggccgggaagcatggccaaactactatgcacaggcccatgggcttgttttcgtcctggattccagtgacataagacgcatgcaggaagtgaagatcatcttaacacatctgctgtccgataaaagagtggcagggaaacccatcttaatgagccatgttcagccatcagaaaccttgaaagaagaaaccatcagcccatagttgaaggactgcgctggctattagctgtcattgatacttgccaactaccacctacctcgagcatctcaatctccaagaataacacaggctctggagaaagatgctcatcacacagcttctccaccagaacaggaatgtcaaaggagaaaagacagcatctagaacaatgctcaatcgaagctaagcctctaaagtcaatcctacagagaaagtaaaagaaagtaacagagaaagtaaagagaaaaacagagggaaaccaaaagaaacagttgatatccctcccttagcaaacaggttcatctccagaactatcaggactacccggtttttaaatttccatttgataatatttctacactccccatacaactccacctactctaatatcacatccctgagaacccctgttgttcctgtatatctatattctagccatcaaatcaatcctatactcactgagaggctcaagaagagtgagatggcatccattgagaatgaagaccaccttggtaaaaaagaacagagactttacatctttgtaccgagatgctgctgacaaagcttgtggacaataagtcatgggtgatcaaccaaaactgagccttagaaatacagggttcatttagaaataagtatttttttctttaaggttcttaggcagaaaaggattggcaaaaataaatagaacttctttgctgagaattatgctctactgaatcattttcagtcatacctccataaacaactttgttttaaagccccagacactgtctgtgaagcccagaacaattgctttgctgtcccttcaggaacagcaactgctgcctctaccaacaatttggttagctatg

SEQ ID NO: 466508 - DNA, 2083 bp, Homo sapiens
attttctgggcggataggcaggccgttatgcatggagaccttgcctgtaacacccccagagaccttgctgtggtcccactggacactggccacttgacagctgcctcaaacgcagaagtccgggctagcccagaagtaccagatggcagtggtgccactggcagtaagggaggcacctgggcaacagccacacctcagctgttgtctgaagaggacctgccttggcactgtgacctgtaccaggacacttgcagaggggatttttggcaatcagagcctggcaagtgtgagggagggccctggggtagaagctcatggatcccacaggcagaagcaggcaatgaatgtgaagcacatgaagagtttgaagaaaaaggtagagcagaaggattgggggttgatatcaaccctcctgatcctgccctgaccactcttgtcctgaagaaggagaagcagcagacgcagaaaaggaagcacacaggcaagtggaagcatccggagcatgtcaaggacccagcctcaccacggcagtgcctgggacccggctgtgtgtatcccacctggccaggctccaagtactgttcagatgactgtggcatgaggctggcaggtgcccacatcaataacatccttccccagcacatccagcagtggcaaaggagcccctgcattgccaatgagcatggcaagaaaatgctcgagcacatccaccataagcaacagaacacctatacttgcctgaaggacatggagcaccatttccatgaacttgaggccatcattctgcatggcaaacagcaggctagcaacaaaggtgaaaagggcagcaaagacctgcagatcttttgcgcctcctgcaggcggcccatctctaagcgtgtcacctttcaccacatggagcactgctttgccaagtatgagtgccaattgcccgttgggtccctgtaccctacttgtattgaaagggccacatggctcttctgtgatgtctacaatctgaaaagtaagaggtactgtaagcgcctccaggtgctgtgtcctgagcactcttgggaccccaagtccctcaatggattagatgatgcctgcccacattggtccacatacagaaagagaggaattgtgcctcagaagctgtatgtaatggatgacacccaggagcctcatctgcacctggacctaatatggtgataaaattttaggcttggagctgatactgtaatgaggtcatgtttcctgaggctgtttttcctgaataatctacaaactcaagcaaagtaataattatattcaaacaaataaacttttctctaacatggagtcagtactgtgaaaaagtatccatttttaactgttgcaccttgggttcttatttcaaaaagttccatgaagaagatcagccccagcaaaacaaacaaacaaacaaacaaaaacagttggatccagagatgcctgagttagagatgactttggcaactctcctcattggcatacttaaaaccctgctcagggaggagcttatttgccaccttctatgcggaagcatgttcacgactgcacctgtgctgcctttactccacctctacatacaatgactcggctaaccagccccaccaaggcccttgttttcaccttcgttccaggaggtgctgctttgaggaattatccccagtgtcctccttgttgcaagtaataaaatcctcttgttaagtcctccttggttttggtcattggacagtcactgccaagcaatcaaacccactcgtatgagtaacaccttgttgagatgtagcacaaggattagttggataagatttgttgagatactcaatcacagaattgttctactttctgacaactcccaattagagctggtctccacttctttgaacccttcagcaaattgcccaaccaaagctcaagtcctataatatgtccttttaatatcctcttattgagatgctccatggttccccatgatgtgcactctctcctgctacaatgagtaataacccaacttactcaagtatagctatgttcttggtgatctttgactgggggcattgatatcttgtaactcttc

SEQ ID NO: 466509 - DNA, 2204 bp, Homo sapiens
aaatcaatttttcttctaatctaattgggtcttttcagggtttagtgaagtagaaaagttgtgtgtaaattaaatttttgttatcaaattttctttgaaatgctctagaagatcacgctaaataatcaccccaccttcattttagccttttataaatctaattgtatgatacattgggttgacttcaattcaaggcctgcttgcactgtttcttacagtccaaatctttgcctatcattccaggctcattttcaatatattagacagaaatcctagtctgccatggtggggaaagatggattaattagtatttaaagacaccctattatgtgccagatactgaacgcagcaattcatctacagtatctcatttgatatttgtgacatcactatgaggtggaaattattgttcactttctgcagaggaggaagtcaaggcccagatagatttggtaacttgtctaacttgtgccaccaggagtcagtggtagaacagggatttgaacccaggccatcttaatacaaaagaggcctttcctgggctcgagcagacagagggtgggggctggcgtcaagaaggaggcgtctggctgctgggtggagagtgcttctctggtcttttgttttggagggctctgggagccagggtgggcagaggagctttgggctgcccgaggcggactgtgcaagttcctagtcctgactggaaaagccagtgtcctctcttcttgtagtgcttggcaagtcccactgtaccccttgggaaagctcctctctcccaccccttccaggactggtaatgaaattattcccagagaccagagcactggaaaatgccccctcaaagactcctgcctcctctgtttgctgcagtagccatcctgaagggcaagcaagcagtgcccaagaaagaattgggaaccggtgctaggcgagcatcgtctaaccttgtgctctgcaaggccttgaggaaaaggcaatccaaattagaagccaaaggaacaggcctttggcagtcacttaacacaatcacgaagcaaagggaaatgatcaagtctgtcaccagggtcagtgccaatttgtttaagaacgtggtggtcggagatggctatacagaaaaagtgacatttcagatggattttgaacgatgtgtaggaattccttgcagggagaaggtccaaaccccaggccagacaatcttcctgggcttcctccagttccacagtagggccctggctcccagaaacctgccttgctggactgtccacttggagcaagaaggttgtgggagcagctggggagggaccaagggctttgactcccccactggaaacaccaatgtggctccttgtggatgtactgatgaacgactctccacagcacagccaactgtgctgcttgtggtggagaaaagggtgaagggatggggatggtactgcactgaccccaacaagcccctggatgaatacagatggcagacctgtggtgggtttccagagaccatctcagtccagcacagtaaggacactgatgcaggtccactgacaggagcacagaggacgaatgaagtaactctgctgggcatgagggtagaacgggagctcggggaagttgtcgtggtctgaatgtttgtgtctctccaaaattcatatgttgaaatcctgactcccaagatgatggtattaaggtggggcctctgggaggtgattaggttgtgagagtggagcccccattatgggattagagccccctagaagaagagacacgtgacggtacaacaagaagatggccacctgtgaaccaggaagcaggccttcaccaagaaccaggccatgatggcgccctgaccttgaacttccagcctccagaactgtgagaaataaatatttgtttaagccacccagtctatggtattctgtttaacctgaatgtcctaagatagaagtcttcacaaacaaggtgattcctggccaggggtttgaagggtcaatagttttcctagaaggacaaaatgaggagagtggtgcaggggaatgaaacaacacaagcaaagatgcaaaagtgacagtagctgggtggggagttgcaactatttcagcttatctgtttgacttttgcttctcagtgcctggcatggtggctggcacatatggtgctcagaagatgttgggcgaataaatggaccttcttgctcctgggggatc

SEQ ID NO: 466510 - DNA, 1526 bp, Homo sapiens
tttacaccagttggctttggatgaagagtagccctggaaagatccaatgcttaaagttgatgacagcaacactcggatcctgattggctgcttggtggccatcatctttatcctcctggccatcattgtcatcatcctctggaggcagttctggcagaaaatgctggagaaggcttctcggaggatgctggatgatgaaatgacagtcagcctttccctgccaagtgattctagcatgttcaacaataaccgctcctcatcacctagtgaacaagggtccaactcgacttacgatcgcatctttccccttcgccctgactaccaggagccatccaggctgatacgaaaactcccagaatttgctccaggggaggaggagtcaggtgaggatgatgtggtgggcagggcgtcaagggagaaacctcagcaagcatcaggctgcagcggtgttgtgaagccagtccagcccagtggccctgagggggtgccccactatgcagaggctgacatagtgaacctccaaggagtgacaggaggcaacacatactcagtgcctgccgtcaccatggacctgctctcaggaaaagatgtggctgtggaggagttccccaggaaactcctaactttcaaagagaagctgggagaaggacagtttggggaggttcatctctgtgaagtggagggaatggaaaaattcaaagacaaagattttgccctagatgtcagtgccaaccagcctgtcctggtggctgtgaaaatgctccgagcagatgccaacaagaatgccagttacaccaatctgaagtttatggctacccaaattgcctctggcatgaagtacctttcctctcttaattttgttcaccgagatctggccacacgaaactgtttagtgggtaagaactacacaatcaagatagctgactttggaatgagcaggaacctgtaccgtggtgactattaccggatccagggccgggcagtgctccctatccgctggatgtcttgggagagtatcttgctgggcaagttcactacagcaagtgatgtgtgggcctttggggttactttgtgggagactttcaccttttgtcaagaacagccctattcccagctgtcagatgaacaggttattgagaatactggagagttcttccgagaccaagggaggcagacttacctccctcaaccagccatttgtcctgactctgtgtataagctgatgctcagctgctggagaagagatacgaagaaccgtccctcattccaagaaatccaccttctgctccttcaacaaggcgacgagtgatgctgtcagtgcctggccatgttcctacggctcaggtcctccctacaagacctaccactcacccatgcctatgccactccatctggacatttaatgaaactgagagacagaggcttgtttgctttgccctcttttcctggtcacccccactccctacccctgactcatatatacttttttttttttacattaaagaactaaaaaaggaaaaaaaaaa

SEQ ID NO: 466511 - DNA, 2754 bp, Homo sapiens
cggggtggcttagccgttgataacagaagattctgagatgggtgagaagtggtccacacgtggccactgtcattcctctggcataatggacttgggctcaggaggtcaagccctcttcaaggagcatgagctgaaattgctaaactttgggagttttccgtgacacccttcaaagtgctcacggtgtggcatggatcagctggggagggttgatgtggttttgccctgtggggtatctatctgtgtacttttgtctgagggaggcaactggggccacttaggccggcaggtgcccactgtgattggttgacatgataccaagcaacaggatcatccagtcaccttcaatgcagggaggatggctgacaggctccctggggtgacactttcatgcaatcagatgtcgagttggactgtgacatagagccatgtggccacactaaattcccccccacccttcccctgtccacaaccgtcattgtctgttcttgccatccagtggccactgcctccaccatggctgaggctttctctaagacaacctctgaggaagaccagagcatccaggagcccaaagaggccaactccatgacggcccagaagcagaagaagcgccatgccaacagcggcggagatatcttcggggacagctttgccgcctatttcccccgggtgctgaagcaggttcaccaggccctcagcctttcccaggaggccgtgagtgtcatggattctatggttcgtgacatactggaccgcatcgccaccgaggctggtcacctggcccactactccaagtgcgtgaccatcacctcccgggacattcggatggccgtgtgcctgctgctgccggggaagatgggcaagctcgctgagtctcagggcacgaatgccaccctcagtttcctaaatggccgtttttatcagttatctttctaggttatctttgtggtgatattatcaatgtactgatgtttacccttttcactctcattctcctacaactggatggtggaattttccagaacttcattatgtgcgatatggcaagagagaaagtgaatacgctgatataagaagcaagaaaccttccttccttccagatgtgtgtcagtagaattacagagtgtccacggaaacagctcatgccctagtgtacagtggtgcagccaatgagtgacctgaagtctatgagcaacactcattgtcccaatgtgggacgagtgaccgaagctgaacccacaacagccttcctgtgatattccacgtggtggttaaaggcatggcgatgtgattctttacctgatgtttttgtttgcagtgtttgtaatcatggtcttttagggatatgaatccaaagctaagattaatatacgttccttgaccctaacatcaagttatacagagcattgtcagccattagaagaagtcagataacgcttatttcctcaaaagattggcatattaatattcacgttaatattaatacaggctacctttcattgtgctctcttctgggtcccaagtcttggtatttttagaattttttttttctataagtgtattgctgaatttcagagcaggtgctgacttacccattgctttccttttccattgatttccagtcgcccgagtatgtggacaagagaacatactctgggattgcaacccacaggaatttattatgttgtgccttgaagctcaatatgtggccatttttgttaaatgtttcccgtaaattttgaaacatctcataaacaacccttctccttcatatgtagaaaccagtaaaggatggcactctcagtcaaaccacgaagcaaaagctggataaatgacaaaaatcaaaattttcttgagcccgtcagaagtgggaaagaaccaccccagagggacccaacacatagccacatagattatttcaccatttaaagaggaccccttggtcaagagggaaaagggttcggggcaggatagtagccagagcttccctgagtagtgcagatgggaagaggggaaggtcacctccagagctccacttgggatccatagagaaatgatatagaaccaagaagtccactcactgggatttgttactttctgtttttccagaatattagaaaaatattatgaaaatagttgaagagaaatgttatgaaaatagttgaagctgtacttactgcacaaggagaccaagaaaaactcccacaaaatcagctgcaagtaaatccctctggatggtgccgccacatgttcctacaagtccagaacaacccttgccaaaccaaagacacttggcagaaccctgttcctttctagagacagagctgtatacctgttccaaaacaccacatctcactcagtgacttatttctcattatgctaattgttttgctgtaaagtgccaatgtttctgtgaattaagacatacgaataaatttctgaagttacccttgcatatgtgtgtaattagacaagtccttttgagaaaccagatccattgggatattttaccctggaatatgtgttttccctttgtaaattcagaaatcaaagaggaggattagtaaaacagggttaacaatgaaatctgatttgtttgtggggagtgaagaatgaggtggcaaggggactgatgttggtgaattataggaagaaagaggaagggggtggattgatgcgaagatcggaagaggaagctcgcacatttgatatagcatttcagtgagtgattgagcagaagggaaacgtagc

SEQ ID NO: 466512 - DNA, 1121 bp, Homo sapiens
ctagaaggcttagcactgcaggctctgggcgggaaggctaacctggtgcggagccagcctgggtctcagccccgcgtacggcctttcacgagtcttcaagccttcaggctttcttctagtcaagatgagtgataaaccagacttgtcggaagtggagaagtttgacaggtcaaaactgaagaaaactaatactgaagaaaaaaatactcttccctcaaaggaaaaacttcattatgtgcgatatggcaagagagaaagtgaatacgctgatataagaagcaagaaaccttccttccttccagatgtgtgtcagtagaattacagagtgtccacggaaacagctcatgccctagtgtacagtggtgcagccaatgagtgacctgaagtctatgagcaacactcattgtcccaatgtgggacgagtgaccgaagctgaacccacaacagccttcctgtgatattccacgtggtggttaaagaatattagaaaaatattatgaaaatagttgaagagaaatgttatgaaaatagttgaagctgtacttactgcacaaggagaccaagaaaaactcccacaaaatcagctgcaagtaaatccctctggatggtgccgccacatgttcctacaagtccagaacaacccttgccaaaccaaagacacttggcagaaccctgttcctttctagagacagagctgtatacctgttccaaaacaccacatctcactcagtgacttatttctcattatgctaattgttttgctgtaaagtgccaatgtttctgtgaattaagacatacgaataaatttctgaagttacccttgcatatgtgtgtaattagacaagtccttttgagaaaccagatccattgggatattttaccctggaatatgtgttttccctttgtaaattcagaaatcaaagaggaggattagtaaaacagggttaacaatgaaatctgatttgtttgtggggagtgaagaatgaggtggcaaggggactgatgttggtgaattataggaagaaagaggaagggggtggattgatgcgaagatcggaagaggaagctcgcacatttgatatagcatttcagtgagtgattgagcagaagggaaacgtagc

SEQ ID NO: 466513 - DNA, 1953 bp, Homo sapiens
ctagaaggcttagcactgcaggctctgggcgggaaggctaacctggtgcggagccagcctgggtctcagccccgcgtacggcctttcacgagtcttcaagccttcaggctttcttctagtcaagatgagtgataaaccagacttgtcggaagtggagaagtttgacaggtcaaaactgaagaaaactaatactgaagaaaaaaatactcttccctcaaaggaaaaacttcattatgtgcgatatggcaagagagaaagtgaatacgctgatataagaagcaagaaaccttccttccttccagatgtgtgtcagtagaattacagagtgtccacggaaacagctcatgccctagtgtacagtggtgcagccaatgagtgacctgaagtctatgagcaacactcattgtcccaatgtgggacgagtgaccgaagctgaacccacaacagccttcctgtgatattccacgtggtggttaaaggcatggcgatgtgattctttacctgatgtttttgtttgcagtgtttgtaatcatggtcttttagggatatgaatccaaagctaagattaatatacgttccttgaccctaacatcaagttatacagagcattgtcagccattagaagaagtcagataacgcttatttcctcaaaagattggcatattaatattcacgttaatattaatacaggctacctttcattgtgctctcttctgggtcccaagtcttggtatttttagaattttttttttctataagtgtattgctgaatttcagagcaggtgctgacttacccattgctttccttttccattgatttccagtcgcccgagtatgtggacaagagaacatactctgggattgcaacccacaggaatttattatgttgtgccttgaagctcaatatgtggccatttttgttaaatgtttcccgtaaattttgaaacatctcataaacaacccttctccttcatatgtagaaaccagtaaaggatggcactctcagtcaaaccacgaagcaaaagctggataaatgacaaaaatcaaaattttcttgagcccgtcagaagtgggaaagaaccaccccagagggacccaacacatagccacatagattatttcaccatttaaagaggaccccttggtcaagagggaaaagggttcggggcaggatagtagccagagcttccctgagtagtgcagatgggaagaggggaaggtcacctccagagctccacttgggatccatagagaaatgatatagaaccaagaagtccactcactgggatttgttactttctgtttttccagaatattagaaaaatattatgaaaatagttgaagagaaatgttatgaaaatagttgaagctgtacttactgcacaaggagaccaagaaaaactcccacaaaatcagctgcaagtaaatccctctggatggtgccgccacatgttcctacaagtccagaacaacccttgccaaaccaaagacacttggcagaaccctgttcctttctagagacagagctgtatacctgttccaaaacaccacatctcactcagtgacttatttctcattatgctaattgttttgctgtaaagtgccaatgtttctgtgaattaagacatacgaataaatttctgaagttacccttgcatatgtgtgtaattagacaagtccttttgagaaaccagatccattgggatattttaccctggaatatgtgttttccctttgtaaattcagaaatcaaagaggaggattagtaaaacagggttaacaatgaaatctgatttgtttgtggggagtgaagaatgaggtggcaaggggactgatgttggtgaattataggaagaaagaggaagggggtggattgatgcgaagatcggaagaggaagctcgcacatttgatatagcatttcagtgagtgattgagcagaagggaaacgtagc

SEQ ID NO: 466514 - DNA, 1899 bp, Homo sapiens
ctagaaggcttagcactgcaggctctgggcgggaaggctaacctggtgcggagccagcctgggtctcagccccgcgtacggcctttcacgagtcttcaagccttcaggctttcttctagtcaagatgagtgataaaccagacttgtcggaagtggagaagtttgacaggtcaaaactgaagaaaactaatactgaagaaaaaaatactcttccctcaaaggaaaaacttcattatgtgcgatatggcaagagagaaagtgaatacgctgatataagaagcaagaaaccttccttccttccagatgtgtgtcagtagaattacagagtgtccacggaaacagctcatgccctagtgtacagtggtgcagccaatgagtgacctgaagtctatgagcaacactcattgtcccaatgtgggacgagtgaccgaagctgaacccacaacagccttcctgtgatattccacgtggtggttaaaggcatggcgatgtgattctttacctgatgtttttgtttgcagtgtttgtaatcatggtcttttagggatatgaatccaaagctaagattaatatacgttccttgaccctaacatcaagttatacagagcattgtcagccattagaagaagtcagataacgcttatttcctcgtgctctcttctgggtcccaagtcttggtatttttagaattttttttttctataagtgtattgctgaatttcagagcaggtgctgacttacccattgctttccttttccattgatttccagtcgcccgagtatgtggacaagagaacatactctgggattgcaacccacaggaatttattatgttgtgccttgaagctcaatatgtggccatttttgttaaatgtttcccgtaaattttgaaacatctcataaacaacccttctccttcatatgtagaaaccagtaaaggatggcactctcagtcaaaccacgaagcaaaagctggataaatgacaaaaatcaaaattttcttgagcccgtcagaagtgggaaagaaccaccccagagggacccaacacatagccacatagattatttcaccatttaaagaggaccccttggtcaagagggaaaagggttcggggcaggatagtagccagagcttccctgagtagtgcagatgggaagaggggaaggtcacctccagagctccacttgggatccatagagaaatgatatagaaccaagaagtccactcactgggatttgttactttctgtttttccagaatattagaaaaatattatgaaaatagttgaagagaaatgttatgaaaatagttgaagctgtacttactgcacaaggagaccaagaaaaactcccacaaaatcagctgcaagtaaatccctctggatggtgccgccacatgttcctacaagtccagaacaacccttgccaaaccaaagacacttggcagaaccctgttcctttctagagacagagctgtatacctgttccaaaacaccacatctcactcagtgacttatttctcattatgctaattgttttgctgtaaagtgccaatgtttctgtgaattaagacatacgaataaatttctgaagttacccttgcatatgtgtgtaattagacaagtccttttgagaaaccagatccattgggatattttaccctggaatatgtgttttccctttgtaaattcagaaatcaaagaggaggattagtaaaacagggttaacaatgaaatctgatttgtttgtggggagtgaagaatgaggtggcaaggggactgatgttggtgaattataggaagaaagaggaagggggtggattgatgcgaagatcggaagaggaagctcgcacatttgatatagcatttcagtgagtgattgagcagaagggaaacgtagc

SEQ ID NO: 466515 - DNA, 1922 bp, Homo sapiens
cggggtggcttagccgttgataacagaagattctgagatgggtgagaagtggtccacacgtggccactgtcattcctctggcataatggacttgggctcaggaggtcaagccctcttcaaggagcatgagctgaaattgctaaactttgggagttttccgtgacacccttcaaagtgctcacggtgtggcatggatcagctggggagggttgatgtggttttgccctgtggggtatctatctgtgtacttttgtctgagggaggcaactggggccacttaggccggcaggtgcccactgtgattggttgacatgataccaagcaacaggatcatccagtcaccttcaatgcagggaggatggctgacaggctccctggggtgacactttcatgcaatcagatgtcgagttggactgtgacatagagccatgtggccacactaaattcccccccacccttcccctgtccacaaccgtcattgtctgttcttgccatccagtggccactgcctccaccatggctgaggctttctctaagacaacctctgaggaagaccagagcatccaggagcccaaagaggccaactccatgacggcccagaagcagaagaagcgccatgccaacagcggcggagatatcttcggggacagctttgccgcctatttcccccgggtgctgaagcaggttcaccaggccctcagcctttcccaggaggccgtgagtgtcatggattctatggttcgtgacatactggaccgcatcgccaccgaggctggtcacctggcccactactccaagtgcgtgaccatcacctcccgggacattcggatggccgtgtgcctgctgctgccggggaagatgggcaagctcgctgagtctcagggcacgaatgccaccctcagtttcctaaatggccgtttttatcagttatctttctaggttatctttgtggtgatattatcaatgtactgatgtttacccttttcactctcattctcctacaactggatggtggaattttccagaacttcattatgtgcgatatggcaagagagaaagtgaatacgctgatataagaagcaagaaaccttccttccttccagatgtgtgtcagtagaattacagagtgtccacggaaacagctcatgccctagtgtacagtggtgcagccaatgagtgacctgaagtctatgagcaacactcattgtcccaatgtgggacgagtgaccgaagctgaacccacaacagccttcctgtgatattccacgtggtggttaaagaatattagaaaaatattatgaaaatagttgaagagaaatgttatgaaaatagttgaagctgtacttactgcacaaggagaccaagaaaaactcccacaaaatcagctgcaagtaaatccctctggatggtgccgccacatgttcctacaagtccagaacaacccttgccaaaccaaagacacttggcagaaccctgttcctttctagagacagagctgtatacctgttccaaaacaccacatctcactcagtgacttatttctcattatgctaattgttttgctgtaaagtgccaatgtttctgtgaattaagacatacgaataaatttctgaagttacccttgcatatgtgtgtaattagacaagtccttttgagaaaccagatccattgggatattttaccctggaatatgtgttttccctttgtaaattcagaaatcaaagaggaggattagtaaaacagggttaacaatgaaatctgatttgtttgtggggagtgaagaatgaggtggcaaggggactgatgttggtgaattataggaagaaagaggaagggggtggattgatgcgaagatcggaagaggaagctcgcacatttgatatagcatttcagtgagtgattgagcagaagggaaacgtagc

SEQ ID NO: 466516 - DNA, 768 bp, Homo sapiens
aggtgtgagtgacctccagctctgttgcagctgagagtatgatgaagttggtgataaaggaaggtagccttaagcagcatgaatagaagtggtatgtccccagtaggtggggacagcactgtcagcttctacattttgttgttcataccacccctggagcaccgggccaaggtgggtagagccgacacccccttgtctcggggctctgaggctcttgaaagcgcgggaaccagcgtgggggcgggatccccagtgcccccggtgcgtaggcgcactgccgcgctgccacgccctctcccggcccctggccagggcaacggtgccaggggactggcgaaggcgcgcggtgggcgctgcactgcccccctcagggcgggcgacgcgctccttcgcgggcccagcgcgttcacttcctgggcccggctggcactgccctgcgccgccgcccgtcagtcccggtaccccgccaggaaatgtcttcttcctgggaagacggccgctgtctgcggcagtgggtggcagagtctgaaaccaagtcgcacaagccctgggagacagaaagccttgtgtttgtcttggggactgttccgtcagaatgagcagcttaaaaaatgtcgcctgtgaggtctcagctcgtacaacaagaagatagcaatctgcaaaccagaaagtgggccctcacaagaactagatgatgatggtgtcctggcttcaaactcccagcttccagaactgtgagaaataaatttctgttgtttataagttacc

SEQ ID NO: 466517 - DNA, 1124 bp, Homo sapiens
atctggcatttccttgtgctcataatgagaatagttctccaattagccaagatgaacctcatggacatcaccaagatcttctccctcctgcagcccgacaaggaggaggaggacactgacacagaggagaagcaggctctcaatcaagcagtgtatgacaacgactcctatactttggaccagcttttgcgccaggagcgttacaaacgtttcatcaacagcaggagtggctggggtgttcctgggacacccttgcgcttggctgcttcttatggccacttgagctgtttgcaagtcctcttagcccatggtgctgatgttgacagcttggatgtcaaggcacagacgccacttttcactgctgtcagtcatggccatctggactgtgtacgtgtgcttttggaagctggtgcctctcctggtggtagcatctacaacaactgttctcccgtgctcacagctgcccgtgatggtgctgttgctatcctgcaggagctcctagaccatggtgcagaggccaacgtcaaagctaaactaccagtctgggcatcaaacatagcttcatgttctggccccctctatttggccgcagtctacgggcacctggactgtttccgcctgcttttgctccacggggcagaccctgactacaactgcactgaccagggcctattggctcgtgtcccaagaccccgcaccctccttgaaatctgcctccatcataattgtgagccagagtatatccagctgttaatcgattttggtgctaatatctaccttccatctctctcccttgacctgacctcacaagatgataaaggcattgcattgctgctacaggcccgagccactccacggtcacttctatcacaggtccgtttagtcgtccgcagagccttgtgccaggctggccagccacaagccatcaaccagctggatattcctcccatgttgattagctacctaaaacaccaactgtaatcttgcagtctccccaggaacttatgatgcctccgaaaaccacctggggactcacgtagctggagagcattacagcctcatccacttacctggagctgctctcctgtattatcctccacaataaaattctccagaaaataagt

SEQ ID NO: 466518 - DNA, 2669 bp, Homo sapiens
gtgtacacacgtgcgcacatacgtatgtgcagcaagtttcgatcttcaaaaacccgcagctactcacagtgtaagatgcctgtcggggtggggctctgggcctggaaaaactagagcagtctggatgctgcgaggcggcgagcagcaaacatcgttcaagatgtcccaccaagaaggcagcacagacggcttaccagacttagggactgaaagcctgttcagcagcccagaggagcagtctggagccgtggcggcgacagaggcctcctcagacattgacatagcgacctcagagctgagtgtgacagtgaccggagatggcagtgatagcagggatggtggattccccaacgatgccagcacagaaaatcgaagctcagaccaagaaagcgcaagtgaagacatcgaacttgagagcttggaggactttgagcatttcctcatgagtggtgaaagtttattccattaccctttagtgggagaggaggagacagaaagggaggaggaagacgaagagatacaagaggagggaggggaggaggaggaagaggaggaggaggaggaggaggaggaggaggaggaggaggaggaggaagaagaacagcctcgggcgggtccacaaggcagtggcggcaaccatgagcagtattcgttagaggaggatcaggcgctggaggagtgggtttcctcagagacatctgccctgccccgacctcgctggcaggtcgttactgctcttcaccagcggcagctgggttcacgtccccgctttgtatatgaggcctgtggggcaagagcctttgtgcagcgtttccgcctgcaatatcgtcttgcagaccatgtcggctgtgtcaatactgtacactttaaccagcgtggcacccggctggccagtagcggtgatgacctaaaggtgatagtgtgggactgggtgcggcagaggccagtactgaactttgaaagtggtcacacaaataatgtcttccaggccaagttccttcctaactgtggtgattccactctggccatgtgtgcccgtgatgggcaggtacgggtagcagagttaattaatgcatcatatttcaacaatactaagtgtgtggcccagcacaggggacctgcccacaagttggctctggagcctgactctccttataagttcctcacttcaggtgaagatgctgttgtcttcaccattgacctcagacaagaccggccagcttcaaaagttgtggtaacaagagaaaatgataagaaagtgggactgtatacaattactgtgaatcccgccaatacctaccaatttgcagtgggtggacaagatcagtttgtaaggatttatgaccagaggaaaattgataagaaagaaaacaatggcgtgctcaagaaattcactcctcatcatctggttaattgtgatttcccaacaaacatcacctgcgttgtgtacagccacgatggcacagagctgctagccagctacaatgatgacgatatttacctcttcaactcctctcacagtgatggtgctcaatacagtaagagatttaagggacacagaaataataccacagtcaaaggtgttaatttctatggccccaggagtgagtttgtagtgagcggtagtgattgcgggcacatcttcttctgggagaaatcatcctgccaaatcatccagttcctaaaggggagcagagaaggtacaataaactgtcttgaaccccacccttacctacctgtgttggcgtgcagtggcctagatcatgatgtcaagatctggacacccacagctaaagctgccactgagcttactgggttaaagaaggtgattaagaagaacaagtgggaacgagatgaagacagcttgcaccatggcagcctgtttgaccagtacatgctttggttcctcctgcgtcacgtgacgcagagaggtcgtcaccaggactggagaagtggtgaagctgaatttccagatgaagaatcggatgagtcttccagcacttcagagacatctgaggaggaggtccaagaccgagtgcagtgcatgccatcctgaaggcctcatatccagtccagctacatgccacctaagtacactggactttaaaattcagtttgactaatttagaattgtcaatagattaatagatttgctttttgtcttctattttccataatatatgctgaaaaccgtctcttccattccttcctctctactttcctttctttcttccacacattctttctctcattcctttcctcttggtttctttacgcctcttttgttaccccttattcttacatgagtgcatacacaacttatttatgcctcttttcctttgttcccttatagttgacctctaaattttctgaattttgctgaaagaattaatacccttattagatgcatctactcaaatctgacagtctgaaaacggttacctttttactttttttcatctttaacaattttttctgaagatcgagttcctcagttgacctgaaaatttcagaaatgtgtttcttctttagaaaataagacaaactacagttttgttctgtcgatactgacacttggccgcacacacacagtctcagaaaaggaaaagagaagtagtgtgtagattaattcttaacacttggccatacgcagacacagtctcagaaaa

SEQ ID NO: 466519 - DNA, 959 bp, Homo sapiens
gagttggaatgtgacgtagagccatgcgaccataccaaagtgccccccacttccctggtccccaaccgtcactctctgttcttgctatctaatggccgctgcttccgccatggctgaggcttcctctgagacaacctcggaggaaggccagagcatccaggagcccaaagaggccaactccacgaaggcccagaagcagaagaggcgagggtgccgaggctcccgcaggcgccacgccaaccgccgtggggacagcttcggggacagcttcaccccctatttcccccgggtgctgaagcaggttcaccagggcctcagcctttcccaggaggccgtgagtgtcatggattctatgatccatgacatattggaccgcatcgccaccgaggctggtcagctggcccattacaccaagcgcgtgaccatcacctcccgggacatccagatggccgtgcgactgctgctgccggggaagatgggcaagctcgccgaggcccagggcacgaatgccgccctcagaacttcattatgtgcgatatggcaacagagaaagtgaatatgctgatacaagaagcaagattattagaaaaatattacagaaatagctgaagagaaatgttatgaaaatagttgaagttgtgcttattgcacgaggagaccaagaaaaaccccacaaaatcagctgcaagtaaatccttctggatggtgccaccaaatgttcctacaagtccggaacaacccttgccaaaccaaagacccttgccagaaccctgcttcttcccagagacagagctgtgtacctgacaaaacaccacatctcactcagtgacttatttctcattatgctaattgttttgctgtaaaatgccaatgtttctgtgaattaagacatacgaataaatttctgaagttacccttgcatatgtgtgtaattagacaagtccttttgagaaaccaaa

SEQ ID NO: 466520 - DNA, 1066 bp, Homo sapiens
ccgccgcgccccgagcccgccgcttccggtctcagcgcctgccgcagcagctgcggcccagcgagcggcccagatgcaggccatcaagggtgtggtggtgggagacggagctgtaggtaaaacttgcctactgatcagttacacaaccaacgcatttcctggagaagatatccctactgcctttgacaattattctgccaatgttatggtagatggaaaactggtgaatctgggcttatggaatacagctggacaagaagattatgacagattacgccccctatcctatccgcaagcagatgtgttcttaatttgcttttcgcttgtgagtcctgcatcatttgaaaatgtccttgcaaagtggtatcctgaggtgcagcaccactgtcccaacactcccattatcctagtgggaactaaacttgatcttagggatgataaagacaggatccagaaactgaaggagaagaagctaactcccatcacctatccgcagggtctagccatggctaaggagatgggtgctgtaaaatacctggagtgcttggccctcacaaggcgaggcctcaagacagtgtttgacgaagcgatccgagctgtcctctgcccacctcccgtgaagaagaggaagagaaaatgcctgcagttgtaaatgtctgagcccctagttcttggtcctgtcccttggaacctttgttcgctttgctcaaaaaacggtggagcctttgcactcaatgccaactttttgttacagattaatttttccataaatccattttgaatcaatcagtatcttttaggttttgtttgttctaaatgtaagagttcagactcacattctattaaaatttagccctaaaatggaaaaaaaaaattactaatcagaggaaaaccagaactttaatttatttcaaaaaggcctgaagaggccggtctggctagtggtctatctattttgttaatcttcaaaaaatcagctcctggattcattgattttttgaaaggtttttcatctctttatatccttcagttctgctctgatcttagttatttcttgtcttctgct

SEQ ID NO: 466521 - DNA, 1664 bp, Homo sapiens
ccgccgcgccccgagcccgccgcttccggtctcagcgcctgccgcagcagctgcggcccagcgagcggcccagatgcaggccatcaagggtgtggtggtgggagacggagctgtaggtaaaacttgcctactgatcagttacacaaccaacgcatttcctggagaagatatccctactgcctttgacaattattctgccaatgttatggtagatggaaaactggtgaatctgggcttatggaatacagctggacaagaagattatgacagattacgccccctatcctatccgcaagcagatgtgttcttaatttgcttttcgcttgtgagtcctgcatcatttgaaaatgtccttgcaaagtggtatcctgaggtgcagcaccactgtcccaacactcccattatcctagtgggaactaaacttgatcttagggatgataaagacaggatccagaaactgaaggagaagaagctaactcccatcacctatccgcagggtctagccatggctaaggagatgggtgctgtaaaatacctggagtgcttggccctcacaaggcgaggcctcaagacagtgtttgacgaagcgatccgagctgtcctctgcccacctcccgtgaagaagaggaagagaaaatgcctgcagttgtaaatgtctgagcccctagttcttggtcctgtcccttggaacctttgttcgctttgctcaaaaaacggtggagcctttgcactcaatgccaactttttgttacagattaatttttccataaatccattttgaatcaatcagtatcttttaggttttgtttgttctaaatgtaagagttcagactcacattctattaaaatttagccctaaaatgacaagccttcttaaagccttatttttcaaaagcgccccacccggcacacccacagctaaacagaattcttcattagaggaaatagcagttctgtttagctgtgggtgtgccgggtggggtgtgtgtgatcaaaggacaaagacagtatttgacaaaatacgaagtggagatttacactacatgtacaaggaatgaaagtgtcacgggtaaaaactctaaaaggttaatttctgtcaaatgcagtagatgatgaaagaaaggttggtattatcaggaaatgttttcttaagcttttcctttctcttacacctgccatgcctccccaaattgggcatttaattcatctttaaactggttgttctgttagtcgctaacttagtaagtgcttttcttatagaaccccttctgactgagcaatatgcctccttgtattataaaatctttctgataatgcattagaaggttatttgtcgattagtagaagtgctttccatgttactttattcagagctaataagtgcttaccttagtttctagatacctagagtgtaacaatcatgtgttgcagctttactagtcttcaaacatacttcagcacaatccttaaccatatttgaccccttcttaacattcactgtcttgccaaattaccgacactgttcattcgaccatactgaccctcctttcctggcccacgaggacaaaagcacctcagtaatcgcttcgccaagatgtcccaggcgtcggtaagtcggaacgccagtgaacgcctcggacactaccacggggcatacgggtgga

SEQ ID NO: 466522 - DNA, 1336 bp, Homo sapiens
gccatctgggcgtatacgtgcaagtcacaggggatgcgatggcttggcttgggctcagaggcctgacaatttctatctgtggagtaacgcagttccccctccatgatgtggcccctggaagacaccaatctgcctactggctctatgggcttgcctcctctgaaaagttcctctggattggacagggaactaaaggaagatgtccatccatagaatgtagacaaggcactgataaatgtgataaacacagcaaggagccatttgcaatgtctggagacattctgagttattatcattggagagtggatgtggccagcatctggtgggtggagcccaggaatgctgctcgacaccctatgagtgcagaggatggccacaccacagagaatcctccagcctcaagtgtcaacagcacccacattgagaatcttgaactaaagaatacaaagattccacatatgagatcatgcaaaagttactagaaaaataaaattataagtcaacaaatatttgtttgaagtcttcaaaagctgtttaaaccatccagaaaaatatgaattctcatataaaccttatgaaaaataaaaatgattcctacccttaggaaaaaaatatatatatatatgtatatatatatatgtatatatatgtatatatatgtatatatgtatatatatatgtatatatgtatatatgtatatatatgtatatatgtatatatgtatataatgtatatatgtatatatatgtatatatgtatatatatgtatatatgtatatatatgtatatatgtatatatgtatatgtatatatatgtgtatatatatgtgtatatatatgtgtatatatgtatatatatgtgtatatatgtatatatatgtatatatgtatatatgtatatatatgtgtatatgtgtatatatgtatatatatgtgtatatatgtatatatgtgtatatatgtatatatatgtagcttcatgctttaaaagaagaaagatcaaaatagtatattaagtagtctcagaatacttcttgtacatataaaaaatactcagtgagttattataaaataaatcaaaaacagacagactgaatcttccttagattatatatgcttttaacttctaggagaatgaaggatgcaagctagaagattaatgaaagaaaatcaattacccccaaacaaaaatgtttaaaaatctcaattatagttcagattggccctttctagcaaaagtcaaaatgtggtatgcaaacacataatgtaatgccttcattcttcacacaagccttgactatgtacatggttagtgctcattgtttgaaaatccaa

SEQ ID NO: 466523 - DNA, 1464 bp, Homo sapiens
ttcagtaaccgctacaccgctgccaacatttggcatcgtttctctccatagagggcggggctccctgtgaagctggggagctgttaagtgggctggagtgcagtggcacgatcttggctcactgcaaactccgccttccaggttcatgccattctcctgcttcagcctcccaagtagctaggactacaggtgcccgccaccacacccggctaattttttgtatttttagtagagatggggtttcaccatgttagccaggatggtctcgatctcctgacctcgtgatctgcctgcctcggcctcccaaagtgctgggattacaggctgtaaagatgtctgacaagaaccagatagctgccagagcttctcttattgagcaactgatgtccaaaaggaattttgaggatcttggcaaccaccttactgagctagaaacaatttatgtgactaaggagcatctccaggagacagatgtggtcagagctgtgtacagagtcctcaaaaactgcccctctgtggctttgaaaaagaaagccaagtgtttgctatcaaagtggaaagctgtttataagcagactcactccaaagcgaggaacagccctaaattatttcctgtgaggggtaataaagaagaaaattcaggaccttctcatgacccaagtcagaatgagacactgggcatctgcagctcgaattctctgtcttcccaagacgttgcaaaactcagtgaaatgattgtgcctgaaaatagagccattcaattgaaacctaaggaagagcattttggggatggtgaccctgaatccactggcaagagatcgagtgagttgctggatcccacaacacccatgagaactaaatgcatagagcttctttacgcagctttaactagttcttccacagatcaacccaaagctgatttgtggcaaaactttgcaagagaaattgaagagcatgtttttaccctttattcaaagaacatcaaaaaatataaaacttgcatcagaagcaaagttgccaatttgaagaaccccagaaattctcatttacaacaaaacttgctctctgggaccacgtctccacgagaatttgctgaaatgactgtcatggagatggcaaataaggaactgaagcagttgagagcctcctacacggaatcttgtatccaggaacattaccttccccaagtaattgatggcacacagacaaataaaataaaatgcagacgctgtgagaaatacaattgcaaagtcactgtaattgacagaggaacacttttccttcccagctgggtgcggaattcaaacccagatgaacaaatgatgacttacgtaatttgtaacgaatgtggggagcagtggtaccatagcaagtgggtgtgctggtaactgtaaatcagtgttctcttaacagataaccggagtgataccttttatttgtacaacccttttgtgcttttaaaaa

SEQ ID NO: 466524 - DNA, 1249 bp, Homo sapiens
ccggaactgcgcctgcgcttttcggagtattgtgaggattgagatgactggagtgtgtgtggcctggagagttgctcaataaatatatgttgccttccactgtgaagagctgtaaagatgtctgacaagaaccagatagctgccagagcttctcttattgagcaactgatgtccaaaaggaattttgaggatcttggcaaccaccttactgagctagaaacaatttatgtgactaaggagcatctccaggagacagatgtggtcagagctgtgtacagagtcctcaaaaactgcccctctgtggctttgaaaaagaaagccaagtgtttgctatcaaagtggaaagctgtttataagcagactcactccaaagcgaggaacagccctaaattatttcctgtgaggggtaataaagaagaaaattcaggaccttctcatgacccaagtcagaatgagacactgggcatctgcagctcgaattctctgtcttcccaagacgttgcaaaactcagtgaaatgattgtgcctgaaaatagagccattcaattgaaacctaaggaagagcattttggggatggtgaccctgaatccactggcaagagatcgagtgagttgctggatcccacaacacccatgagaactaaatgcatagagcttctttacgcagctttaactagttcttccacagatcaacccaaagctgatttgtggcaaaactttgcaagagaaattgaagagcatgtttttaccctttattcaaagaacatcaaaaaatataaaacttgcatcagaagcaaagttgccaatttgaagaaccccagaaattctcatttacaacaaaacttgctctctgggaccacgtctccacgagaatttgctgaaatgactgtcatggagatggcaaataaggaactgaagcagttgagagcctcctacacggaatcttgtatccaggaacattaccttccccaagtaattgatggcacacagacaaataaaataaaatgcagacgctgtgagaaatacaattgcaaagtcactgtaattgacagaggaacacttttccttcccagctgggtgcggaattcaaacccagatgaacaaatgatgacttacgtaatttgtaacgaatgtggggagcagtggtaccatagcaagtgggtgtgctggtaactgtaaatcagtgttctcttaacagataaccggagtgataccttttatttgtacaacccttttgtgcttttaaaaa

SEQ ID NO: 466525 - DNA, 1252 bp, Homo sapiens
aattttccagaacttcactgtatgccatacagcaacagagaaagtgaatacgctgatacaagaagcaagaatattagaaaaatgtcatgaaaatagttgaagagaaatgctcactgcacaaggagaccaagaaaaaccccccacgaaatcagccacaactaaatcgctctggacggtgccgccaggtgaccctacatgtccggagcaacactttgaaaaccaaagacgcttggcagaaccctgttcctttccagagacagagctgtgtaccttgtctaaaacaccgcatctcactcagtgacttatttctcattatgctaattgttttcgctttaaagcgccagtctttctgtcaaatgggacatacaaataaatttctaaaattatccttgcatgtctactgggaaatacattcatttcatcacaacatccccaaagacttaacgccctccaacgtcaattctctaatatctcacctgataatctatatctggaatgggtgagcctccagggatctttccttgacttgtaaatggtccactcttgcgcatgccacttcacattttcttccctggatgcatgtctctgtgtctgaatttccccttttggcagaggcaggcctgcttgagagaaagctgtaggcaataaagacataggactcagtgggtcctcgagctcaggagtctaccaaagttaaagcacctttgtgttttgtctctcctggagggtgctaagctccttctgatggactacagaaaggcgttgatttttgaggactatccaacgttagtcgcatggtttctctgacagtgaagtcccttaaaagtttgtacatgctactgaatggtggggtttacaagttattataaaagtgcaaatgaaacacttaacaaaattacccaaatctaggactttaaagcaaatagtcatacatttctgaggattgaaatcacagagtatcttctctcccttttgagctggagaaggacaaatatatatatatatatattgtatatgcatatatatatattgtatatgcatatatataatatatacaataaaattactcaaaattcaagtggacttttaaaaacatgcgtagggatcaccttatttcccttcatcagtcaccattgttctcttaacatactggaggaggctggagatatccacatctacaactcaggattcctttgttctatttgttcagttgtgccccccgctgcctctgccacaccaaatacgtgaatcc

SEQ ID NO: 466526 - DNA, 1354 bp, Homo sapiens
tcctgccagaagtcaaggtgatggccctgaatgtgaattgaaagaaacatcgtctaccccagaaaaaaaggaagctccatagagtctggacctgccagtcactgtatcagtcccagtaagatgcaggtaatactggcaggcttcagcaaaggtacagtctagttacttccactgattcctcaggggaaaggcccttcagagaagagtagcctcataggatccttgaacagtgttctcaaagaaacctacagaagcaacttccataaagtcaaggtgatatcttcctgctggaggatcacaccttctttccttgaggtcacttcatcacctgccatctgtctcacactactacttacctctgagcagagtcataatgcctcggggtcagaaaagtaagccccgtgcccgtgagaaacgccgccaggctcgagaagagcccaaggacgtggaaggtgctcaagtcactgtagcagaggaaggagagtccctcacttcatctcctcatttcaaagatagtcctgagaggtcatctgctgtcgaaacacccagcaatgagcaagagcctgggatagctctagccatcaccactgctgcagctgtttcatgcacagcatctaatgaaggcatcgacagccaagttgaggaaaggtcaaatgcctcacaggcccaggctaccactgggcagagagcttctgatcacctggagttggtctttggccttgacgtgagagaagtggatcccaacaagagcatctatgtccttgtcaacaaactagaattaggccatgacacaagagtgaatcctaacagaagtttgcccaagaatggcctgctgatgaccatcctgagtgcgatcttcagccaggggaattgtgcccctgaggaggaagtctggaaggtgctaaatatgatgggggtatacgagggacaggagcacgtcatctatggagagcccaggaacctcctcaccaaagatttagtgcaagagcagtacctggagtattgggaagtgcccaacagcagtcctccaagctatgaattcctgtggcgtccacgagcctatgctgaaaccagcaagatgaaagtcctagagtttttggccaagatccatggtacagtccccagtgccttcccatcccattatgaagaggctttgaaagatgtggaagagagatcccaagccagaattgcagccagggcccgtactgccaccatggccagtgcacgttccaaggccacgtccagcagccttgcctgctccaagtgaaggctgaggaaaatgctttactgtgtttttgaagaggacagtcagtgtttcactagtggagggttggctgtgtctcgttataacata

SEQ ID NO: 466527 - DNA, 917 bp, Homo sapiens
gcaagttttcctgcttccatgatgttggaaggaagctggtgcatgtgtgaggaacgttgtgaaagaagcacaatggaccccccaaaaacggaagtgaaaaggaccatgcggtcagtcccctgtggattccagcacgacacatcaaaccataccatggtgtggctaggacccaacctgatagcagagatgaaggaaccaaccctaccggacccgcagccctggacgatgcagcttccacggacgacacaagccccggatgttacctgggggatgccgaagaggacaactcaggaggctgaacaaattctgcttcagacacagacaccatttactccaggatgcaaagccagaataagagcaatgaccaccacgcctgacaaacctgctgctgcatacatctgtgctctccaatcaataagacctgatgcagaaaacagaaaaggggaagagttagggattcagtcaggatggtgggaaattttgtaaaataaaccttcttggagggccagaaggtttttgcaaaagcttcaggatagagttaatggctgaaggcagcctaatcctctttgagctataacaagggtaactaacataggaatgtagaggagtctatctaaatagcttgtttgctcatgtggtcctaagactgacttttgaccatccacgggtgcatgattgctctctattcaggggttggcaatggtaattaccttctagtggtgtttattgagacttttgtcatttaatgtgggctgaataaatgctggaaaggccagcaagttggagccacggttgcaactctttacaacactctcctgggagtctgtaagcggcccagaccctcagccagactgacaagcataatatctgtgtcagtgtacattattcatccatcgttgggttagggtctgtgggac

SEQ ID NO: 466528 - DNA, 1182 bp, Homo sapiens
tgcgcactgggccgaccaatcagcgaggagcgcgggcagccggggcggctgctgctctcgtgagaacagaggacccaggccctcggaggagcttcgcggtgccagcctctgcaggtcctctgagggagcaacatcagggctccctcaggttcagaggtcgcctctagcttcccaggccagtcagccacggagcccgtgggcaggaagggcagcaggatggctgccaaggaccagttggaggttcaagttatggccgcccaggaaatggagcttgcaggaaaggatccagtaagtcatgagcatgaggaaagaaaacctgttacagagacaaaggagggagatgtaactgatgagcatggggaaagaggatcttttgctgaaacagatgaacacacgggggttgataccaaggagctagaagatattgcagctgacattaaagagcatcttgctgcaaagagaaaaaggattgaaaagattgcaaaagcttgcagcgaaataaagaacagaattaaaaatgttttgagaacaacacaactaaaaaggcagaaacgtgattatagaatttctctgaagttgccgaatgtccttgaagagttcatcacagatgagcagaaagatgaggaaggagatggagaaaaggaagaacaaattaaaatatttcaagagcaacaaaagaggtggcaacaagatgggaaaggaactgaaagagattgagccaccacacgagcaattcacaaaggtctgttctatttggtaacacaatacgttcttataaaatacaacacatgcataaaaatagaagacaatctgcttgtttctgaatgtatggaaagacattttggttatacattttaaattacttaccattttcactttgaatgtgttgttccagatttaacataagtagtaaataacataaaataacataaaacagtatttttaggattcatgaatagttttgtaggagttatttagaacaggaaaaggttttccaagtttaagaaaaaaagaaaaacaagttcattcagattctgtttttctgcctgcaatcacttatgcaggaataagtgagtccttatggggagcatttaattcctaaagtttgcattttcataaaggattttccttttacccaaagcatgtgttggtgtataagtctaactactacttcaagtttct

SEQ ID NO: 466529 - DNA, 1232 bp, Homo sapiens
tatggttgcatcaggggaaggatttattgatccacaccattttcttggattttctatcctccccagggggcagaggtgggttgattgtgtggcgtgtcggcaaaggccaggctgggtcttaagtattcatccaccttcctcctgatgctccacgcagatgtgctgggacctacttcagagtgtccctgagccatgactgcttgactccacagatggcttcaggaagacagcacagaagagggacctgtgaaagttgatagaatctagaattacctgaaggagaagcatcaagtagccccagaagcctctctgcatttctcctccctaacacacatgctgattttcaaaggaggcaaatcctatttgaagctaaagtcacataaagagatttggaatgaggaaacaaattatagcagcctgcaagttgtagaatgaagaaatgcaaatgtaaagtactgaactttgtcatggatggatttaccaaagagaattactctgcataacatgaataatggagttcagaaggaagcccatatcccagacttcctcggttgtgctgttttactgaggttgggtggagtcaacacatcatggataaagaagtccctaaaggcagtcccagggagcccgcactgaacatcaagaagtcagacaaatccttcaaacgcaagaagcccaccgaaaatgtgctgatctttttaatcaacagacaactgggcaggcacagaagtgacatcgacctgtcaagatgggtgtggatgctgtcataaagcaactctagggtggacatggccttggacaaaaagtcatgtggcttacatgctgaagcctgcccatatttttgagaaattaaatataattagaacaataaactcctcccatcatcgccaaaaaagagccaccagcctctcctcagaggacgcagctggctgtaggatggagaggagggggcaagaaggagccaaacccacaggagcagaggccaataacagccaacctcctacactccatggccacacaacagaagagacagaatttaggatacagagttatgtgtggataaatctcaccatcatactgagtgagaaaacaagtagcacagaattatgtaccaaagagaaacccaactgtgccaagcagtacttgggtatatacatagacagtaaagttatccaaactagagcagcagcacattcaagtggaactctgtccactttccgacttgactagtg

SEQ ID NO: 466530 - DNA, 2157 bp, Homo sapiens
ccagcagaatgcattggaattgatgatggatcaccttcagaagcagccaaacacattacgccacgttgtcattcctgatctccaatcttcggaggcagtgcccaagaaacaacagaaacaacacgctgggcaagtgaagcggcctctcccacatcccaaggacgtcaagtgtttctgtggtttatctttatccaactctctcaaaaacactggggagcttcaggagccttgtgttgccttcaaccagcagcaactggtgcagcaagaacaacacctgaaggagcagcagcggcagctgcgggagcagctgcaacagctgagagagcaaaggaaggtgcagaagcagaagaagatgcaggagaagaagaagctgcaggagcagaaaatgcaggagaagaagaagctgcaggagcagaggcggcaaaagaagaagaagctacaggagcggaagaagtggcaggggcagatgctacagaaagagccagaggaggagcagcagaagcagcagctgcaagagcagccactgaagcataatgtcatcgtggggaatgagagggtgcagatatgcctgcaaaacccacgtgacgtatctgtgcccctctgcaatcaccctgttagatttttacaggcccaacccattgttcctgtccagagagcagctgaacaacagccctctggcttctatcaagatgaaaactgtgggcaacaggaagatgagagtcaaagtttttatcctgaggcgtatcaagggccccccgtgaaccagctgccattgatagatacctcaaactctgaggcaatttcttcttccagcattcctcagtttcccataacttcagactcaaccataagcaccctggagaccccacaggattacatccggctttggcaagagttgtctgattcactcggtcctgttgtccaagtgaacacttggtcttgcgatgagcagggcaccctgcacggccaacccacctaccatcaggtgcaagtttctgaggtaggagtcgagggacctcctgatccacaggctttccaaggccctgctgcataccagccagaccagatgagatctgcggagcagaccagattgatgcctgcagagcaacgtgactcaaataagccgtgctaacagtactttcatgaccagtgatgaggggaaatggggggagggggcaggccaatgaggtctgcatggccaggggaccttcaaggtgcgtaaagtcccttggggtagggtttagtgggtagagacttatttgtttcctgataggttatgtttgtaattgtttgttaagcacagcctgtttcttggaagttatgctgtagaggcagcctgtgatccgtagtatgctagggtgtgacagcagccagccacagctggatctgatgtcttgtctgccccgcccagctttgcatatccatgttctaccacaggaaggtggcctgccaagagtctgctcaaagttttcaacataaagaataaagaaaaaaaaatgccaaagtgcttttcaatctagtaaatctagagggttgttttgtcttagccacaagaattccgaggtcttgaccctgatgatcaacctgcctcccctccatagtcttgttggagaagcccagagagaatgggactccaactaagggaacctgaaatcaactcaatggaggcacttcagagctaaaataattatggcttccttgcttaataaacattttcgttcactgcaactttgtgaattgatgagtgacgtttggaacctgactgtgccaaggtccctggtgaagggttggttccctacagttaggccccttttgtagaccctgctcccctcagtctcttgttcacacctcagctccatgccacatttgcagaggccagcgactgctgccttcccacatggccgtgtgcccaggcccgctgtgtagctttttttcgtgtagctcaggcatgctggctccttcattgacaccaagggcagccacaggcccactgaactctgaaacagttggcctaggggctaccttctcagggtggatggtgtttgtgcctcacatattacttcagaagtaagcctgaacactaaagggcagtgtacccataccttttacatgtgggttctttctctcccatcagtagactttttaatagataggagt

SEQ ID NO: 466531 - DNA, 2989 bp, Homo sapiens
cgggatagaaagaaagggggagggcaccacatatagtcacagtctaaataacacaaattgaaggtctgatgtttgggccagacctacactgtacaccaggagtgctgactccagcacagatcaagtcaatttgtcaggcaattctggactctgggaagcagtatgccataaagaagaggaaaccattccccctgatgtattcttactatggaaccgaatacttggctcacggcttgtcgtctattcttcagatgcttctttcttaccatgagcatctcaagccctcagatcgggaattggtatggcagagcgtggactttctcatggaacaggaacaaaactgcaactggccacctgagctcggcgagaccatcgagagagagaatgagctggtgcactggtgccatggcgctccaggaattgcctatctgtttgccaaagcttatctggtttccaagaaaccgcagtacctggacacatgtattcggtgtggggaactcacatggcagaaaggcctgctaaagaaggggcctgggatttgccatggagtagccggcagtgcctatgtcttcctgctgctgtaccggctcacgggaaactctaaatacatctaccgagctcaaaggtttgctcaattcttatttaccgaggaattcaaggccggttctcgggtccttgaaagtatatacagcttgtatgaaggcttctctgggacagtgtgctttctgattgacctgctgcagcccaatcaggctgaattcccactcttcagctccctgtaggaaaaagtttacccctctgtgtgcgagtgtgtgtgtgtgtgtgtgactttgctatttcaatattaaagatgtcttttgaatactgtagcagcagtagaatccctatgttcttgaaaatgcaaaatgtaacatgagttgcacatagactctctagcagtagaaatggaatattctaagtgcagaagtttggttttagaatctgttaaggaaggacggcccaatctttgaaaaggtacagctttctcaactttgaacatctgggggaactcttcttggaagtctgaattttaatatctttaatccaatggctctaaattaacaaacattaaaaaatggatttcgtagaatcaaattattagggggagcactttgcaaagccatatactggtgaatatatactgggtcaagcaccacatgttagttttggaatgtgtatttcccagcgaatagaatttactgctccaaaaagcttttttggcataaatcacaatacttacagaaatataattgtatcattgaaaaaaacaaagctcaccttcctaatgatacatttcacaaactgcacattagggcaatttcttacttatgaggaggtacaaagaaatactctgtcaatatagtataactgcttatttcaaattgtatctaggaatgaataactactattatttaaagtactactgaattttgaggaactgatcaaagaattagtattattaataaaattgtactatttgcaatatatttgccttggcacaaatgcagagttaaaaacataaaattataaaaaaaaataatagtgattggttgttactactttaaaatcctactaatttccattagcactaaatcaaacagcacttatctgttgtatacaagtaaaattttgaaagactcggacacaaaatgaaaggctttttaaaaatgtctttgccataacaggttatatgacctcttgctaattgttatatttccttaggggcactttgaggctctttcaaagacatctgcagcaattaggtctaaatttagagtagaatattttgccagatattttactatatcacaaaatgtcatactactgtattttataataaaaccaaattctcaagtattctggtatgttacatattaatataccaaaacatcactttctataagtctattattatgtacataatatttttaaaaataatgggtattttggtcctagtgaaaaagtataatgcaatacatgacattaatctttagtcaaaacccattgaggtgtctgacagggaaattagcaatcataagctataagatatatattattttcaaggacaaaatggcaaatgataatacagaaagacgtgatcactggagcaagttagctggtgtgcagactaagaaggatcaacttgcaaatgctcatcagaatttagcttttgttattggttgttctgcaggggatagtactagtcagttgatattgcttccctttcatgtgggagtttgctcacagcccactgcatggtataatgaaatctctataagcaagatagagtcagaagcttagagatgcactttatggtttttacaactgctgttacaatgttctaaacactgtgatctttccaaatgtgttttctgtattcgttttgtactgtagaaaataattcgctataaactggactttatagtgtttaaagcgatgttatttattggcttattgcccctccttataatacatttatgtacagtacacttaatgtaaaacctgtgataatcctttgccttaaaataaaatctaatgctaaatattcagtgtcctgattaataattctaagctaccaatttttcctttaaagctaaccatgatgtcaagtaaaacattacacaaatactctgtggagtgttgctgctgattctgtatttgtggcagtgtatgtatcttggcccaggacatggtggccttctgggttctataaatagacattagtaatccttttagggaaagggcctgctacctctcagctgctggctgaatctgccccttaactcataaatggattttctcatgccacataaaaaacagaaaaacagcccaccacattctctccctgtacctcttttttggtttgattccttttgaatctttatattctatttgtgtttacattattttcctaaatagaaaaatgccagagatgcctgaagattgaaat

SEQ ID NO: 466532 - DNA, 5679 bp, Homo sapiens
  misc_feature (3)..(3): n is a, c, g, or t
  misc_feature (6)..(6): n is a, c, g, or t
  misc_feature (8)..(10): n is a, c, g, or t
acnctngnnngtttcttccatctgcacccagttgtcttcagcatgggggagcagaaccactctcccgggaaggagcttcagcacaggacgcgagcagaggctccaggaaagaaaagctggcattcccaggcctatgcccttggggccgtttccaactttatgtctacttttctgacctttcctatctataaggttgtgttccggcaacagatccatgccatggcagtgtcagaggctgtgagacagctttggcatgaaggtcctcaatacttctaccggggaatctaccctcctcttctctccaagacgttgcaagggactcttctgtttgggacttatgatagcctgctgtgctttctctctcctgttgggccacacaccctgggacaccgctgggctgccgggctcatgtctggcgtggtggaggccgtggcactcagcccctttgaaagggtgcaaaatgtgctccaggatggtcgcaagcaagctcgcttccccagcaccttcagcattctcaaggaattcaattcttatgggctttgggggcggctgtcactgggctactatcgtggtttctggcctgtcctggccaggaacagcctggggagtgctctatatttttctttcaaggaccccatccaggatggcctggcagagcaaggcctgccccactgggttcctgccttggtgtctggtagtgtcaatggaacaatcacctgcctagttctgtatcctctgattgtgctggttgctaatatgcagtcccatattggatggcagaacatgccaagcctgtgggcctctgcccaggatgtatggaacactcggggccgaaagctgctcctgatctaccgtggaggctccctagtcatcctaaggtccagtgtgacatggggcctcactacggcaatccatgacttcctgcagaggaagtcgcactccaggaaagagctgaagactgactagctgcagaaagtgtggcatggcagctttgttattctaaatcttccctggttggttctatatagcttacttctttggctaggttgcctaatacagccatcctttagcatctataaactcattgcatgggagaagttcccaactaccaacctgttgagcaaggacaaagcccaaaagtattccttagtcaaaaagaaacgttcaccccagtctctccacagtttcagtagcctcagagccaggaggcctttaaataacatgtaacccagattaagtgtcattcctttaaggaattccttggcaataaacagaaacttaaaaagatgaccttacttaggcactctgagctctgggacccctctaggtgtcctccagaccaaactgagtggaactccaatttcaaagaactatgcttgactcttaggatgggaattccataaaacttctcagatggctacattttcatgatattgttcactgcctctaccaccacctctcacttctcaaggctgtgggtcctactttcagggtagcagctgtggctggaaatcctaaattaggcttgcatgaactcgtcaggtgccacaagaactagtggggctggagatgggagtgagaagagcgtggcccatggatggaaagaataaaaactttgaaagaaaagatttaattacatgcaaaatagaaacatttgctatagtctgcttggtgttatctgctaggacatttctgagagcaaggtgataacattgcctagaaaccgtttgagtttccctaagaaacctggaagtgaagtgaccatatctcttcacagaaaattgcatattttgttgatgtggttaaatgtagttactatgacataaagatcagaaatcttagcctgtcattcagagccattcaaaatatggtcatcatataactttcaacatattgtcactccacttacataaaccccaaacactagccataatgaactattgttctctccccagacattccatgaactttcccatggccatactctggcccacactattctttccacctgcagtgctccttcttcacatgccagtctaccaaaatccttccagttccttgaagcccagctcagagcacttcatacagggtactgattccattatgtcactaatctcatgtgaccctttgttcttgtattcttcaatacctcctactagactgtaaaactcattgaaagcagggatttttgtatgcattttaaaatcttccattgtgcctaggtgctcaataacgttggtcaaattactgagttgattatcaagctgtgatatggtatatcctcagggtgctgtcccttgtacatgacgataaagttattgactcactgtcagcaagacacgtgcctttgggctgtgtttttgctttcttttaataattgatttagttttgtgctaatgataatgatgctgctactgataataataataacaataataaaaattactttcaactggcacatttgatgagtttatattactgatggcatgtttgctattagcaccagttcaggaactgaaatttcacaaacagaatcacactgtacaactgtaccatttgtttcaactctggaattttgaggatttccaagatgacatgtgttatagtttccccctacagatatcttagtaatgccctcctcttgcatctccttactgaaccaaatttgtcctgtatttgtcttacttggttgtagatttagcagtgagaacttctcactgaatgccacagaaattaaagacatggttgttggaggtatgatgtcagagagcatttgccaccaaggttggcagaaaatggctggtccaggagagctgaagatgagcttccacatctgcagatcgggatgtgttgggacagtactcaacttgtggattcaaggaagtatgaacacagagtctgcataaggaaaggaaaaagatgcattcatctcccaagtacactggtgatttccacttatgtcattctgtccatccatgtccctttcttcattttaacttcttatttaaaaataatttcaaacatttaaaaatgttgcaagcataaataaagcttaaagaacacccatgtcccctttaccctaattcccctattattaatgtttctccccatttgctttattatttaagtgtgcactctgtctatacacacacaggatattttttccctgaactatctgagagttgcatacatcagttttcaatattcctagattcaatgtttgtagatccaaattattttttaagagaccgtgttttatctctgacaatgggacagttattacagaatataataaaatgaaaactcacacaatatatgtgatattgtgaaatatatacttggtctttgatcctgtttcttggcatacaactcctaaaatccttagaatttccaaagtgatatctttttgtatgctaataattgactgatggctggcagcctctggttgcttcaggatgggaactagtcaccaggaagaccaaggcaccattagagggttgggacttaacagcctcattcccgacctccagggaggggagagggatggaaggttaagttgatcaccagtggccaatgatttaatcaatcatgcctacgcaatgaagcttccataaaaaccccaaagcactgggtttggagagcttccagatagctgaacatgtggaggttcctggagggtggtgacccagggagggcacagaagctctgagccccttccgcagtacctcaccctatgcatctcttcatctctatcctttgatatatcctttataataaagtggtaaacgttaagtatttccccaagttctgtgaccctttctggcaaattaaacccaaagaaggggtcatgtgaactcaaacttgaagcccatctgtcagaagttctggaggcttggatttgcgactggtgtctgaagggcctgggaacagtcttgtgaaacctagtcctcagcttgtgggatatgacgctatctccaggtagattgtgtcagaatggaattggagtacacccagctggtgttcgctgcagaactgattgctcacttagtgtgtgggaaaactccacacatctggacatggaaatattctgtgctgattgccgtggtgtaagagcaatgcaaaaagtttgggtattttcccctcggagtatattttaaagctaaattgctaataattgcttaaatttactatatttgcctttataaaaactttatgtatgttgaagcttgaagctatgcaattataatataaacatggatttacaactaaagcatgttataatttaaataattgagtttttcaaatcggttcatatgaaatcctaggcaatattgtaaaattatacagacctgtcaactttttccacttaaaagttgtgagcaaaatttaagggcatagtcgttttcaagtaattttaaatgtcaatgttaatatttagtttagtgatgttaatggagctatgttttctgatattaaaaatgagttttaggagttgagaccaataaaataaggaggtaataaatatctatatctgtttaaacacataaaatatacaatttaacactaaaattacttggtataaaaagtcaaaaaaaagaataaaaagccatcatacaacacaatatatgcgtgatatatatttttctctaaatataaactacatcagcttttataaagctcaagttgaaataataacgttttatgacaaatcattatatggtatattctgacttaattttgcatttacaatttatttttaaacactaaatagcattataattttactgggataactatatatagtgtagtatattaaagttaataaaatgacgttgcatatgagagaaaaagcataataaatcagaaacaatataaaaagctttcagaaaagataaaaatattgtatttctctagtctgttcactctccagtgtctctggttctttcatatcatcttcctttcctcaaatcttttaatactccctccctcatcatttccaactagtgaccctactttctatttcattaagaaaacagatacattcagaagagaactgccagtttaaagaacatttacaaagccatcacccatgtaataaccagccagagcaagaaatagagccctttaataacctactcttctccccccaccactgatgacaccgctccctccatcttaggtgtagcccccatgctgacttttgtaataataatttctttgcttttgtttataagttttcttccttataagcatctctaaacaacagttttgttttacagatgttcaaacattaaatgctttttagacttggaattgtgactatcttgtttcactccacattgcttgtgagactcattgatattgcagatagctgtagttgatccatttttattgttgtacagtttaccattgtataaatataccatgatttattcatgataactttgaggaacattctggttgtttgcaggttttatttttacagttcattagttttattgatgtataataattgtatatgtttatggggtatatgtgatattttgatacatgtgtacaatgtgtaatgattaaatcaaggtaattgggatatccatcagctcaaacatttatcatttctttgcattgggaacattccaaatcttctcttctagctattttgaaatacacaataaattg

SEQ ID NO: 466533 - DNA, 1354 bp, Homo sapiens
cagacttttatgctctgcttccccttgaatgctttggcatttagaaattttttccaccagtacccgaaattatctctcccaatttccaacaagttcttcatcttcatctgggaccaccttggcctggacttcattgtccatatcactatcagcattttggtcaaagccattcaacaagtctctaggaagttcttacccttcccacatcttcctgtcttctgagcccttcaattttctagaaagttccaaactttcccatattttcctgtcttcttctgggccctccaaactgttccaacctctgcctgttacccagttccaaatttgcttttacattttcaggtatccttatagcagcaccccactctctgtggtaccaatttactgcaatgtgaatactgtattgaagtggaaagaaattaactgcatggaaaaccatttgggcattgtcatagtccaggtgagaagtagtgagggcctggactatatatttctatgatctagtgtattgcattgccttttactgatctcacctgaaccacagaattgacacttaactccaaactgttgttatgttttcttcctgataattgtttggaaatcatggaatgtatttcttatcctttagtgttcctccatataggacaacatccacagtttgaatattaaagttgtaaatcctgcttccataactgatcactgagttccaagtcttgcttaaaaatctcagtcagaacactaacctatttgatgtagtccttaccaagcctagcttatatttaaaactctcttcaccaacatcctccgccattacctatcaaataaactttcttaaaagacacacctgctagccccgacatattatttaagggtacttttgattcttttttataacgttaaagataagaaactgtttggaaaaataaacactaattattcaaatgaatctaacttttaatcttaaaggagctctgatttgaggtgacaatgattttgaaccttaaattctttggaaagactcagaatgaagtccattgtggaggctcagaaaaacaatttcctgggaaatgaagcagtatttttatagagagaactgtatacatgtgaaagcttattcatcgttggtcaggcaagagaccctccaatgactaaataaacctgaatttaagtcagaggaaagaaattacacagatctctatttactgggtggccttcaaatatatcatgtcctcataaacaagatcaagggagggaacactatcccagaagaggttctgtctgtaatcttctcagtttgaaaaatactaaataaagaggtattccactgttctatacttctctttggtgacattgt

SEQ ID NO: 466534 - DNA, 417 bp, Homo sapiens
attcctttcgtaaccgcaccacacccgaggagctctgatttgaggtgacaatgattttgaaccttaaattctttggaaagactcagaatgaagtccattgtggaggctcagaaaaacaatttcctgggaaatgaagcagtatttttatagagagaactgtatacatgtgaaagcttattcatcgttggtcaggcaagagaccctccaatgactaaataaacctgaatttaagtcagaggaaagaaattacacagatctctatttactgggtggccttcaaatatatcatgtcctcataaacaagatcaagggagggaacactatcccagaagaggttctgtctgtaatcttctcagtttgaaaaatactaaataaagaggtattccactgttctatacttctctttggtgacattgt

SEQ ID NO: 466535 - DNA, 683 bp, Homo sapiens
agcgcttgaagcatggagtctcttcgcgggtacacccacagtgatattggctaccgcagcctggcagtcggcgaggacatcgaggaagtgaatgatgagaaacttaccgtgacctcgctgatggcaaggggaggagaggacgaggagaatacacggtccaaacctgagtacggaacagaagcggaaaacaacgttggcacggaagggtccgtcccctcggacgaccaagaccgtgagggtggcggcggccacgagccggagcaacagcaggaggagccgcccctgaccaagccggagcaacagcaggaggagccgcccctgctcgagctgaagcaagagcaggaggagccgccccagacgaccgtggaggggccacagccggcggaggggccacaaaccgctgagggaccacagcccccagagaggaaacgccgccgccgcaccgcgttcacgcagtttcagctgcaggagctagagaactttttcgatgaatctcaatatcccgacgttgtggcgcggcagttatgactaattttgcaggtcatgggatcaaaaggtgactgtttgaaattacagaagaccatagctgcatcaaggaagtatttgcaaaaaaataaataaataaaagttagaatgggcttattagctttgcctcagggtgtgtgtgtgagtgtagtgatgga

SEQ ID NO: 466536 - DNA, 977 bp, Homo sapiens
gtggttgccagggattcctttctggaactaccttctctttacattttcctggaaacatgacctacatgaccttggtgatatcattgctgcttcccatgtatattaagaggccactgtgtggacataatgttactggccactacaccttggttgtggagaagaaccttgaggtctgtgctgaggaaaacgaaactcttgtctttgaagtgggcttggtgctgaactccataagcggaacacaaggcgcttcatggggtcagaaaaggcgggttcgcgcgccccctgctggccaccagagacagtgcgagattctcagcgctcactgtgtagcggaccatcgtgataggtataagaaccactgcaacggggtcttgcagtcggggagagagattgggctcaactccaaatacagcatgggccagtgggactttacagccaaggaccaggatggaggtcagaggatggaaaattgctaagaggaaatcaggagttaaagaccggcttaaaatgctgaatatttcatataaaacaaacctaaaatgattctgaaaggtggagagaaaaaagcagaccagctaaaagcctcagaacttaagtattgagtcacctgagacttttgcatttctgatgaccagatgacttcactcatgactgaactggtcctgtgttccccacccagaagcagactcagtcacaaaggaccattttccacactcctataattgcatccccaactaatcagcagcacccattgcctagccccctgcctgccaaactatttttttaaaaaccctagcctccaaattttgggagaggcagatttgagtagtaataaaactctggtcttccatttaggtggctctacatgctttaaagtatttcttttttgtaattcctctgtcttgatattaatctatctgggcagcaggcaagacgaacctgtcaggtggttacaaatttgggggctcatctgggat

SEQ ID NO: 466537 - DNA, 1528 bp, Homo sapiens
ggctaccgagagggcagccatgaacacccaaaagggttccctcaccataaacgtccacagaggttccctcgccatgagcatccaaaggggttccctcgtcccccgggatatggatagctcgggtagagacatgcagctgcgggtgatcccggctgaggtgaagttcctggacacgatggccgggagggtgtaccgcctcccgattactgtgcataatatttgccgctggaaccagaaaatccgatttaaggagcccgtcaagccacagttcaaactgatgttgaccagtctggataaagaacttgcttctggccttcagatgacagctatggtggaatatcatcctgataaagacgaagacacttttgaccggctacttatttcaatagaaaataaaacaacagaaattcctctaattgggttgattccatcctgtcaattggaaattgaatcagtagttaattttggcacactggttgccaatagtaaagtatattctaaagagattactatcactaaccatggcaaagctccaggcatatttaaggcagaataccacggccaattacccatcctcatttttccaactagtggtatcgtggatgctaagtcatcaatggttattaaagtagatttctgtgcagaccagccaagaattgtagatgaagaggcaatagtgattttgcaaggtcaacctgagatgctcttgagtatcaaagctcatgtggttgagcagattattgaattattaagcatgagtagtgacagaaggctggaatgcatacactttggtcctgttttcttcggatcatcaaaaattaaacatgcacgtgtatacaataatagcccagagcccataaattgggtggccatcatacaagatgatgccgtgggagaagaattgaaagtggaattagcactgacaggcacaggacttcctgttttactacagtttgatccaggaccagttcttaattttaaaccttgtttcatgggtgaacgttcagaaattcagtgcatcataaaaaatcaatgcgaattacttcctgtgacgtaccactttaaaaaaactgcaaattttgaaattgatcctgaaaagggcaagattactggagggggtatggtggatgtgatgtgttcatttgttccacatcaacttggagtcttcaaagtgaagcagatgatagagattattggtttagtggcagaagaagatttgcaatctttgtcggtaaaatctttccatcacgtatatttagctttcaacagcatctgtaaagcttccaccaagaaagttgtgatgaaatttgatcctggtttgttctctggcccctcaagattaggaacatccgtgctggagggactgaagtgttcctggtctgctggccacaacattcctattgggggtgctgtcaaaagcacctcatcggggccagggtggtgggatgcacttgtactagcagtggtggtgtagtggggtgcacatggacactaatgccagcaggggaggagaggggagatctgcctg

SEQ ID NO: 466538 - DNA, 758 bp, Homo sapiens
  misc_feature (19)..(19): n is a, c, g, or t
tacggctaggtacgaggcngggtgttgcaggatgacagctggagaatggagtcagttttatccaagtatgaagatcagattactattttcactgactacctagaagaatatccagatacagatgagctggtatggatcttagggaagcagcatctccttaaaacagaaaaatctaagctgttgtctgatataagtgctcgtctatggtttacatacagaaggaaattttcaccaattggtggaacgggcccttcatcagatgctggttggggatgtatgctacgctgtggacagatgatgctggctcaagcccttatctgtagacacttgggaagggactggagctgggagaaacaaaaagaacaacccaaagaataccaacgcatcctacagtgcttcttagatagaaaagattgttgctactctatccatcaaatggcacaaatgggtgtaggagaagggaaatcaattggagaatggtttggaccaaatacagttgcacaggtgttaaaaaaacttgctttatttgacgaatggaattccttggctgtttatgtttcaatggataacacagtggtcattgaagatatcaaaaaaatgtgccgtgtccttcccttgagtgctgacacagctggtgacaggcctcccgattctttaactgcttcaaaccagagtaagggcacctctgcctactgctcagctgggaaacctggtgttctgggccttcgctgggttaacaatcactgctattggggtta

SEQ ID NO: 466539 - DNA, 350 bp, Homo sapiens
agtcgagctcgctaccggttacgattctttgcccagtcaaatagctctggtcaaactataggttgggagaaatactgaaattatttggctaaaataagaatgggtttcctgtgaatttacctagccccataataatggaattgactggttatttgaaattaagttagtagctggctcagaagtaaaggtgggtatttttagatatggtgatttaattttaattttacatttaattacagaaaaatctaagctgttgtctgatataagtgctcgtctatggtttacatacagaaggaaattttcaccaattggtaggtaaatcatttgttttactgtgctttattccttgt

SEQ ID NO: 466540 - DNA, 2392 bp, Homo sapiens
ggagttgcagtttgagagcagttccgggcagggaggcgcctttgctgccctcacagacttggcccctagcagtgcagaactacaagtcccagggatcctagcgaccgtccgtccgtagtcaagttgccggtggaattggcccaggatgacagctggagaatggagtcagttttatccaagtatgaagatcagattactattttcactgactacctagaagaatatccagatacagatgagctggtatggatcttagggaagcagcatctccttaaaacagaaaaatctaagctgttgtctgatataagtgctcgtctatggtttacatacagaaggaaattttcaccaattggtggaacgggcccttcatcagatgctggttggggatgtatgctacgctgtggacagatgatgctggctcaagcccttatctgtagacacttgggaagggactggagctgggagaaacaaaaagaacaacccaaagaataccaacgcatcctacagtgcttcttagatagaaaagattgttgctactctatccatcaaatggcacaaatgggtgtaggagaagggaaatcaattggagaatggtttggaccaaatacagttgcacaggtgttaaaaaaacttgctttatttgacgaatggaattccttggctgtttatgtttcaatggataacacagtggtcattgaagatatcaaaaaaatgtgccgtgtccttcccttgagtgctgacacagctggtgacaggcctcccgattctttaactgcttcaaaccagagtaagggcacctctgcctactgctcagcctggaaacccctgctgctcattgtgccccttcgcctgggcataaaccaaatcaatcctgtctatgttgatgcattcaaagagtgttttaagatgccacagtctttaggggcattaggaggaaaaccaaataacgcgtattatttcataggattcttaggtgacgagctcatcttcttggaccctcatacaacccagacctttgttgacactgaagagaatggaacggttaatgaccagactttccattgcctgcagtccccacagcgaatgaacatcctaaacctggatccttcagttgcattgggatttttctgcaaagaagaaaaagactttgataactggtgtagccttgttcagaaggaaattctaaaggagaatttaaggatgtttgaattagttcagaaacatccatcacactggcctccctttgtacctccagccaagccagaagtgacaaccactggggcagaattcattgactctactgagcaactggaggagtttgatctggaggaagattttgagattctgagtgtgtagaatcctgggaactcaacttgaaggtctgtcttccatctggcaccataaaaacatgaacttattgcataaaacttttctagtcagcaagtgcctgatatgccaatagcatacaaactcaatagcaatcatgactgagccaatcactgtttctcagaaaaacaaaacaaaacaaaacaaatgacagtaacccttccccggaaagaaatagaacaatcatggagcctaggagcagagagatgaggaggagttcattgcttcccagcttgtgttatatggctacagcaagtcttcagctgctgcaatgaggaaatgggcatctggaagacaaacagcaactctcagcttgcttcaagaaccagcagataagagatggttaagctgttcttcaccctttcagatgtgacctcttttggactaagcagcaatctgttctcttgctcaaataataaagtgactgaatcagggaggaaaaggttcttgttaaattatttgattgtgtagttgaagtaattataatttatatcaaaacgtttgtcaaagaaacgatgtcaaatatacacttcttgatctcccttctgtttgcggggatcttactatttgatgggtcactgtccccattcttactgatacttttgtcagatatcaccctgtccttaaatcatgatcacttaaatcaggggtcagcaaactttttctgtaaagggccagacgggaaatattttgggctttgcaggccatgcggcctctgtcacatctactcaactctgctgttgacatgcaaaagcagcaatagacaatatgcgtgtaaatgagtgtggctgtaatccaagaaaactttatttacaaaagcaggtggagggctgggtttggcctgcaggctgtagcttgccaatcagtgacttaaattgttgatttttgtttgataaattaaaaataaattgtgtttgaagtataccctacttggttgacagccatatttagaattattcatgtggtgaattacacattttatctgtgcatcatatacaattccaaa

SEQ ID NO: 466541 - DNA, 2181 bp, Homo sapiens
cggggagcggctttgagtggaaccgtgtgaaagagccgggttttatccaagtatgaagatcagattactattttcactgactacctagaagaatatccagatacagatgagctggtatggatcttagggaagcagcatctccttaaaacagaaaaatctaagctgttgtctgatataagtgctcgtctatggtttacatacagaaggaaattttcaccaattggtggaacgggcccttcatcagatgctggttggggatgtatgctacgctgtggacagatgatgctggctcaagcccttatctgtagacacttgggaagggactggagctgggagaaacaaaaagaacaacccaaagaataccaacgcatcctacagtgcttcttagatagaaaagattgttgctactctatccatcaaatggcacaaatgggtgtaggagaagggaaatcaattggagaatggtttggaccaaatacagttgcacaggtgttaaaaaaacttgctttatttgacgaatggaattccttggctgtttatgtttcaatggataacacagtggtcattgaagatatcaaaaaaatgtgccgtgtccttcccttgagtgctgacacagctggtgacaggcctcccgattctttaactgcttcaaaccagagtaagggcacctctgcctactgctcagcctggaaacccctgctgctcattgtgccccttcgcctgggcataaaccaaatcaatcctgtctatgttgatgcattcaaagagtgttttaagatgccacagtctttaggggcattaggaggaaaaccaaataacgcgtattatttcataggattcttaggtgacgagctcatcttcttggaccctcatacaacccagacctttgttgacactgaagagaatggaacggttaatgaccagactttccattgcctgcagtccccacagcgaatgaacatcctaaacctggatccttcagttgcattgggatttttctgcaaagaagaaaaagactttgataactggtgtagccttgttcagaaggaaattctaaaggagaatttaaggatgtttgaattagttcagaaacatccatcacactggcctccctttgtacctccagccaagccagaagtgacaaccactggggcagaattcattgactctactgagcaactggaggagtttgatctggaggaagattttgagattctgagtgtgtagaatcctgggaactcaacttgaaggtctgtcttccatctggcaccataaaaacatgaacttattgcataaaacttttctagtcagcaagtgcctgatatgccaatagcatacaaactcaatagcaatcatgactgagccaatcactgtttctcagaaaaacaaaacaaaacaaaacaaatgacagtaacccttccccggaaagaaatagaacaatcatggagcctaggagcagagagatgaggaggagttcattgcttcccagcttgtgttatatggctacagcaagtcttcagctgctgcaatgaggaaatgggcatctggaagacaaacagcaactctcagcttgcttcaagaaccagcagataagagatggttaagctgttcttcaccctttcagatgtgacctcttttggactaagcagcaatctgttctcttgctcaaataataaagtgactgaatcagggaggaaaaggttcttgttaaattatttgattgtgtagttgaagtaattataatttatatcaaaacgtttgtcaaagaaacgatgtcaaatatacacttcttgatctcccttctgtttgcggggatcttactatttgatgggtcactgtccccattcttactgatacttttgtcagatatcaccctgtccttaaatcatgatcacttaaatcaggggtcagcaaactttttctgtaaagggccagacgggaaatattttgggctttgcaggccatgcggcctctgtcacatctactcaactctgctgttgacatgcaaaagcagcaatagacaatatgcgtgtaaatgagtgtggctgtaatccaagaaaactttatttacaaaagcaggtggagggctgggtttggcctgcaggctgtagcttgccaatcagtgacttaaattgttgatttttgtttgataaattaaaaataaattgtgtttgaagtata

SEQ ID NO: 466542 - DNA, 2701 bp, Homo sapiens
ggagttgcagtttgagagcagttccgggcagggaggcgcctttgctgccctcacagacttggcccctagcagtgcagaactacaagtcccagggatcctagcgaccgtccgtccgtagtcaagttgccggtggaattggcccaggatgacagctggagaatggagtcaggactttctatgtagaccatcttgtcatctgcagagagggacagtgatatttcttcctttccactctgtgttttatgttgaatagcagtgttttatccaagtatgaagatcagattactattttcactgactacctagaagaatatccagatacagatgagctggtatggatcttagggaagcagcatctccttaaaacagattgggaaagaaagaccttttaacctgaaactgctaacagcccagcacccagataaagccagagcttggaaagaggcagctctgagatttgtgtctttctgaggagacatcctcttcagaggccctcacttagcgtggaggaaggaacaggaagaggctgatgaaaaggcaggagaggaagttaggcattgtggagctcctcctgagcctggcttcattattttgattggagaattctgaacagtggaaagcctggagctagcaattaggagaccttttgtattcagactcttctaactcagaaaaatctaagctgttgtctgatataagtgctcgtctatggtttacatacagaaggaaattttcaccaattggtggaacgggcccttcatcagatgctggttggggatgtatgctacgctgtggacagatgatgctggctcaagcccttatctgtagacacttgggaagggactggagctgggagaaacaaaaagaacaacccaaagaataccaacgcatcctacagtgcttcttagatagaaaagattgttgctactctatccatcaaatggcacaaatgggtgtaggagaagggaaatcaattggagaatggtttggaccaaatacagttgcacaggtgttaaaaaaacttgctttatttgacgaatggaattccttggctgtttatgtttcaatggataacacagtggtcattgaagatatcaaaaaaatgtgccgtgtccttcccttgagtgctgacacagctggtgacaggcctcccgattctttaactgcttcaaaccagagtaagggcacctctgcctactgctcagcctggaaacccctgctgctcattgtgccccttcgcctgggcataaaccaaatcaatcctgtctatgttgatgcattcaaagagtgttttaagatgccacagtctttaggggcattaggaggaaaaccaaataacgcgtattatttcataggattcttaggtgacgagctcatcttcttggaccctcatacaacccagacctttgttgacactgaagagaatggaacggttaatgaccagactttccattgcctgcagtccccacagcgaatgaacatcctaaacctggatccttcagttgcattgggatttttctgcaaagaagaaaaagactttgataactggtgtagccttgttcagaaggaaattctaaaggagaatttaaggatgtttgaattagttcagaaacatccatcacactggcctccctttgtacctccagccaagccagaagtgacaaccactggggcagaattcattgactctactgagcaactggaggagtttgatctggaggaagattttgagattctgagtgtgtagaatcctgggaactcaacttgaaggtctgtcttccatctggcaccataaaaacatgaacttattgcataaaacttttctagtcagcaagtgcctgatatgccaatagcatacaaactcaatagcaatcatgactgagccaatcactgtttctcagaaaaacaaaacaaaacaaaacaaatgacagtaacccttccccggaaagaaatagaacaatcatggagcctaggagcagagagatgaggaggagttcattgcttcccagcttgtgttatatggctacagcaagtcttcagctgctgcaatgaggaaatgggcatctggaagacaaacagcaactctcagcttgcttcaagaaccagcagataagagatggttaagctgttcttcaccctttcagatgtgacctcttttggactaagcagcaatctgttctcttgctcaaataataaagtgactgaatcagggaggaaaaggttcttgttaaattatttgattgtgtagttgaagtaattataatttatatcaaaacgtttgtcaaagaaacgatgtcaaatatacacttcttgatctcccttctgtttgcggggatcttactatttgatgggtcactgtccccattcttactgatacttttgtcagatatcaccctgtccttaaatcatgatcacttaaatcaggggtcagcaaactttttctgtaaagggccagacgggaaatattttgggctttgcaggccatgcggcctctgtcacatctactcaactctgctgttgacatgcaaaagcagcaatagacaatatgcgtgtaaatgagtgtggctgtaatccaagaaaactttatttacaaaagcaggtggagggctgggtttggcctgcaggctgtagcttgccaatcagtgacttaaattgttgatttttgtttgataaattaaaaataaattgtgtttgaagtata

SEQ ID NO: 466543 - DNA, 2391 bp, Homo sapiens
ggagttgcagtttgagagcagttccgggcagggaggcgcctttgctgccctcacagacttggcccctagcagtgcagaactacaagtcccagggatcctagcgaccgtccgtccgtagtcaagttgccggtggaattggcccaggatgacagctggagaatggagtcagttttatccaagtatgaagatcagattactattttcactgactacctagaagaatatccagatacagatgagctggtatggatcttagggaagcagcatctccttaaaacagattgggaaagaaagaccttttaacctgaaactgctaacagcccagcacccagataaagccagagcttggaaagaggcagctctgagatttgtgtctttctgaggagacatcctcttcagaggccctcacttagcgtggaggaaggaacaggaagaggctgatgaaaaggcaggagaggaagttaggcattgtggagctcctcctgagcctggcttcattattttgattggagaattctgaacagtggaaagcctggagctagcaattaggagaccttttgtattcagactcttctaactcagaaaaatctaagctgttgtctgatataagtgctcgtctatggtttacatacagaaggaaattttcaccaattggtggaacgggcccttcatcagatgctggttggggatgtatgctacgctgtggacagatgatgctggctcaagcccttatctgtagacacttgggaagggactggagctgggagaaacaaaaagaacaacccaaagaataccaacgcatcctacagtgcttcttagatagaaaagattgttgctactctatccatcaaatggcacaaatgggtgtaggagaagggaaatcaattggagaatgcctggaaacccctgctgctcattgtgccccttcgcctgggcataaaccaaatcaatcctgtctatgttgatgcattcaaagagtgttttaagatgccacagtctttaggggcattaggaggaaaaccaaataacgcgtattatttcataggattcttaggtgacgagctcatcttcttggaccctcatacaacccagacctttgttgacactgaagagaatggaacggttaatgaccagactttccattgcctgcagtccccacagcgaatgaacatcctaaacctggatccttcagttgcattgggatttttctgcaaagaagaaaaagactttgataactggtgtagccttgttcagaaggaaattctaaaggagaatttaaggatgtttgaattagttcagaaacatccatcacactggcctccctttgtacctccagccaagccagaagtgacaaccactggggcagaattcattgactctactgagcaactggaggagtttgatctggaggaagattttgagattctgagtgtgtagaatcctgggaactcaacttgaaggtctgtcttccatctggcaccataaaaacatgaacttattgcataaaacttttctagtcagcaagtgcctgatatgccaatagcatacaaactcaatagcaatcatgactgagccaatcactgtttctcagaaaaacaaaacaaaacaaaacaaatgacagtaacccttccccggaaagaaatagaacaatcatggagcctaggagcagagagatgaggaggagttcattgcttcccagcttgtgttatatggctacagcaagtcttcagctgctgcaatgaggaaatgggcatctggaagacaaacagcaactctcagcttgcttcaagaaccagcagataagagatggttaagctgttcttcaccctttcagatgtgacctcttttggactaagcagcaatctgttctcttgctcaaataataaagtgactgaatcagggaggaaaaggttcttgttaaattatttgattgtgtagttgaagtaattataatttatatcaaaacgtttgtcaaagaaacgatgtcaaatatacacttcttgatctcccttctgtttgcggggatcttactatttgatgggtcactgtccccattcttactgatacttttgtcagatatcaccctgtccttaaatcatgatcacttaaatcaggggtcagcaaactttttctgtaaagggccagacgggaaatattttgggctttgcaggccatgcggcctctgtcacatctactcaactctgctgttgacatgcaaaagcagcaatagacaatatgcgtgtaaatgagtgtggctgtaatccaagaaaactttatttacaaaagcaggtggagggctgggtttggcctgcaggctgtagcttgccaatcagtgacttaaattgttgatttttgtttgataaattaaaaataaattgtgtttgaagtata

SEQ ID NO: 466544 - DNA, 800 bp, Homo sapiens
ggagttgcagtttgagagcagttccgggcagggaggcgcctttgctgccctcacagacttggcccctagcagtgcagaactacaagtcccagggatcctagcgaccgtccgtccgtagtcaagttgccggtggaattggcccaggatgacagctggagaatggagtcagttttatccaagtatgaagatcagattactattttcactgactacctagaagaatatccagatacagatgagctggtatggatcttagggaagcagcatctccttaaaacagaaaaatctaagctgttgtctgatataagtgctcgtctatggtttacatacagaaggaaattttcaccaattggtggaacgggcccttcatcagatgctggttggggatgtatgctacgctgtggacagatgatgctggctcaagcccttatctgtagacacttgggaagggactggagctgggagaaacaaaaagaacaacccaaagaataccaacgcatcctacagtgcttcttagatagaaaagattgttgctactctatccatcaaatggcacaaatgggtgtaggagaagggaaatcaattggagaatggtttggaccaaatacagttgcacaggtgttaaagtaagtaaaagagtctggcatctgccttattctgctgtctcctatgcttccctccctagacaactaaacctcccatcaaccgaggtattcttgcaatcccgctaagctactcctcccactaaaccatcaaatatctgccattttgctcagatggctctttgaaatgtgtaagca

SEQ ID NO: 466545 - DNA, 522 bp, Homo sapiens
ggctcacccttgtccaggcgtgtgattcctgcactgaggagtgagagcaacctaaagatacagtccctgtctcaaaggccctggcagacttgagaaatgagattcttccaataagcccagaatccctattgggagctaaacaagtacccagtggccagaatgaagagcatgagccctagaggaatggcctgggctttgtgcaggcggggagtcagctgagccctggtggcagaggagagggccttctaggcagggtggggggcatgtgaggttccccttagttttgatattggaatatcttctagggctgaagactccttacttatccaatattctgttcttccatttctagaaaaaatgtgccgtgtccttcccttgagtgctgacacagctggtgacaggcctcccgattctttaactgcttcaaaccagagtaagggcacctctgcctactgctcagcctggaaacccctgctgctcattgtgccccttcgcctgggcataaaccaaatcaatcctgtc

SEQ ID NO: 466546 - DNA, 1013 bp, Homo sapiens
  misc_feature (19)..(19): n is a, c, g, or t
tacggctaggtacgaggcngggtgttgcaggatgacagctggagaatggagtcagttttatccaagtatgaagatcagattactattttcactgactacctagaagaatatccagatacagatgagctggtatggatcttagggaagcagcatctccttaaaacaggtggaacgggcccttcatcagatgctggttggggatgtatgctacgctgtggacagatgatgctggctcaagcccttatctgtagacacttgggaagggactggagctgggagaaacaaaaagaacaacccaaagaataccaacgcatcctacagtgcttcttagatagaaaagattgttgctactctatccatcaaatggcacaaatgggtgtaggagaagggaaatcaattggagaatggtttggaccaaatacagttgcacaggtgttaaaaaaacttgctttatttgacgaatggaattccttggctgtttatgtttcaatggataacacagtggtcattgaagatatcaaaaaaatgtgccgtgtccttcccttgagtgctgacacagctggtgacaggcctcccgattctttaactgcttcaaaccagagtaagggcacctctgcctactgctcagcctggaaacccctgctgctcattgtgccccttcgcctgggcataaaccaaatcaatcctgtctatgttgatgcattcaaagagtgttttaagatgccacagtctttaggggcattaggaggaaaaccaaataacgcgtattatttcataggattcttaggtgacgagctcatcttcttggaccctcatacaacccagacctttgttgacactgaagagaatggaacggttaatgaccagactttccattgcctgcagtccccacagcgaatgaacatcctaaacctggatccttcagttgcattgggatttttctgcaaagaagaaaaagactttgataactggtgtagccttgttcagaaggtaaagctatatgtttttcttag

SEQ ID NO: 466547 - DNA, 2084 bp, Homo sapiens
cagtttccaatttttggctactatgactagtgctgctaagaagattattttatccaagtatgaagatcagattactattttcactgactacctagaagaatatccagatacagatgagctggtatggatcttagggaagcagcatctccttaaaacagaaaaatctaagctgttgtctgatataagtgctcgtctatggtttacatacagaaggaaattttcaccaattggtggaacgggcccttcatcagatgctggttggggatgtatgctacgctgtggacagatgatgctggctcaagcccttatctgtagacacttgggaagggactggagctgggagaaacaaaaagaacaacccaaagaataccaacgcatcctacagtgcttcttagatagaaaagattgttgctactctatccatcaaatggcacaaatgggtgtaggagaagggaaatcaattggagaatggtttggaccaaatacagttgcacaggtgttaaaaaaacttgctttatttgacgaatggaattccttggctgtttatgtttcaatggataacacagtggtcattgaagatatcaaaaaaatgtgccgtgtccttcccttgagtgctgacacagctggtgacaggcctcccgattctttaactgcttcaaaccagagtgacgagctcatcttcttggaccctcatacaacccagacctttgttgacactgaagagaatggaacggttaatgaccagactttccattgcctgcagtccccacagcgaatgaacatcctaaacctggatccttcagttgcattgggatttttctgcaaagaagaaaaagactttgataactggtgtagccttgttcagaaggaaattctaaaggagaatttaaggatgtttgaattagttcagaaacatccatcacactggcctccctttgtacctccagccaagccagaagtgacaaccactggggcagaattcattgactctactgagcaactggaggagtttgatctggaggaagattttgagattctgagtgtgtagaatcctgggaactcaacttgaaggtctgtcttccatctggcaccataaaaacatgaacttattgcataaaacttttctagtcagcaagtgcctgatatgccaatagcatacaaactcaatagcaatcatgactgagccaatcactgtttctcagaaaaacaaaacaaaacaaaacaaatgacagtaacccttccccggaaagaaatagaacaatcatggagcctaggagcagagagatgaggaggagttcattgcttcccagcttgtgttatatggctacagcaagtcttcagctgctgcaatgaggaaatgggcatctggaagacaaacagcaactctcagcttgcttcaagaaccagcagataagagatggttaagctgttcttcaccctttcagatgtgacctcttttggactaagcagcaatctgttctcttgctcaaataataaagtgactgaatcagggaggaaaaggttcttgttaaattatttgattgtgtagttgaagtaattataatttatatcaaaacgtttgtcaaagaaacgatgtcaaatatacacttcttgatctcccttctgtttgcggggatcttactatttgatgggtcactgtccccattcttactgatacttttgtcagatatcaccctgtccttaaatcatgatcacttaaatcaggggtcagcaaactttttctgtaaagggccagacgggaaatattttgggctttgcaggccatgcggcctctgtcacatctactcaactctgctgttgacatgcaaaagcagcaatagacaatatgcgtgtaaatgagtgtggctgtaatccaagaaaactttatttacaaaagcaggtggagggctgggtttggcctgcaggctgtagcttgccaatcagtgacttaaattgttgatttttgtttgataaattaaaaataaattgtgtttgaagtataccctacttggttgacagccatatttagaattattcatgtggtgaattacacattttatctgtgcatcatatacaattccaaa

SEQ ID NO: 466548 - DNA, 2310 bp, Homo sapiens
ggagttgcagtttgagagcagttccgggcagggaggcgcctttgctgccctcacagacttggcccctagcagtgcagaactacaagtcccagggatcctagcgaccgtccgtccgtagtcaagttgccggtggaattggcccaggatgacagctggagaatggagtcagttttatccaagtatgaagatcagattactattttcactgactacctagaagaatatccagatacagatgagctggtatggatcttagggaagcagcatctccttaaaacagaaaaatctaagctgttgtctgatataagtgctcgtctatggtttacatacagaaggaaattttcaccaattggtggaacgggcccttcatcagatgctggttggggatgtatgctacgctgtggacagatgatgctggctcaagcccttatctgtagacacttgggaagggactggagctgggagaaacaaaaagaacaacccaaagaataccaacgcatcctacagtgcttcttagatagaaaagattgttgctactctatccatcaaatggcacaaatgggtgtaggagaagggaaatcaattggagaatggtttggaccaaatacagttgcacaggtgttaaaaaaacttgctttatttgacgaatggaattccttggctgtttatgtttcaatggataacacagtggtcattgaagatatcaaaaaaatgtgccgtgtccttcccttgagtgctgacacagctggtgacaggcctcccgattctttaactgcttcaaaccagagtaagggcacctctgcctactgctcagcctggaaacccctgctgctcattgtgccccttcgcctgggcataaaccaaatcaatcctgtctatgttgatgcattcaaagagtgttttaagatgccacagtctttaggggcattaggaggaaaaccaaataacgcgtattatttcataggattcttaggtgacgagctcatcttcttggaccctcatacaacccagacctttgttgacactgaagagaatggaacggttaatgaccagactttccattgcctgcagtccccacagcgaatgaacatcctaaacctggatccttcagttgcattgggatttttctgcaaagaagaaaaagactttgataactggtgtagccttgttcagaaggaaattctaaaggagaatttaaggatgtttgaattagttcagaaacatccatcacactggcctccctttgtacctccagccaagccagaagtgacaaccactggggcagaattcattgactctactgagcaactggaggagtttgatctggaggaagattttgagattctgagtgtgtagaatcctgggaactcaacttgaaggtctgtcttccatctggcaccataaaaacatgaacttattgcataaaacttttctagtcagcaagtgcctgatatgccaatagcatacaaactcaatagcaatcatgactgagccaatcactgtttctcagaaaaacaaaacaaaacaaaacaaatgacagtaacccttccccggaaagaaatagaacaatcatggagcctaggagcagagagatgaggaggagttcattgcttcccagcttgtgttatatggctacagcaagtcttcagctgctgcaatgaggaaatgggcatctggaagacaaacagcaactctcagcttgcttcaagaaccagcagataagagatggttaagctgttcttcaccctttcagatgtgacctcttttggactaagcagcaatctgttctcttgctcaaataataaagtgactgaatcagggaggaaaaggttcttgttaaattatttgattgtgtagttgaagtaattataatttatatcaaaacgtttgtcaaagaaacgatgtcaaatatacacttcttgatctcccttctgtttgcggggatcttactatttgatgggtcactgtccccattcttactgatacttttgtcagatatcaccctgtccttaaatcatgatcacttaaatcaggggtcagcaaactttttctgtaaagggccagacgggaaatattttgggctttgcaggccatgcggcctctgtcacatctactcaactctgctgttgacatgcaaaagcagcaatagacaatatgcgtgtaaatgagtgtggctgtaatccaagaaaactttatttacaaaagcaggtggagggctgggtttggcctgcaggctgtagcttgccaatcagtgacttaaattgttgatttttgtttgataaattaaaaataaattgtgtttgaagtata

SEQ ID NO: 466549 - DNA, 2010 bp, Homo sapiens
  misc_feature (19)..(19): n is a, c, g, or t
tacggctaggtacgaggcngggtgttgcaggatgacagctggagaatggagtcagttttatccaagtatgaagatcagattactattttcactgactacctagaagaatatccagatacagatgagctggtatggatcttagggaagcagcatctccttaaaacagaaaaatctaagctgttgtctgatataagtgctcgtctatggtttacatacagaaggaaattttcaccaattggtggaacgggcccttcatcagatgctggttggggatgtatgctacgctgtggacagatgatgctggctcaagcccttatctgtagacacttgggaagggactggagctgggagaaacaaaaagaacaacccaaagaataccaacgcatcctacagtgcttcttagatagaaaagattgttgctactctatccatcaaatggcacaaatgggtgtaggagaagggaaatcaattggagaatggtttggaccaaatacagttgcacaggtgttaaaaaaacttgctttatttgacgaatggaattccttggctgtttatgtttcaatggataacacagtggtcattgaagatatcaaaaaaatgtgccgtgtccttcccttgagtgctgacacagctggtgacaggcctcccgattctttaactgcttcaaaccagagtgacgagctcatcttcttggaccctcatacaacccagacctttgttgacactgaagagaatggaacggttaatgaccagactttccattgcctgcagtccccacagcgaatgaacatcctaaacctggatccttcagttgcattgggatttttctgcaaagaagaaaaagactttgataactggtgtagccttgttcagaaggaaattctaaaggagaatttaaggatgtttgaattagttcagaaacatccatcacactggcctccctttgtacctccagccaagccagaagtgacaaccactggggcagaattcattgactctactgagcaactggaggagtttgatctggaggaagattttgagattctgagtgtgtagaatcctgggaactcaacttgaaggtctgtcttccatctggcaccataaaaacatgaacttattgcataaaacttttctagtcagcaagtgcctgatatgccaatagcatacaaactcaatagcaatcatgactgagccaatcactgtttctcagaaaaacaaaacaaaacaaaacaaatgacagtaacccttccccggaaagaaatagaacaatcatggagcctaggagcagagagatgaggaggagttcattgcttcccagcttgtgttatatggctacagcaagtcttcagctgctgcaatgaggaaatgggcatctggaagacaaacagcaactctcagcttgcttcaagaaccagcagataagagatggttaagctgttcttcaccctttcagatgtgacctcttttggactaagcagcaatctgttctcttgctcaaataataaagtgactgaatcagggaggaaaaggttcttgttaaattatttgattgtgtagttgaagtaattataatttatatcaaaacgtttgtcaaagaaacgatgtcaaatatacacttcttgatctcccttctgtttgcggggatcttactatttgatgggtcactgtccccattcttactgatacttttgtcagatatcaccctgtccttaaatcatgatcacttaaatcaggggtcagcaaactttttctgtaaagggccagacgggaaatattttgggctttgcaggccatgcggcctctgtcacatctactcaactctgctgttgacatgcaaaagcagcaatagacaatatgcgtgtaaatgagtgtggctgtaatccaagaaaactttatttacaaaagcaggtggagggctgggtttggcctgcaggctgtagcttgccaatcagtgacttaaattgttgatttttgtttgataaattaaaaataaattgtgtttgaagtata

SEQ ID NO: 466550 - DNA, 2612 bp, Homo sapiens
ggagttgcagtttgagagcagttccgggcagggaggcgcctttgctgccctcacagacttggcccctagcagtgcagaactacaagtcccagggatcctagcgaccgtccgtccgtagtcaagttgccggtggaattggcccaggatgacagctggagaatggagtcagttttatccaagtatgaagatcagattactattttcactgactacctagaagaatatccagatacagatgagctggtatggatcttagggaagcagcatctccttaaaacagattgggaaagaaagaccttttaacctgaaactgctaacagcccagcacccagataaagccagagcttggaaagaggcagctctgagatttgtgtctttctgaggagacatcctcttcagaggccctcacttagcgtggaggaaggaacaggaagaggctgatgaaaaggcaggagaggaagttaggcattgtggagctcctcctgagcctggcttcattattttgattggagaattctgaacagtggaaagcctggagctagcaattaggagaccttttgtattcagactcttctaactcagaaaaatctaagctgttgtctgatataagtgctcgtctatggtttacatacagaaggaaattttcaccaattggtggaacgggcccttcatcagatgctggttggggatgtatgctacgctgtggacagatgatgctggctcaagcccttatctgtagacacttgggaagggactggagctgggagaaacaaaaagaacaacccaaagaataccaacgcatcctacagtgcttcttagatagaaaagattgttgctactctatccatcaaatggcacaaatgggtgtaggagaagggaaatcaattggagaatggtttggaccaaatacagttgcacaggtgttaaaaaaacttgctttatttgacgaatggaattccttggctgtttatgtttcaatggataacacagtggtcattgaagatatcaaaaaaatgtgccgtgtccttcccttgagtgctgacacagctggtgacaggcctcccgattctttaactgcttcaaaccagagtaagggcacctctgcctactgctcagcctggaaacccctgctgctcattgtgccccttcgcctgggcataaaccaaatcaatcctgtctatgttgatgcattcaaagagtgttttaagatgccacagtctttaggggcattaggaggaaaaccaaataacgcgtattatttcataggattcttaggtgacgagctcatcttcttggaccctcatacaacccagacctttgttgacactgaagagaatggaacggttaatgaccagactttccattgcctgcagtccccacagcgaatgaacatcctaaacctggatccttcagttgcattgggatttttctgcaaagaagaaaaagactttgataactggtgtagccttgttcagaaggaaattctaaaggagaatttaaggatgtttgaattagttcagaaacatccatcacactggcctccctttgtacctccagccaagccagaagtgacaaccactggggcagaattcattgactctactgagcaactggaggagtttgatctggaggaagattttgagattctgagtgtgtagaatcctgggaactcaacttgaaggtctgtcttccatctggcaccataaaaacatgaacttattgcataaaacttttctagtcagcaagtgcctgatatgccaatagcatacaaactcaatagcaatcatgactgagccaatcactgtttctcagaaaaacaaaacaaaacaaaacaaatgacagtaacccttccccggaaagaaatagaacaatcatggagcctaggagcagagagatgaggaggagttcattgcttcccagcttgtgttatatggctacagcaagtcttcagctgctgcaatgaggaaatgggcatctggaagacaaacagcaactctcagcttgcttcaagaaccagcagataagagatggttaagctgttcttcaccctttcagatgtgacctcttttggactaagcagcaatctgttctcttgctcaaataataaagtgactgaatcagggaggaaaaggttcttgttaaattatttgattgtgtagttgaagtaattataatttatatcaaaacgtttgtcaaagaaacgatgtcaaatatacacttcttgatctcccttctgtttgcggggatcttactatttgatgggtcactgtccccattcttactgatacttttgtcagatatcaccctgtccttaaatcatgatcacttaaatcaggggtcagcaaactttttctgtaaagggccagacgggaaatattttgggctttgcaggccatgcggcctctgtcacatctactcaactctgctgttgacatgcaaaagcagcaatagacaatatgcgtgtaaatgagtgtggctgtaatccaagaaaactttatttacaaaagcaggtggagggctgggtttggcctgcaggctgtagcttgccaatcagtgacttaaattgttgatttttgtttgataaattaaaaataaattgtgtttgaagtata

SEQ ID NO: 466551 - DNA, 1636 bp, Homo sapiens
gatccttgtattgagtggcactgtgaaggtataaaaaatgtgccgtgtccttcccttgagtgctgacacagctggtgacaggcctcccgattctttaactgcttcaaaccagagtaagggcacctctgcctactgctcagcctggaaacccctgctgctcattgtgccccttcgcctgggcataaaccaaatcaatcctgtctatgttgatgcattcaaagagtgttttaagatgccacagtctttaggggcattaggaggaaaaccaaataacgcgtattatttcataggattcttaggtgacgagctcatcttcttggaccctcatacaacccagacctttgttgacactgaagagaatggaacggttaatgaccagactttccattgcctgcagtccccacagcgaatgaacatcctaaacctggatccttcagttgcattgggatttttctgcaaagaagaaaaagactttgataactggtgtagccttgttcagaaggaaattctaaaggagaatttaaggatgtttgaattagttcagaaacatccatcacactggcctccctttgtacctccagccaagccagaagtgacaaccactggggcagaattcattgactctactgagcaactggaggagtttgatctggaggaagattttgagattctgagtgtgtagaatcctgggaactcaacttgaaggtctgtcttccatctggcaccataaaaacatgaacttattgcataaaacttttctagtcagcaagtgcctgatatgccaatagcatacaaactcaatagcaatcatgactgagccaatcactgtttctcagaaaaacaaaacaaaacaaaacaaatgacagtaacccttccccggaaagaaatagaacaatcatggagcctaggagcagagagatgaggaggagttcattgcttcccagcttgtgttatatggctacagcaagtcttcagctgctgcaatgaggaaatgggcatctggaagacaaacagcaactctcagcttgcttcaagaaccagcagataagagatggttaagctgttcttcaccctttcagatgtgacctcttttggactaagcagcaatctgttctcttgctcaaataataaagtgactgaatcagggaggaaaaggttcttgttaaattatttgattgtgtagttgaagtaattataatttatatcaaaacgtttgtcaaagaaacgatgtcaaatatacacttcttgatctcccttctgtttgcggggatcttactatttgatgggtcactgtccccattcttactgatacttttgtcagatatcaccctgtccttaaatcatgatcacttaaatcaggggtcagcaaactttttctgtaaagggccagacgggaaatattttgggctttgcaggccatgcggcctctgtcacatctactcaactctgctgttgacatgcaaaagcagcaatagacaatatgcgtgtaaatgagtgtggctgtaatccaagaaaactttatttacaaaagcaggtggagggctgggtttggcctgcaggctgtagcttgccaatcagtgacttaaattgttgatttttgtttgataaattaaaaataaattgtgtttgaagtata

SEQ ID NO: 466552 - DNA, 881 bp, Homo sapiens
aataatccccaatgttagaggtagggcctggtgggaggtgtttgggtcatgggggcggatccttcatggcttcatgctgtccttgctataagccaagacacattctcttcttgttgagagtgttggttgctgaaggttggaagctgagtcccttccaagaatttgcccttggtaaacaggaacttgccaaagttacactcactcgctcaaggacagtcaaattcaaggtttggtccatgggtgtgggatatgaaagtctggccccccgtctcaatttgggctgctacatcagaatcactcctcacaatgggaaaatattaaaaatcccttggaatgtgaatcccttggaggtggggatgacagcctcaaatggcatggctgattcacaaattatggtcactaattggctgagatagtaaaggacatttgaagactgagaagaacttggtgagactgagtgccatatgtaggaagaactgaaagaagaccttggactatggggcaacagagaaaggagagggaggaacttggagctctgaaggaaccgttatccaatcattgcagttgccatagctcagctcacatcctacataaatcccctgacagcagcaaaaactcagtgcaaagagccggcttattttgaacaacgctcagaaccagacggagaaaggaggagacagaaatcatcatttatcattcgggacaaaaggcacagtcagtgggaaaatctgattttcaatcatttaaagggtattaaagtgaaaaagagatagacctggcaagatgtgtctgaggaggatttttttttaaatgaaaacagcacatggtgggcttagttactgtatggatttaaatctgatgcgatgttaaatctatatgcc

SEQ ID NO: 466553 - DNA, 392 bp, Homo sapiens
cctggcatgatctgatcgcctttgaagcagtcgcagctgttttccagacgccttgctcctcaggtcggggagtgatctgatggcccaggttcgagaaacttctttgccctccggctctggggtccgctggatctccggaggtgggggaggagcctctcctgaggaggcggttgagaaggcggggaaaatggaggaggcggcggcgggggctacgaaggcgtcttcgagacgtgaagccgaggagatgaagctggagccattacaagagcgtgagcccgcgccggaggagaacttgacgtggagcagcagcggcggcgacgagaaggtgctcccttcaatcccccttcgctgtcacagcagctcctcgcccgtttgcccgcgccgcaagcccc

SEQ ID NO: 466554 - DNA, 2345 bp, Homo sapiens
cctggcatgatctgatcgcctttgaagcagtcgcagctgttttccagacgccttgctcctcaggtcggggagtgatctgatggcccaggttcgagaaacttctttgccctccggctctggggtccgctggatctccggaggtgggggaggagcctctcctgaggaggcggttgagaaggcggggaaaatggaggaggcggcggcgggggctacgaaggcgtcttcgagacgtgaagccgaggagatgaagctggagccattacaagagcgtgagcccgcgccggaggagaacttgacgtggagcagcagcggcggcgacgagaagtttatgacatcagggtttgaagacaagcaatcaacctgtgagacaaaggaacaggagccaaaattggtgaaacccaagaaaaagagaagaaaaaagtcagtctatactgtaggcctgagagggctaatcaatcttgggaacacttgttttatgaattgtattgtccaggcacttacccatattcctctactgaaagatttcttcctctctgacaagcacaaatgtataatgacaagccccagcttgtgtctggtctgtgaaatgtcttcgctttttcatgctatgtactctgggagccgaactcctcacattccctataagttactgcatctgatatggatccatgcagaacatttagcagggtacaggcagcaggatgcccatgagttccttattgcaatattagacgtgctacatagacacagcaaagatgatagtggtgggcaggaggccaataaccccaactgctgtaactgcatcatagaccaaatctttacaggtggcctgcaatcagatgtcacatgtcaagcctgccatagtgtttctaccaccatagacccatgctgggacatcagtttggacttgcctggctcttgtgccacattcgattcccagaacccagagagggctgacagcacagtgagcagggatgaccacataccaggaatcccctcacttacagactgtctacagtggtttacaaggccagagcacctaggaagcagtgccaaaatcaaatgcaatagttgccaaagctaccaggagtctactaaacagctcacaatgaaaaaattacccattgtggcttgttttcatctcaagcggtttgagcatgtaggcaaacagaggcgaaagattaatacctttatctcctttcccttggagctggacatgactccgtttttggcctctactaaagagagcagaatgaaagaaggccagccaccaacagattgtgtgcccaatgagaataagtattccttgtttgcagtgattaatcaccatggaactttggaaagtggccactataccagcttcatccggcaacaaaaggaccagtggttcagctgtgatgatgccatcatcaccaaggctaccattgaggacttactctacagtgaagggtatttactgttctatcacaaacagggtctagagaaagactagtcttaccagaccacttactgaaaaaaaagtaaatgattaggcaaggattttgaagtgacacacagacctacttggaatggacaatgacagtaacacctatgtgacagctagtatcttgatataaagaacctattttagcatggcccatgggtctgtcggaagaaaaaaatgaatactaaccagtgaccattcaaccttaagaaatggggagagggagaagaggttgaaaatggtcacataaagcataatgaaatgaaaagaatgctttaggtggggacaacgggagtagaagtgttctgatgctactctatgtcatttgtttttacagaaatatcttgtgaagtcagggagtattcctttatcagcaaaaacttcacaattggtgttccagctgtggctgaccagctaaatagtttgaaagaaaaataatattttaaaataaagtttaaagagctttaaaagaaaaacatttaaaaaggaaaaaatcatttttaagattttaaaagaaaaaaacttttaaatgttgaaaaaaatttaagttgttatttttaaaagaaatattttaaaagttaaaaataattttttaatttaaagaagtttcagaattttaaaaattaaaagcaaagaaaattaaattcttaaagtttaaaaatgtaaaataaattaaggaacaaggttaaaaatgaaagtttaccaaaaaaaggaagaaaatactgttaaaaattaaagttagaaacaaaggaacatcttaaaagtttcaaatgaaggaaaataatataaatagatatttcaaaattaaagcataaaatatacgtatttaaaaagtgttaacaaaattactactataatgatt

SEQ ID NO: 466555 - DNA, 1768 bp, Homo sapiens
cgggtgggtccagagccaaaaacagcacagttcctggatgccctccagcaacgctgtaggtggctccctcccaccccaacgatttcagagagaaacaagtcggaatctgagaagtgaggctccagataaactgtaaactgctggaagggggcgatggctgtggccctgggttgtgcaatccaggcatccttgaatcaaggctctgtgtttcaagaatatgatactgactgtgaagttttccgtcagcgcttcaggcagttccagtacagagaagcagctgggcctcatgaagcatttacaaactctgggagctttgctgtcaatggctgaagccaaagatgcgctctaaggaacaaatcctggagctgctagtgttggagcaattcctaactatcctgcccacagagatagagacctgggtgagggagcactgcccagagaatagagaaagagttgtgtcactgatagaagacttacagagagaacttgagataccagagcagcaggttgatatgcatgacatgctcttggaagaactggcaccagtgggaacggcacacataccaccaaccatgcacctagagtcacctgcactccaggtaatgggacctgcccaggaggccccagtagcagaggcatggatcccacaggcagggccaccggagctgaactatggtgctactggagaatgtcagaactttctggaccctggatatccattaccaaaacttgacatgaacttctcattggagaatagagaagagccatgggtgaaggaattacaggattctaaagaaatgaaacaattacttgattccaagataggttttgagatcgggatagaaaatgaagaagatacttcaaaacagaaaaaaatggagactatgtatccatttattgtaactttagaggggaatgctctccagggtcccattttgcaaaaagactatgtacagttagaaaatcaatgggaaacccccccagaggatttacagacagatttagcaaaactggtagatcagcagaaccccactctgggagagacacctgagaactccaacttggaagaacctctcaaccctaaaccccacaagaaaaagagtccaggagagaaacctcaccgatgtcctcagtgtggaaaatgttttgctcggaagtcacaacttactgggcatcagagaattcattcaggagaagaacctcacaaatgccctgaatgtgggaaaagattccttcgtagttcagacctttatagacaccaacgacttcatacaggggagagaccctatgaatgcactgtatgtaaaaagcgattcactcggcggtcacatcttatagggcaccagagaacccattctgaagaagaaacatataaatgtcttgagtgtgggaaaagtttttgtcatggatcaagtcttaaaagacatctgaaaactcatacaggtgaaaaacctcatagatgtcataattgtgggaaaagttttagtcgactgacagctcttactttgcaccagagaacgcatactgaagagagaccttttaaatgtaattattgtgggaaaagttttagacagagaccaagcctcgttattcatttaagaatccacacaggggagaagccatacaaatgtgtcccatgtggcaagaaaggagacagtgaattttgtcaaacaataaaaatgtgtcaggaacacaaggatgaaggggatgtcatttgcctgaagtggatccttcagctccagcagttgcaaccccgaaacatttgagt

SEQ ID NO: 466556 - DNA, 888 bp, Homo sapiens
cgggtgggtccagagccaaaaacagcacagttcctggatgccctccagcaacgctgtaggtggctccctcccaccccaacgatttcagagagaaacaagtcggaatctgagaagtgaggctccagataaactgtaaactgctggaagggggcgatggctgtggccctgggttgtgcaatccaggcatccttgaatcaaggctctgtgtttcaagaatatgatactgactgtgaagttttccgtcagcgcttcaggcagttccagtacagagaagcagctgggcctcatgaagcatttacaaactctgggagctttgctgtcaatggctgaagccaaagatgcgctctaaggaacaaatcctggagctgctagtgttggagcaattcctaactatcctgcccacagagatagagacctgggtgagggagcactgcccagagaatagagaaagagttgtgtcactgatagaagacttacagagagaacttgagataccagagcagcaggtaagaaaagaatgtgggatctttgtgattggtccaaaggaagtagctgaggcagctgggactagaccacacatttgtctctatgtcattccccagcctcaagatttctccagagtcctcttcctttttctcttctgctgaactcagcaaatgagtcagtgcttttaactctatcagactcaattccccttctataacaaatagtttataatgtccactttactatgcacaaatgaaattgatagacaacataatctacccacatacatcaacccaaagcatcagtaaattgctccatggcctgaaggccaattctagccataccctgtttatctgtatactctgtatgtaatggtttttttatcttgttgaaaggtcattg

SEQ ID NO: 466557 - DNA, 4707 bp, Homo sapiens
cctgacaattgcgtttctaaggaaaccagactacaaaggaggatgatgcggtgctcatctctcaagaaacacatcagctttcatctttatcagtatgacactgacatgataggaaatgctgggctggtgattcagcagccatccattttacagtcagaggacaagtcgtacaatggtggaggaataggttcttcaaataggatcatggacttcttggaggagccaatccctggtgtagggacctatgatgatttcaatacaattgattgggtgagagagaagtctcgagaccgggataggcaccgagagattaccaataaaagcaaagagtcaacatgggccttaattcacagtggagcctttgcctacatagtcaattatttcatgtacgtcctctgggctctcctatttgccttccttgccgtatctcttgtcaaggtgtttgcgccttatgcctgtggctctggaatccctgagataaaaactatcttgagtggtttcattattaggggctatttgggtaagtggactctggttatcaaaaccatcaccttggtgctggcagtgtcgtctggcttgagcctgggcaaagagggccctctagtgcacgtggcttgctgctgtgggaacatcctgtgccactgcttcaacaaatacaggaagaatgaagccaagcgcagagaggtcttgtcggctgcagcagcagctggtgtatctgtagcctttggagcacctataggtggagtattattcagccttgaagaggtcagctactattttcccctcaaaacattgtggcgttcattctttgctgccttggtggcagcattcactctacgctccatcaatccatttgggaacagccgcctggtactattttatgtggagtttcacaccccatggcatctctttgagctcgtgccattcattctgctgggcatatttggtggtctgtggggagcactgtttatccgcacaaacattgcctggtgtcggaagcgaaagaccacccagttgggcaagtatcctgttatagaggtactcgtcgtgacagccatcactgccatcctggctttccccaatgaatacactcggatgagcacaagtgagctcatttctgagctgtttaatgactgtggccttctggactcctccaagctctgtgattatgagaaccgtttcaacacaagcaaagggggtgaactgcctgacagaccggctggcgtgggagtctacagtgcaatgtggcagctggctttaacactcatactgaaaattgtcattactatattcacctttggcatgaagatcccttctggcctctttatccctagcatggctgttggtgctatagcaggtcgacttctaggagtaggaatggaacagctggcttattaccaccaggaatggaccgtcttcaatagctggtgtagtcagggagctgattgcatcacccccggcctttatgcaatggttggggctgcagcctgcttaggtggggtgactcggatgactgtttctcttgttgtcataatgtttgaactgactggtggcttagaatacatcgtgcctctgatggctgcagccatgacaagcaagtgggtggcagatgctcttgggcgggagggcatctatgatgcccacatccgtctcaatggatacccctttcttgaagccaaagaagagtttgctcataagaccctggcaatggatgtgatgaaaccccggagaaatgatcctttgttgactgtccttactcaggacagtatgactgtggaagatgtagagaccataatcagtgaaaccacttacagtggcttcccagtggtggtatcccgggagtcccaaagacttgtgggctttgtcctccgaagagatctcattatttcaattgaaaatgctcgaaagaaacaggatggggttgttagcacttccatcatttatttcacggagcattctcctccattgccaccatacactccacccactctaaagcttcggaacatcctcgatctcagccccttcactgtgactgaccttacacccatggagatcgtagtggatattttccgaaagctgggactgcggcagtgcctggttacacacaacgggcgattgcttggaatcattaccaaaaaggatgtgttaaagcatatagcacagatggcgaaccaagatcctgattccattctcttcaactagaatcatagagttctggatgtaaagcgggaaggacattacagaccatggatatgttgtattaactgggtacccaaaacacattttccatatttggatggtgaagtcacattagtgtgttgtctctttcctacaagttaaccagttgcactacataatctctggaaattaattttctctttaggagaaattatagttaggcttccatgatgttacattaggaagatatcatgaaagaataaataagattgctatggtttaattatatttgctttttaaaagatttttttaacttaaaaagtagttagccaatatgcaatcactgaaaactatgcaagagaaattccaaccgtcctgacctataacctgtaggaaaccgacgaaaaagtcactcttttgggatctaactgttgttactggaagacgaagtgtaaactaaggggctttgcttttcaaaccagagaaaggaaagccagaaggaaaagagtaatggtattttctagactgtgaagattcagttcaaatgttatccttgttcctgttacaatatttagcattattagtttgttatgtgtgtatgtttatgttaattttaatttctgattataagacaatgctgctttggttaatctcttctaaatgaatttagagagattgacttttatagcttgcttgttgctggtactcttttgaagtgcacaaagataagttatagagctttctccttgtctgcaaaaacggtaattttccaggtggcatttgttagctggtagacaaggactttgccgtgaatttgttagtagcaaggaatgatttcttccagcttccttgaaatgaataattagtaaacttctaagcaaagtcaatgactaggagtttcacatgtttgtgaggtcctaactaattctcttacccagatgccacctccatgaatgatggtgctttaggcttctggaatatgtaaaaacagcaaagggaaccaagtctagactgcatactggtaaaccagggaagactcagaactgcatatgcatcctcatgcattcctttgtaaagaccaccagtactaaaataactggacactcattgtacctcccagcgataagtatgtgtaacaggccagtgtgttgtccccatgatcatgaattaggcttgggatgcttccaaatatattcaaggtgttggaacaggataggcagctgtgactccctcaagagtccttagaattctaaataaaatgcagagccatcctaagacacaggggtatggacaaggcctggtgacaccaaaggtgcttgtatccaattgaaaaggtgcctgtctcaatttcataccacctttattgcagttaaaaaaaaatcacactctggggacacttggtggaattacagagccaccatcatcattccaaccactatttcattttctgtagttttacctgtgtgcaattactccccctccattctgttccacttcttactccttagtaccaaatcctctgtttgggattgagcgctgctcctggttaatcattcctactacaaaaaaaaataactcccagggctagttaaattgtaaaccaaggctcagcagtctcacaacacatggaccagaggtgacacacagccatttcctttgccatgtggcccagttgctgctgccatgcctccatttccacactggatgcctacggcagtgagatttcactgccggggtaagagttcagcctggatgattttatagctctgttcctagcacttctcatcatccttccagcccagaatcagcggtcattctgcatattcccaccaaccctctacccccaaacacttcagtgtacctcattttaagagttgctgatccctgattctaggacgtttttacccatagttcttgtctttccaaaatctgaaattcttttttttgctcagaactgggtagccaagggttattttatttttatctttaaaataatcaaggcagtcgctagagtttctccttgtgaatagatcactctagcattttaatgaaaaagaaaaaaatctttctggggtatgttgtatcatagtaatggctcagtaaccacatattttgtcctttccatgtcactgattccttcatatgagactatttggcttgactaccctgtatattgtgtagaaatcaaagttcttatctgtacatttctggtccaatacctgtcttattagttgtccttccccactaaagtttgcaaaacagaaaatgttactatttctggtatttaatgacaatgaaaggtttggtcatatttcatagtgcagtagcgataaggagggtgtctcaagtttgcttttgtgtttcttctaggctttgttcttgattttagacagatgagccagtgttaaggtgctacttcagagaataaattagagaaatcagataacacttgataagatatttttaccccttcaagtccaatgtttgcgggcttggcagcctctcctttatattaacagaatcttggaa

SEQ ID NO: 466558 - DNA, 2161 bp, Homo sapiens
cctgacaattgcgtttctaaggaaaccagactacaaaggaggatgatgcggtgctcatctctcaagaaacacatcagctttcatctttatcagtatgacactgacatgataggaaatgctgggctggtgattcagcagccatccattttacagtcagaggacaagtcgtacaatggtggaggaataggttcttcaaataggatcatggacttcttggaggagccaatccctggtgtagggacctatgatgatttcaatacaattgattgggtgagagagaagtctcgagaccgggataggcaccgagagattaccaataaaagcaaagagtcaacatgggccttaattcacagtggagcctttgcctacatagtcaattatttcatgtacgtcctctgggctctcctatttgccttccttgccgtatctcttgtcaaggtgtttgcgccttatgcctgtggctctggaatccctgagataaaaactatcttgagtggtttcattattaggggctatttgggtaagtggactctggttatcaaaaccatcaccttggtgctggcagtgtcgtctggcttgagcctgggcaaagagggccctctagtgcacgtggcttgctgctgtgggaacatcctgtgccactgcttcaacaaatacaggaagaatgaagccaagcgcagagaggtcttgtcggctgcagcagcagctggtgtatctgtagcctttggagcacctataggtggagtattattcagccttgaagaggtcagctactattttcccctcaaaacattgtggcgttcattctttgctgccttggtggcagcattcactctacgctccatcaatccatttgggaacagccgcctggtactattttatgtggagtttcacaccccatggcatctctttgagctcgtgccattcattctgctgggcatatttggtggtctgtggggagcactgtttatccgcacaaacattgcctggtgtcggaagcgaaagaccacccagttgggcaagtatcctgttatagaggtactcgtcgtgacagccatcactgccatcctggctttccccaatgaatacactcggatgagcacaagtgagctcatttctgagctgtttaatgactgtggccttctggactcctccaagctctgtgattatgagaaccgtttcaacacaagcaaagggggtgaactgcctgacagaccggctggcgtgggagtctacagtgcaatgtggcagctggctttaacactcatactgaaaattgtcattactatattcacctttggcatgaagatcccttctggcctctttatccctagcatggctgttggtgctatagcaggtcgacttctaggagtaggaatggaacagctggcttattaccaccaggaatggaccgtcttcaatagctggtgtagtcagggagctgattgcatcacccccggcctttatgcaatggttggggctgcagcctgcttaggtggggtgactcggatgactgtttctcttgttgtcataatgtttgaactgactggtggcttagaatacatcgtgcctctgatggctgcagccatgacaagcaagtgggtggcagatgctcttgggcgggagggcatctatgatgcccacatccgtctcaatggatacccctttcttgaagccaaagaagagtttgctcataagaccctggcaatggatgtgatgaaaccccggagaaatgatcctttgttgactgtccttactcaggacagtatgactgtggaagatgtagagaccataatcagtgaaaccacttacagtggcttcccagtggtggtatcccgggagtcccaaagacttgtgggctttgtcctccgaagagatctcattatttcaattgaaaatgctcgaaagaaacaggatggggttgttagcacttccatcatttatttcacggagcattctcctccattgccaccatacactccacccactctaaagcttcggaacatcctcgatctcagccccttcactgtgactgaccttacacccatggagatcgtagtggatattttccgaaagctgggactgcggcagtgcctggttacacacaacgggcgattgcttggaatcattaccagttgtctgagtcagggatcctcagatc

SEQ ID NO: 466559 - DNA, 4666 bp, Homo sapiens
cctgacaattgcgtttctaaggaaaccagactacaaaggaggatgatgcggtgctcatctctcaagaaacacatcagctttcatctttatcagtatgacactgacatgataggaaatgctgggctggtgattcagcagccatccattttacagtcagaggacaagtcgtacaatggtggaggaataggttcttcaaataggatcatggacttcttggaggagccaatccctggtgtagggacctatgatgatttcaatacaattgattgggtgagagagaagtctcgagaccgggataggcaccgagagattaccaataaaagcaaagagtcaacatgggccttaattcacagtggagcctttgcctacatagtcaattatttcatgtacgtcctctgggctctcctatttgccttccttgccgtatctcttgtcaaggtgtttgcgccttatgcctgtggctctggaatccctgagataaaaactatcttgagtggtttcattattaggggctatttgggtaagtggactctggttatcaaaaccatcaccttggtgctggcagtgtcgtctggcttgagcctgggcaaagagggccctctagtgcacgtggcttgctgctgtgggaacatcctgtgccactgcttcaacaaatacaggaagaatgaagccaagcgcagagaggtcttgtcggctgcagcagcagctggtgtatctgtagcctttggagcacctataggtggagtattattcagccttgaagaggtcagctactattttcccctcaaaacattgtggcgttcattctttgctgccttggtggcagcattcactctacgctccatcaatccatttgggaacagccgcctggtactattttatgtggagtttcacaccccatggcatctctttgagctcgtgccattcattctgctgggcatatttggtggtctgtggggagcactgtttatccgcacaaacattgcctggtgtcggaagcgaaagaccacccagttgggcaagtatcctgttatagaggtactcgtcgtgacagccatcactgccatcctggctttccccaatgaatacactcggatgagcacaagtgagctcatttctgagctgtttaatgactgtggccttctggactcctccaagctctgtgattatgagaaccgtttcaacacaagcaaagggggtgaactgcctgacagaccggctggcgtgggagtctacagtgcaatgtggcagctggctttaacactcatactgaaaattgtcattactatattcacctttggcatgaagatcccttctggcctctttatccctagcatggctgttggtgctatagcaggtcgacttctaggagtaggaatggaacagctggcttattaccaccaggaatggaccgtcttcaatagctggtgtagtcagggagctgattgcatcacccccggcctttatgcaatggttggggctgcagcctgcttaggtggggtgactcggatgactgtttctcttgttgtcataatgtttgaactgactggtggcttagaatacatcgtgcctctgatggctgcagccatgacaagcaagtgggtggcagatgctcttgggcgggagggcatctatgatgcccacatccgtctcaatggatacccctttcttgaagccaaagaagagtttgctcataagaccctggcaatggatgtgatgaaaccccggagaaatgatcctttgttgactgtccttactcaggacagtatgactgtggaagatgtagagaccataatcagtgaaaccacttacagtggcttcccagtggtggtatcccgggagtcccaaagacttgtgggctttgtcctccgaagagatctcattatttcaattgaaaatgctcgaaagaaacaggatggggttgttagcacttccatcatttatttcacggagcattctcctccattgccaccatacactccacccactctaaagcttcggaacatcctcgatctcagccccttcactgtgactgaccttacacccatggagatcgtagtggatattttccgaaagctgggactgcggcagtgcctggttacacacaacgggcgattgcttggaatcattaccaaaaaggatgtgttaaagcatatagcacagatggcgaaccaagatcctgattccattctcttcaactagaatcatagagttctggatgtaaagcgggaaggacattacagaccatggatatgttgtattaactgggtacccaaaacacattttccatatttggatggtgaagtcacattagtgtgttgtctctttcctacaagttaaccagttgcactacataatctctggaaattaattttctctttaggagaaattatagttaggcttccatgatgttacattaggaagatatcatgaaagaataaataagattgctatggtttaattatatttgctttttaaaagatttttttaacttaaaaagtagttagccaatatgcaatcactgaaaactatgcaagagaaattccaaccgtcctgacctataacctgtaggaaaccgacgaaaaagtcactcttttgggatctaactgttgttactggaagacgaagtgtaaactaaggggctttgcttttcaaaccagagaaaggaaagccagaaggaaaagagtaatggtattttctagactgtgaagattcagttcaaatgttatccttgttcctgttacaatatttagcattattagtttgttatgtgtgtatgtttatgttaattttaatttctgattataagacaatgctgctttggttaatctcttctaaatgaatttagagagattgacttttatagcttgcttgttgctggtactcttttgaagtgcacaaagataagttatagagctttctccttgtctgcaaaaacggtaattttccaggtggcatttgttagctggtagacaaggactttgccgtgaatttgttagtagcaaggaatgatttcttccagcttccttgaaatgaataattagtaaacttctaagcaaagtcaatgactaggagtttcacatgtttgtgaggtcctaactaattctcttacccagatgccacctccatgaatgatggtgctttaggcttctggaatatgtaaaaacagcaaagggaaccaagtctagactgcatactggtaaaccagggaagactcagaactgcatatgcatcctcatgcattcctttgtaaagaccaccagtactaaaataactggacactcattgtacctcccagcgataagtatgtgtaacaggccagtgtgttgtccccatgatcatgaattaggcttgggatgcttccaaatatattcaaggtgttggaacaggataggcagctgtgactccctcaagagtccttagaattctaaataaaatgcagagccatcctaagacacaggggtatggacaaggcctggtgacaccaaaggtgcttgtatccaattgaaaaggtgcctgtctcaatttcataccacctttattgcagttaaaaaaaaatcacactctggggacacttggtggaattacagagccaccatcatcattccaaccactatttcattttctgtagttttacctgtgtgcaattactccccctccattctgttccacttcttactccttagtaccaaatcctctgtttgggattgagcgctgctcctggttaatcattcctactacaaaaaaaaataactcccagggctagttaaattgtaaaccaaggctcagcagtctcacaacacatggaccagaggtgacacacagccatttcctttgccatgtggcccagttgctgctgccatgcctccatttccacactggatgcctacggcagtgagatttcactgccggggtaagagttcagcctggatgattttatagctctgttcctagcacttctcatcatccttccagcccagaatcagcggtcattctgcatattcccaccaaccctctacccccaaacacttcagtgtacctcattttaagagttgctgatccctgattctaggacgtttttacccatagttcttgtctttccaaaatctgaaattcttttttttgctcagaactgggtagccaagggttattttatttttatctttaaaataatcaaggcagtcgctagagtttctccttgtgaatagatcactctagcattttaatgaaaaagaaaaaaatctttctggggtatgttgtatcatagtaatggctcagtaaccacatattttgtcctttccatgtcactgattccttcatatgagactatttggcttgactaccctgtatattgtgtagaaatcaaagttcttatctgtacatttctggtccaatacctgtcttattagttgtccttccccactaaagtttgcaaaacagaaaatgttactatttctggtatttaatgacaatgaaaggtttggtcatatttcatagtgcagtagcgataaggagggtgtctcaagtttgcttttgtgtttcttctaggctttgttcttgattttagacagatgagccagtgttaaggtgctacttcagagaataaattagagaaatcagataacactatttgtaattatgcatgtaataaagcacagccttatcc

SEQ ID NO: 466560 - DNA, 445 bp, Homo sapiens
ctatgatgcccacatccgtctcaatggatacccctttcttgaagccaaagaagagtttgctcataagaccctggcaatggatgtgatgaaaccccggagaaatgatcctttgttgactgtccttactcaggacagtatgactgtggaagatgtagagaccataatcagtgaaaccacttacagtggcttcccagtggtggtatcccgggagtcccaaagacttgtgggctttgtcctccgaagagatctcattatttcaattggtaaggatttcagaaaggggatagtggaatccactgtggaactcaataaatatgcctgaaatgggggaagacagggaaggggggactggttaggagccagaaggatagagctagcacgtccatcttcaatttgttttttccttctgtttgaatagaaaatgctcgaaagaaacaggatgggg

SEQ ID NO: 466561 - DNA, 3012 bp, Homo sapiens
tggcacaattttaatcaattgttctgcaaaaagttttcttctcttccttgctgatgcagagggccaaaatgttaccttcttcaaaccagatccttacagtctttggcgatgtggccgcttctcccacagttgtagcagatgtttccgagaaggacacagttcttagcattacgaccggactcaccacagcagtaacaggtgtctcagtgatgtcatacaaggtttgcacacggccccattcacgtgtcacggacattcctgacgcccttcccgcccgactttcctcctactcaagaagccaaaagcacaataatctgttaactgagaggagaggagtaagaggcccaagagggctgcagactggcagggaaagtgaagaattgaagggtagaccactaacgatagcagaggaaataaaggtagatgcagcgcatgcgctggaagcacactgcggcgattctggagaggttgtccttttctggcatcagcgttgcggctcgaggcaaagctggtcctgtgcctgctgtccattgccgctaaggcctgctgctgccattcaggcgtgtctctctctctctctctctttcatgccgctctctccaccccatcttgggacggccagctctaagaattcctgctacgacactgaattcaaccaggagtcagcatgaataccagcacagcccaactatgtgtaagcagatctgtgcaggaatgagagtcccagggagagaatccacgttgtttctgaaagaaaatggctatagctcactgttgtttactggaaatagtagggggaaggaaagatggaagtccaggtccagtgtcatatactgccctgcaccttactcacttctctgcctttagggtgatgccacactcaatcagaaactatgctactgctgaagaggtatattgagccctgcctggttaacctccagtgaggttattagagaattgggagaggctcaaatcagcatcctgcacctggttatcaaaccattgtgaagtcttgattcctggatggccagaaaacttgtcattggtcaagagcaacattaagatctgcctgttactcatactgatgcttcctgcccagcaagttcatcagagggcgaggatgaattacggttgccatgaatgtccttgtgaggcagttgggaagccttggctggattgtgaaggatatttgaaaagtattttagagtccaccagatcatccatgtgagtgaccatgcagcaaaagaaggagggtcctctcagtgattaaggtaacatagtgattaaggtaagtagggaaagagaggcttactttgccctgattcttgtcagggaggctcttagagatgccatttccagagcataagtgacaggccagcattttcaaagcttgcaacttattctataatatatccttcttaaaacaattcatgtagattatatgctcacccagtctgggatcactcctgcagaagatcagaagaactgaaatataggtgacataagctcctgcttttgtaaatgttttgttgaaacgcagttgtgttcatccattattgtcgatggcagctttcatgctacagcagagttgagtagttgggagagaaaccatatggaccatagagtttgaaatattactgtctggcccttcacagaaagtttgccaattcctggcataggttaaataaatgtactatatccacaaatcctcctctccccattttcctttcaatgggacttgcatttacagttgatcctagaatgtatggaatctcatagtaatcagcttgcttctgaatttcttcccactcaaattaagctcactcagaaagcacattcacaaattgggctacatatacagaaggagctatgttttatatgcctcactgtagtcaactcatttatcctatatgtatggttcccccattttttccttcttttcaggggtaacttttaaacttgagccattcatgagtatccaaaaagttacaacttatgttctctaattaagacttcatccttattttagtatacttcccctctctggcttttttgcatatttctgcagatgtcttgacctttctggggagagacatattgcttatctccaaaattttcttctgcttgcagagctgcctgttttagcagcagtgagggtttgacttagcagcaacataacatccctccatatgaggtcaaatacaaacagcttgtcgagtgttcacaaatatcactggaatttaaattggaatggccctgaatttgtagattaattttgggagagctgtcatttttacaatcttcccatacattaatgtaatatttttctccttttattcgggtcttcggtatctgcgtatgtatattctacttattacttttaatctcccccattttctggaaaaaaaagatgtctttggaagtgcaattctggtgggaaaagtgtagatgtcatctgcatagactagagccaatcagtagggaatgtcattcaaaatgtgttttgtgtttgatcttaccatttctttcaaatgttcctagcagcctgcattatttataatgttctgtattcctggtttagccatcctagtaggtgtaaagtggtatctcattgtgattttattttgcatttccctaaatgattaatgatattgagcatcttttcatgtgcttcttggccactagtatatcttctttgaagaaatgtctattcaagtctttggcagtttctaaatgagttattgtctttttgttgttaggttgtaagagttataatctggataacagatccttattagatatgtaatttgcacatattttctcccattttgtgggttgtcttttgtcttttttattttttattgcttgtgttttggtatcattattgataattcattgttaaattaaaggtcatgaagagttactcttactttttcttctataatttttagttttagctcttgtattcatgtctgtaatcaattgaagttaatttttaatatagtatgtgtt

SEQ ID NO: 466562 - DNA, 1273 bp, Homo sapiens
ctaggagttggtaccagcgtttgggaggtagaggtggcgctcatgcatatttgagacaacatctggatggttggggagaacggtgatgccacactcaatcagaaactatgctactgctgaagaggtatattgagccctgcctggttaacctccagtgaggttattagagaattgggagaggctcaaatcagcatcctgcacctggttatcaaaccattgtgaagtcttgattcctggatggccagaaaacttgtcattggtcaagagcaacattaagatctgcctgttactcatactgatgcttcctgcccagcaagttcatcagagggcgaggatgaattacggttgccatgaatgtccttgtgaggcagttgggaagccttggctggattgtgaaggatatttgaaaagtattttagagtccaccagatcatccatgtgagtgaccatgcagcaaaagaaggagggtcctctcagtgattaaggtaacatagtgattaaggtaagtagggaaagagaggcttactttgccctgattcttgtcagggaggctcttagagatgccatttccagagcataagtgacaggccagcattttcaaagcttgcaacttattctataatatatccttcttaaaacaattcatgtagattatatgctcacccagtctgggatcactcctgcagaagatcagaagaactgaaatataggtgacataagctcctgcttttgtaaatgttttgttgaaacgcagttgtgttcatccattattgtcgatggcagctttcatgctacagcagagttgagtagttgggagagaaaccatatggaccatagagtttgaaatattactgtctggcccttcacagaaagtttgccaattcctggcataggttaaataaatgtactatatccacaaatcctcctctccccattttcctttcaatgggacttgcatttacagttgatcctagaatgtatggaatctcatagtaatcagcttgcttctgaatttcttcccactcaaattaagctcactcagaaagcacattcacaaattgggctacatatacagaaggagctatgttttatatgcctcactgtagtcaactcatttatcctatatgtatggttcccccattttttccttcttttcaggggtaacttttaaacttgagccattcatgagtatccaaaaagttacaacttatgttctctaattaagacttcatccttattttagtatacatgacactgggatcctctagatcga

SEQ ID NO: 466563 - DNA, 1348 bp, Homo sapiens
gtaagctgtctttgcttggccatcttgggctagcaggccttgcagagaactacctttttagctgagtgaagggatcaacctgagttggagttctcctatgctgtggccagatccactagaaattaacccagaatcttagcctctcagtggcctatcggtgatgccacactcaatcagaaactatgctactgctgaagaggtatattgagccctgcctggttaacctccagtgaggttattagagaattgggagaggctcaaatcagcatcctgcacctggttatcaaaccattgtgaagtcttgattcctggatggccagaaaacttgtcattggtcaagagcaacattaagatctgcctgttactcatactgatgcttcctgcccagcaagttcatcagagggcgaggatgaattacggttgccatgaatgtccttgtgaggcagttgggaagccttggctggattgtgaaggatatttgaaaagtattttagagtccaccagatcatccatgtgagtgaccatgcagcaaaagaaggagggtcctctcagtgattaaggtaacatagtgattaaggtaagtagggaaagagaggcttactttgccctgattcttgtcagggaggctcttagagatgccatttccagagcataagtgacaggccagcattttcaaagcttgcaacttattctataatatatccttcttaaaacaattcatgtagattatatgctcacccagtctgggatcactcctgcagaagatcagaagaactgaaatataggtgacataagctcctgcttttgtaaatgttttgttgaaacgcagttgtgttcatccattattgtcgatggcagctttcatgctacagcagagttgagtagttgggagagaaaccatatggaccatagagtttgaaatattactgtctggcccttcacagaaagtttgccaattcctggcataggttaaataaatgtactatatccacaaatcctcctctccccattttcctttcaatgggacttgcatttacagttgatcctagaatgtatggaatctcatagtaatcagcttgcttctgaatttcttcccactcaaattaagctcactcagaaagcacattcacaaattgggctacatatacagaaggagctatgttttatatgcctcactgtagtcaactcatttatcctatatgtatggttcccccattttttccttcttttcaggggtaacttttaaacttgagccattcatgagtatccaaaaagttacaacttatgttctctaattaagacttcatccttattttagtatacatgacactgggatcctctagatcga

SEQ ID NO: 466564 - DNA, 1853 bp, Homo sapiens
tggcacaattttaatcaattgttctgcaaaaagttttcttctcttccttgctgatgcagagggccaaaatgttaccttcttcaaaccagatccttacagtctttggcgatgtggccgcttctcccacagttgtagcagatgtttccgagaaggacacagttcttagcattacgaccggactcaccacagcagtaacaggtgtctcagtgatgtcatacaaggtttgcacacggccccattcacgtgtcacggacattcctgacgcccttcccgcccgactttcctcctactcaagaagccaaaagcacaataatctgttaactgagaggagaggagtaagaggcccaagagggctgcagactggcagggaaagtgaagaattgaagggtagaccactaacgatagcagaggaaataaaggtagatgcagcgcatgcgctggaagcacactgcggcgattctggagaggttgtccttttctggcatcagcgttgcggctcgaggcaaagctggtcctgtgcctgctgtccattgccgctaaggcctgctgctgccattcaggcgtgtctctctctctctctctctttcatgccgctctctccaccccatcttgggacggccagctctaagaattcctgctacgacactgaattcaaccaggaggtgatgccacactcaatcagaaactatgctactgctgaagaggtatattgagccctgcctggttaacctccagtgaggttattagagaattgggagaggctcaaatcagcatcctgcacctggttatcaaaccattgtgaagtcttgattcctggatggccagaaaacttgtcattggtcaagagcaacattaagatctgcctgttactcatactgatgcttcctgcccagcaagttcatcagagggcgaggatgaattacggttgccatgaatgtccttgtgaggcagttgggaagccttggctggattgtgaaggatatttgaaaagtattttagagtccaccagatcatccatgtgagtgaccatgcagcaaaagaaggagggtcctctcagtgattaaggtaacatagtgattaaggtaagtagggaaagagaggcttactttgccctgattcttgtcagggaggctcttagagatgccatttccagagcataagtgacaggccagcattttcaaagcttgcaacttattctataatatatccttcttaaaacaattcatgtagattatatgctcacccagtctgggatcactcctgcagaagatcagaagaactgaaatataggtgacataagctcctgcttttgtaaatgttttgttgaaacgcagttgtgttcatccattattgtcgatggcagctttcatgctacagcagagttgagtagttgggagagaaaccatatggaccatagagtttgaaatattactgtctggcccttcacagaaagtttgccaattcctggcataggttaaataaatgtactatatccacaaatcctcctctccccattttcctttcaatgggacttgcatttacagttgatcctagaatgtatggaatctcatagtaatcagcttgcttctgaatttcttcccactcaaattaagctcactcagaaagcacattcacaaattgggctacatatacagaaggagctatgttttatatgcctcactgtagtcaactcatttatcctatatgtatggttcccccattttttccttcttttcaggggtaacttttaaacttgagccattcatgagtatccaaaaagttacaacttatgttctctaattaagacttcatccttattttagtatacatgacactgggatcctctagatcga

SEQ ID NO: 466565 - DNA, 1223 bp, Homo sapiens
gaaaagtagttaatggcagtggtggtatgaaggtgatgccacactcaatcagaaactatgctactgctgaagaggtatattgagccctgcctggttaacctccagtgaggttattagagaattgggagaggctcaaatcagcatcctgcacctggttatcaaaccattgtgaagtcttgattcctggatggccagaaaacttgtcattggtcaagagcaacattaagatctgcctgttactcatactgatgcttcctgcccagcaagttcatcagagggcgaggatgaattacggttgccatgaatgtccttgtgaggcagttgggaagccttggctggattgtgaaggatatttgaaaagtattttagagtccaccagatcatccatgtgagtgaccatgcagcaaaagaaggagggtcctctcagtgattaaggtaacatagtgattaaggtaagtagggaaagagaggcttactttgccctgattcttgtcagggaggctcttagagatgccatttccagagcataagtgacaggccagcattttcaaagcttgcaacttattctataatatatccttcttaaaacaattcatgtagattatatgctcacccagtctgggatcactcctgcagaagatcagaagaactgaaatataggtgacataagctcctgcttttgtaaatgttttgttgaaacgcagttgtgttcatccattattgtcgatggcagctttcatgctacagcagagttgagtagttgggagagaaaccatatggaccatagagtttgaaatattactgtctggcccttcacagaaagtttgccaattcctggcataggttaaataaatgtactatatccacaaatcctcctctccccattttcctttcaatgggacttgcatttacagttgatcctagaatgtatggaatctcatagtaatcagcttgcttctgaatttcttcccactcaaattaagctcactcagaaagcacattcacaaattgggctacatatacagaaggagctatgttttatatgcctcactgtagtcaactcatttatcctatatgtatggttcccccattttttccttcttttcaggggtaacttttaaacttgagccattcatgagtatccaaaaagttacaacttatgttctctaattaagacttcatccttattttagtatacatgacactgggatcctctagatcga

SEQ ID NO: 466566 - DNA, 352 bp, Homo sapiens
ttcccctctctggcttttttgcatatttctgcagatgtcttgacctttctggggagtaagcccccttagaagattaattttctgtagttctctattgaggaaatacatgacatttagctttttaataatttgatgccattcattgagtacctactgtgtgctttatgtaccctgtctcgttgaatttttacaaaaaactgaaagagttagttttgtgttattactacctccatctcaaagatgagtcttggaaagcttaagtaactttaggtcacattgtaatcagtggcagaactgggacttaagaacataattcatgactgcattttcttttctttctttctctttcttt

SEQ ID NO: 466567 - DNA, 305 bp, Homo sapiens
tagagatgggggtcttaaactatgttgcccaggctgttcttgaacacctgggctcaagtgatccacacaccttggactcatttcacactaaaagattctgtaatagctcctgagattttactcctctgatgttggaaatttccatagtgtgaagttttgttatgcataaaatcacctggggtgcttgttaaacatgcagattcctggatggccagaaaacttgtcattggtcaagagcaacattaagatctgcctgttactcatactgatgcttcctgcccagcaagttcatcagagggcgagga

SEQ ID NO: 466568 - DNA, 2059 bp, Homo sapiens
tggcacaattttaatcaattgttctgcaaaaagttttcttctcttccttgctgatgcagagggccaaaatgttaccttcttcaaaccagatccttacagtctttggcgatgtggccgcttctcccacagttgtagcagatgtttccgagaaggacacagttcttagcattacgaccggactcaccacagcagtaacaggtgtctcagtgatgtcatacaaggtttgcacacggccccattcacgtgtcacggacattcctgacgcccttcccgcccgactttcctcctactcaagaagccaaaagcacaataatctgttaactgagaggagaggagtaagaggcccaagagggctgcagactggcagggaaagtgaagaattgaagggtagaccactaacgatagcagaggaaataaaggtagatgcagcgcatgcgctggaagcacactgcggcgattctggagaggttgtccttttctggcatcagcgttgcggctcgaggcaaagctggtcctgtgcctgctgtccattgccgctaaggcctgctgctgccattcaggcgtgtctctctctctctctctctttcatgccgctctctccaccccatcttgggacggccagctctaagaattcctgctacgacactgaattcaaccaggagtcagcatgaataccagcacagcccaactatgtgtaagcagatctgtgcaggaatgagagtcccagggagagaatccacgttgtttctgaaagaaaatggctatagctcactgttgtttactggaaatagtagggggaaggaaagatggaagtccaggtccagtgtcatatactgccctgcaccttactcacttctctgcctttagggtgatgccacactcaatcagaaactatgctactgctgaagaggtatattgagccctgcctggttaacctccagtgaggttattagagaattgggagaggctcaaatcagcatcctgcacctggttatcaaaccattgtgaagtcttgattcctggatggccagaaaacttgtcattggtcaagagcaacattaagatctgcctgttactcatactgatgcttcctgcccagcaagttcatcagagggcgaggatgaattacggttgccatgaatgtccttgtgaggcagttgggaagccttggctggattgtgaaggatatttgaaaagtattttagagtccaccagatcatccatgtgagtgaccatgcagcaaaagaaggagggtcctctcagtgattaaggtaacatagtgattaaggtaagtagggaaagagaggcttactttgccctgattcttgtcagggaggctcttagagatgccatttccagagcataagtgacaggccagcattttcaaagcttgcaacttattctataatatatccttcttaaaacaattcatgtagattatatgctcacccagtctgggatcactcctgcagaagatcagaagaactgaaatataggtgacataagctcctgcttttgtaaatgttttgttgaaacgcagttgtgttcatccattattgtcgatggcagctttcatgctacagcagagttgagtagttgggagagaaaccatatggaccatagagtttgaaatattactgtctggcccttcacagaaagtttgccaattcctggcataggttaaataaatgtactatatccacaaatcctcctctccccattttcctttcaatgggacttgcatttacagttgatcctagaatgtatggaatctcatagtaatcagcttgcttctgaatttcttcccactcaaattaagctcactcagaaagcacattcacaaattgggctacatatacagaaggagctatgttttatatgcctcactgtagtcaactcatttatcctatatgtatggttcccccattttttccttcttttcaggggtaacttttaaacttgagccattcatgagtatccaaaaagttacaacttatgttctctaattaagacttcatccttattttagtatacatgacactgggatcctctagatcga

SEQ ID NO: 466569 - DNA, 1194 bp, Homo sapiens
tggcacaattttaatcaattgttctgcaaaaagttttcttctcttccttgctgatgcagagggccaaaatgttaccttcttcaaaccagatccttacagtctttggcgatgtggccgcttctcccacagttgtagcagatgtttccgagaaggacacagttcttagcattacgaccggactcaccacagcagtaacaggtgtctcagtgatgtcatacaaggtttgcacacggccccattcacgtgtcacggacattcctgacgcccttcccgcccgactttcctcctactcaagaagccaaaagcacaataatctgttaactgagaggagaggagtaagaggcccaagagggctgcagactggcagggaaagtgaagaattgaagggtagaccactaacgatagcagaggaaataaaggtagatgcagcgcatgcgctggaagcacactgcggcgattctggagaggttgtccttttctggcatcagcgttgcggctcgaggcaaagctggtcctgtgcctgctgtccattgccgctaaggcctgctgctgccattcaggcgtgtctctctctctctctctctttcatgccgctctctccaccccatcttgggacggccagctctaagaattcctgctacgacactgaattcaaccaggaggtgatgccacactcaatcagaaactatgctactgctgaagaggtatattgagccctgcctggttaacctccagtgaggttattagagaattgggagaggctcaaatcagcatcctgcacctggttatcaaaccattgtgaagtcttgattcctggatggccagaaaacttgtcattggtcaagagcaacattaagatctgcctgttactcatactgatgcttcctgcccagcaagttcatcagagggcgaggatgaattacggttgccatgaatgtccttgtgaggcagttgggaagccttggctggattgtgaaggatatttgaaaagtattttagagtccaccagatcatccatgtgagtgaccatgcagcaaaagaaggagggtcctctcagtgattaaggattatgaagtattaattcttccactgatatctcaaaaggtgatctggacaaaggaacaggtatctcagattcccagttctcaatcttccttcctccttacaagatacaagcaaccttcaaccttccca

SEQ ID NO: 466570 - DNA, 970 bp, Homo sapiens
cacaacagcgtcttcctctaaaaatggtttgtcttttacattttaatgcaggaaaggatccagtccgtgatgaatgtgaggaaagaaacccttttacagaaacaagggaggaagatgtaactgatgagcatggggaaagagaaccttttgctgaaaaagatgaacacacggggcagaaacgtgattatagacatactcggaagttgctgaatgtccttaaagaatacatcgcagagaagcagaaagatgatgaagcagaagaagcagaagccgcagcagcagcagcagaagccgcagcagcagcagaagccgcagcagcagcagcagaagtaatagtagtagaagacgaagaggaggaagagaaggaggaggaggaggagaaagaagaggaggaagaagaaggagaagaagaaggaggaggagaagaaggagaagaaggaggaggaggaggagaaggagaagaaacagaagaagaggaagaggaagaagaagaagaggaagaggaagaacaaattgttgaaagcatttcaagaaaaacagaagaggtggcaacaacctacaggtgttaggagctggaggctgagagagatgaagccgctacttgagcaattactaaaggctgccaaggacactaaagacaattattgcatcatttcttccagtgaagaaagtgaacttgataactagccgtgtttttaaaaagaatcgtgtcagaactcttttggaagagttggcacttcattgtctcttcaacctctgttattctgatgactgaagaaagaacttgaacctatgttatatgatacgagcacaacttgagctacagtaaactacatgacagtgttttgataattgttgtataaatcggtatagctcctctgtcacttgtctgttaaatgccagacctcgtttctatgatctgttgaatgaatcctagacacttctgaaaattagtttaaaatgtactaaa

SEQ ID NO: 466571 - DNA, 1655 bp, Homo sapiens
atccagtgggtccagaaggcaggactgctgctccacagggtctggaagcatggaatgcccctcagcagatgccaatactatgctcttggacttcctagtttccagaagtttgacggagctgtgagaagagggcaactgtcctccataccctacaatggtatattcactgactgcttgcacactgcacctggaaaagccacagacacccaacaccacaacatgaaagcagccaggagaaaggctgtaccctgcaaagtcattggggtggagctgcctaagaccatgggaactcacctcttgcaacagtgtgacctggatatgagacctggagtcaaaagagatcattttggagctttaaaatttgactggcaatgcaaagggaaaatgtggggttgtagcttccacacacggtccccactggggcctagtggagctgagagaagagggccactgccctccagaccccagaacagtagatccactgacagcttgcactgtgtacctggaaaagccacagacactcaataccagccacaaaagcggccagggcagaaagttatattctgcaaagctacaggggcagggctgtccaaggccatagtagcccaccttttgcatcagtgttctgtggatgataccagctcagccacagaaaaatggggcactgatcggattcattaggcctctgttctaggctctagctctcagacagcatttctagacactgggccaaagggaatctgcttccttgaaggaaaagacccagtcctcgcagcattatcacccattaactgaagagctcttaggctctgaataactcacagtgatacccaggtactatgttaaaggccttaggtgagcctctgacacttggtggcttcagtgcactctttgaattttcagaattatattttatttcatttgtggaaagtaccctgtattattagtttcattatttcctctacttaatttttaatattttaattttcttccaataactcttaaatttggtctattgagtctattttttagaatttgtaggcatgctccatttttaaaatttgttttgcttttgtcttttctgtgtattttcaaatagcttgtcttcaagctcattaattcttctgctcgagcaattctgctattacaagactctgatgcattcttcagtatgccagttgcattttacaactccaatattgctgcttgatttttaaaaattatttcaatgtatttgttaaattcatttgatagaattctgaatttcttctttgtgttatcttgaatttcttggaatttcctcaagacagttattttgaattctctgtctgaaaggccacatatttctatttctctaggattggtcagttgtgccttagtatattttcctggatggtcctgatatttctcgatgttcatctgtgcctgagcattgaaaagttacatatttattatagtcttttcggtctgtgcttctttgtgatcatccttcttttcaaagctttgtaggtattcaaaaggacttcagtattgtgttcttatttttttctttttcttttaaattttttttattattatactttaagttttagggtacatgtgcacaacgtgcaggtttgttacatatgtatacatgtgccatgttggtgtgctgc

SEQ ID NO: 466572 - DNA, 3267 bp, Homo sapiens
ccggaagcggcggcggcagccgaggcgacgcaccgtgaggcagctgcttgactaggccgcagccgccatggcgatgaactttggggaccatgccagcgggttccgccatgatgatgtgatcaggttcatcaacaatgaagtcctcaggaacggcggcagcccagccttttacacggccttccgctcgcggccgtggaacgaggtagaggaccggcttcgggccattgtggccgacccgcgggtgccccgtgccattaagagggcctgtacctggagcgctttggcgctgagtgtgcaagtggctgcgaggcagcaggaggagctgctgtaccaggtttggtggctgcaagggcatgtggaggagtgccaggcgacctcctgggctctaacttcccagctgcagcagctgcgcctggagcatgaggaggtggcaacacagctgcacctcacgcaggccgccctgcagcaggtgctgaatgagcgtgatgggttatgcgggaggctgctagaagttgagagatccatgcaggtctatccgatgcctcaggattttgtacccggtccagaagccggccagtatgggcctgtggccgggactttaaatgcagaacagagtgaggcggtggccacagaggcacagggaatgccacattcggaagcccaggtagcagccccaacagctgtgtattacatgcctgaaccccagagtggcagggtccagggcatgcaacctcttctgctaatgcaggcacctcatccagtcccattccatatgccttcaccaatgggactgccatactcaacacctctaccacccccagtagtaatggaatcagcagcagcaattgcaccacagatgcctcctgcagggatctatccacctggtctttgggccacagtgggatcccaggaggagacggcccctccgtgggaccagaagtgccatggccaggatggatatcctgagaatttccagggagtatatcacccaggagataacagaagctgcaaccaaaaggaaggttctgagtgtccccaaggaatgacttcccaaggggacagcagcagccacagcctgaagaaagatccagtgatgcaagagggcacagctcccccagagtttagcaggagccacagcctggagaaaaaaccagtgatgcccaaggagatggtccccctaggggacagcaacagccacagcctgaagaaagatccagttgtgcccaaggagattgtccccataggggacagcaacagccacagcctgacgaaaaatccagttgtgcacaaggagatggtctccctgggggacagcaacagccacagcatgaagaaagatccagtgatgccccagaagatggtccccctgggggacagcaacagccacagtctgaagaaagatccaatgatgtgccaggagatggtccccctgggggacagcaacagccatagcctgaagaaagatccagtggtggcccagggcacagctcccctgatgtatagcaggaggcacagccagaagaaagtgccaatgatgcccaaggagatggtccccctgggggaaagccacagccacagcctgaagaaagatctagttgtgcccaaggagttggtccccctgggggacagcaagagtcacaggatgaagaaagatccagtgatgccccagaagatggtccccctgggggacagcagaagccacagcctgaagaaagatccagtgatgccccagaacatgatccccctggaggacagcaacagccacagcctgaagaaagatccagtgatgccccagaacatgatccccctggaggacagcaacagccacagtctgaagaaagatccaatgatgcaccaggagatggtccccctgggggacagcaacagccatagcctgaagaaagatccagtggtgccccagggcacagctcccctgatgtttagcaggagacacagcctgaagaaagtgccagtgatgcccaaggagatggtccccctgggggacagccacagcctgaagaaagatccagtgatgccccagaacatggtccccctggaggacagcaacagccatagcctgaagaaagatccagtggtgccccagggcacagctcccctgacgtttagcaggagacacagcctgaagaaagtgccagtggtgccccaggggacagcctccctggggttcggcagaatccacagcctgaagaaagagttagtgatgcccgaggagatggtccccctgggggacagcaacagccacagcatgaagaaagatctagtgatgcccaaggagatggtccccctaggggacagcaacagtcacagcctgaagaaagatccagtggtgcaccaggaggtggtctccttgggggacagcaacagccacagcctgaagaaacatccagtgattccccagggcacagcctcactgaggtttagcaagagccacagccagaaggaagatcaggagaggccccaggcaacccctctggaggatagcaagagccatggtgtgaaaaatagcccatggaaacaccagcctcaggggcagaaggtcaaggaacaaaaaaggaaaaaggcctcagaatcccagcaacagaagcctgcctcatgctccagcccagtgaattgggcctgcccatggtgtaatgccatgaattttccacggaacaaggtgtgctctaaatgcaagagagtccgtatgccagttgagaatggcagcgttgacccagcgtaaactcattgatttcaggaagaaggatagctattttcctggttgcccaccagcctgcctgaaagacctggggtgtcttgaagaaaaacagtgctttggggagtgttcactacacacgctagctttcagcctcaggctgcccccatcccaagtcccttttcagtcagcagtggatgaagaacaaaatggattccaaggacaaacattgggggcaccaggttatggatggtgtttctcttgggaggataaattgggttaaaaatagagctagactggggcaagcacttttgggaataccccaggacccccacctctccctctttggtgtgttctctgcaggcttacccaaggcaactgctgcaaggcaaggaaggagccagggtggagcccaggggtggttggttagatctgccttcaatccaagctaaagatgtccttgagtttcccaatgagatcccacccagctcaccaaaatcaatgtttgtcagggattttctgggcctaactagtaataaagaatgtgcatttga

SEQ ID NO: 466573 - DNA, 1294 bp, Homo sapiens
ctcaccagatgcccagtgatccagccagcagaattgatttgttacttgatctccatgtgtatatgcaaatatttgcctgtatttattgtcatcatcatactttgggcactggccatgctacctctgtgaggaaagaagggaaaggaaaggaaaaataagaaaagaagaaaacatccatacagggtctcactctgtcaccaggctggaatgacagactgataggcagactcacatagccttcttgcctttccctgaggagttgactccaattgtcctacacattccttctctatgatatagaagccctgggtctcagcggtaatggcctgggattcaccatctcctcttgtggccacctgagacatggcttctgttcctaagcccctattaaatgttcctttcagagaaaatggatatgtcagcctctttcttccgcctctcagctccctcagacttctcttcctgtatttttgacacctttgtgattctggaaagattgctttactccacaacaatgaacacttggttctccagcgctggcttggttctgcaacttccagctcccttgaacactcatctctgccctgttgagaatgccaacggctctgctcacagcgagtggcagctccacagcacagttcacaccagaaacctggcggcatccgtggatgaaatgatctctcctcctttctctagaggtgcaatgaaattaagcaataaacaatgcatcctaaaatctgaatcttcagggtacaagaaaagaaagacacttggaaattcacactacagtaaaacccatcaatattcatggcagggaaagttcaaataagaaaatcttgaattaactttagataaatatcaagtgtgaaattcatcaaaataattggaaatcgtgaaaacctataccatgatgtgatcatggctcccagttccatggactgtctttgtcaataaaagcaagactgattctaattacctcttatattttgtcgtgctatttcattgtctgtaatgattccatttattgataaccattaatatttattgaacttttatgatgcttaatgctgtatatttgcttaggtgataatataatactgcatgtgtaaattgataaaatgtaatgtacagtgccataagtgagtaaaatagtgttgaagaggaacctgcctagaaaaacaatgtgcagggctgtgctgttcaatatggtaaccacccttatggttatttaaatttaaatataaattaattaccattaagttaaataaaagattcagtccctaagatgcatcat

SEQ ID NO: 466574 - DNA, 749 bp, Homo sapiens
agggggtgaggtcactaccagagtaccagaggatagagccgcggcacagtcctgagggatttacagctggaggggaattttacctcaggatggaccatggcccaaactttacccatccctgaattagatgagattttgaacataacgttgatgctggaatgcgttaagacttttccggcagccaggagaagaccaagacacaccagaagaattccatctgacaatgaaggcagagattggggttatgcaattgcaagccaaggaataccaaagattgctggcaaaccaccagaaactacgaagaggcaaagaaggactcccctacaggtttcagagaaaaagcaaggttctgcccactcttgtttaagacatctagcctccaagacagtgagacagtacatttctgttgttttaagctacccagtttgcggtactttgtcatggcagccctgggctctgcctccacttcaggctgccttcatctgtggttcccctccttaccccagttaagcaccaacatctagagctacacctctatttggacacctatcttgctccaacccacctcttgaattgttctagaaaagtttatcttgatttatttataatgttttgaatatatcacttcgtatagttttcttaatagttgctctaggaattacaaaatatatatatagtttaccacaacctactggtattaatattttaccactttgaataaagtgtagaagccttatttccatttatgt

SEQ ID NO: 466575 - DNA, 6408 bp, Homo sapiens
ccgtccgctgacgtagagggccggaggtggcggcggcggcggcggaagcggcagcggcagcagcggcggcggcggcggcagcggcggctgctgcggcggcggccgcggcggcggcggcggtggcggcggcggcggcggcggatgcctgcgtcccaggctcgcgggcggcaggcccgggtgagtgcacacccggcgcgcggccgggctcccggatgtgttacctggtcccgctgcagccgagatgccaggggagcggggccttccacacccctccgtgtgtgcgtgacttgtgcatcacggacaattttgctgagggagatttcactatggcggattatgccttgttagaagattgcccttacgtggacgattgtgtctttgctgctgaatttatgaccgatgattatgttcgtgtgactcagctttactgtgatggggtgggtaagcaatataaagattatgtccaaagtgagaggaatttagaatttgacatctgcagtatatggtgtagtaaaccaatttctgtcctgcaagattattgtgatgccattaaaataaacatcttctggccacttctgtttcaacatcaaaacagttctgtaatatcacgattgcatccctgtgtggacgccaacaattcacgtgcttccgagataaatttgaagagattacaacatcttgagttgatggaagatattgtggatttggcaaagaaagctgctaatgattcactccttattggaggcttattgagaattggttataaaatagaaaataaaatcttggcaatggaagaagctctgaattggataaaatatgcaggcgatgtaacaattctaactaaattaggatcaattgacaattgttggcctatgttaagtattttctttactgaatacaagtaccacataactaaaattgtaatggaagactgcaatttgcttgaagaacttaaaacccaaagttgtatggattgtatagagcaaggagaactaatgaaaatgaaaggaaatgaagagttttccaaagaaagatttgatatagctattatctattacaccagagccattgaatatagacctgaaaaccaccttctttatggtaaccgagctctttgttttcttcgtactggacagtttagaaatgcacttggtgatggaaagagagccactattctgaagaacacttggccaaagggtcattatcgttattgtgatgctctttctatgctgggggaatataactgggccctgcaagcaaacataacagctcaaaaactctgtaaaaatgaccctgagggaatcaaggatctaattcagcagcatgtaaagttacaaaaacaaatagaagacctacaaggtcgaacagcaaataagaatccaattaaagccttttatgaaaacagggcctacacacctaggagtttatcagcacctgtatttagtacttcacttaactttgtggagaaggaaagagatttcagaaaaattaatcacgaaatggctaacggtggtaatcagaatctaaaggtgatggatgaggcattgatggtagatgattgtgactgtcatcctgaattttcaccaccatcaagtcagcctccgaaacataaaggaaaacaaaaatctcgaaacaatgaatcagaaaagttcagttctagttcacaattgactttaccagcagatttgaagaacatcttggagaaacagttttctaaatcttccagaggtgcacaccaggattttgctaatataatgacaatgctgagaagcttaattcaagatggctatacagccttattggagcagcgttgccgcagtgccgcacatgcctttacagagttgctgaatggtttagatcctcaaaaaataaagcaattgaatctggccatgattaactatgtcttggttgtctatggacttgccatttcactccttggaataggacagcctgaagaactatctgaagctgaaaaccagtttaagaggattattgaacactaccacaatgagggacttgattgcttggcctactgtggaattggaaaagtatatttgaaaaaaaacagatttctagaagctctcaatcactttgagaaagcaagaaccttgatttatcgtcttcctggagtgttaacttggcccacaagtaatgtgattattgaagagtctcagccagaaaaaataaagatgctgttagagaaatttgttgaagaatgcaagttccctccagtgccagatgccatttgttgctatcagaagtgctgtggatattctaagatccagatatacataactgatccagactttaagggttttatacgcatcagctgttgccagtactgtaaaatagaatttcacatgaattgctggaagaagttaaaaaccacaacctttaatgataaaattgacaaggattttctacaaggaatatgtcttacccctgactgtgaaggtgtcatttctaagattatcatcttcagcagtggtggtcaagttaaatgtgaatttgaacacaaggtcataaaagaaaaggttcctccaagacctattctgaaacagaaatgttctagcctagagaaactaagactgaaagaagacaaaaaattgaagagaaagatccaaaaaaaagaagcaaaaaaattagcacaagaaagaatggaggaggacttaagagaaagtaatccacccaaaaacgaagagcagaaagaaactgtagacaatgttcagcattgtcagttccttgatgacagaattctacagtgtataaagcagtatgctgacaagattaaatccggcatatggaatacagccacgcttctcaaagaattactttcttggaaagttttgagcacagaggactatacaacctgtttttcaagcagaaattttctaaatgaagcagtggactatgttattcgtcacttgattcaagaaaagaacagagtaaagacaagaatatttctgcatgttttgagtgagcttaaagaagtggagcccaaattagccgcctggatccgaaaacttaatagctttggcttagatgccacaggacctttcttttctcggtatgaagcatctcttaaacagcttgattttagcatcatgactttcctctggaatgagaaatatggtcacaaactagactctatagaaggaaagcaacttgattatttctttgagccaacatcatcgaaggaagcccgctgtttaatatggctgctagaagaacacagagacaagttcccagcattacatagtgctttagatgaattctttgatataatggacagccgctgtactgtgttaaggaaacaagacagtggcgaagcaccgtttagttctaccaaggtgaaaaacaaaggcaagaaaaagaaaccaaaggattcaaagcctatgttagttgggtctggaacaacttcagtaactccaaataatgagatcatcacttcaagtgaagaccatagcaatcaaaattcagatactgcaggcccatttgcagtgcctgaccatcttcggcaagacgtagaagaatttgaagctctctatgaccaacacagtaatgaatatgttgtccgcaataagaagctatgggacatgaacccaaaacaaaaatgttcaactctatatgattacttctctcagttgttggaggaacatggtcccttggacatgagtcacaagatgttctctgaagaatatgagtttttcccagaagaaactcgaccaatactagaaaaagcaggaggtttaaaatcttttctcttgggatgtccccgttttgttgtgattgacaactgtattgcattgaagaaagttgcatcacggctcaagaaaaaaagaaagaagaaaaacattaaaacaaaagtagaagacatttcaaaagcaggagagtatttacaagttaaactaccacttaattcagctgctagggaatttaaaccagatgtaaagtctaaaccagtatcaggttcatcttcagcaccagcttctgaagatgtgaaacccaaacctttgtctgcaaattctcccaagccagcttgtgaagatgtgaaggccaaaccagtatccgataattcttctagacaagtttctgaggatgggaaacccaaagggttctcttctaattctcccaaaccaggctctgaggatgcaaattacaagcgagtctcctctaattctcccaaaccggttcttgaggatgtgaaaccaacttattgggctcaatcccatttggtcacaggatactgtacgtatcttcctttccagagatttgataacacccggacatcgccagcatacataaatgtgttaccaggtttgccccagtacaccagcatatatacacccttggtcagcctttctcctgaatatcagctaccaagatcagtaccagtggtgccgtcttttgtagccaatgacagagcagataaaaatgctactgcctattttgagggtcatcatttgaatgctgagaatgctgctggtcaccagattgcctccgaaacacagatccttgaggattcttcgttaatatctgtaaagtcacagtgcagcacaggtgatgctcatacagtcctgagtgagtctaacagaaaagatgggcactgtggaaattctaacaacaaatgtgaagtaattccagaaagcaccagtgcagtaacaaacattccacaggtgcagatggttgccatacaggtatcttggaacataacacaccaagaagtcaatactgagccatataatccttttgagaaacaacaaggggaaatttcacggattgaaaaggagtaccaagtattacaagaccaacttaaagaagcgtatgaaaattatgagcagataaaacttaagggcttagaagagaccagggacctggaagaaaagttgaaaaggcacttagaagaaaacaagatatcaaagacagaattagattggttgcttcaagatttggaaagagaaattaaaaaatggcaagaggaaaaaaaagaaatccaaaaaacactaaaatcactgaagaagaaaattaaaaaggtttcaaatgccaatgaaatgtatacccagaaaaatgatggaaacgataaggaacatgaattacatctggatcagtcccttgaaatcagcaacacacttacaaacgagaaaatgaaaatagaagagtgtataaagaaagggaaaaaggattatgaagagagtcatcagagagctgtggctgcagaggtatccgtacttgaaaactggaaggagagtgaagtgtataagctacagatcatgcagtcacaagcagaagcctatctgaagaagctggagctgattagccatgatcctgcagcatatcctgacatggagtccgatatatgttcatgggaattgtttctttctaatgttacaaaagaaactgagaaagcaaagtatcagtttgaagaacaaattaaggcaattaaaaatggttctcggctcagtgaactttctaaagtgcagatttctgagctttcatttcctgcctgtaacacggttcatcctgagttactccctgagtcttcaggccatgatgaccaagggtttatgacttccgcaagcgatgtgactggaaaccaagcagcacttcacagggatcccagtgtgttctctgccggcgattccccaggggaggctccttctgcactgttgccagggccacccccctctcagcctgaagccactcagctgccagggccaaaaggggctggccaggcagctctgtcagagcaaagccctgcggctgatcagaagcagcctgttcctccagggtgtgctgcatgttcaagccagtctccaaaaaagccattcaatagtattattgagcacctgtcagtggtattcccatgttacaacagcactgagcttgctggttttattaaaaaagtgagaagcaaaaacaagaactcactttcaggattgagtattgatgaaattgtccaaagagtgacagaacacattctagatgaacagaaaaagaaaaagccaaacccaggaaaggacaagaggacttatgagcccagctctgccgcccacgtgaccaggtcctcccagggcccacccttggcggttgttgcaccatcacccaaaaccaaggggcagaaagcagaagatgtccctgtgagggttgcactgggtgcaagttcctgtgaaatatgtcacgaggtgttcaaatcaaaaaacgtgctttgcagcagcaagtacaaaaggagaataggaatatctgtcgaatgagtgtgttttgtacataacttcagatacttgtgaacatgccttatatttgtccaacaactgtcagaataaagaacattctaaaacgagcaaaaaaaaaaaaaaaaaaaaaaaaaagaaagaaaaaagaaagagttaaaagcaaaaggtgataagttac

SEQ ID NO: 466576 - DNA, 3922 bp, Homo sapiens
tggcttttttttttttttttttttggcatgtcaaacaaaccttcaggccacagctaatcaaagagagttaattttcctgaagggaagccgtcggatagtccaacaagacatgtgagatggctcccattcaaaaagctctgtccccaaggaatgtgctgagcaagtcagatactcactccaaaaaacctgaaatgggaattatatgggcaattgaggttgccaggtacaggggcctcctgggtgctcttttgcggggaacgctgcctggacactcctgcgtcggtgactatttacctgcagtccagcatcgaacagtggctgtgaggtggagaaaaggtggggaatggaggctgagaaagcagcaggtagggcaagaaggagccaaacccacaggagcagaggctaataacagtcaacctcctacactccatggccacacaacagaagagacagaatttaggatacagagttacatgcagataaatctcactattatactgagtgagaaaacaagtagcacagaattatgtaccaaatagttactcaattgtgccaagcagtacttggatatatacatagacatttaattcacaggccccaaaacagaacctgagaagataaaagcaaagtttgtcctccccaacaatatcaatagaagttgaagcacatttgacaaattataacattcattcatgataaaaaaatttcagcaaaccataaataaaaaggaactttaccaacttgataaaaagcatctatagaaaacctgcatataacatcaggcttagggaaatgccagttaaaacccaggaaataccactttaccacctaaaatggttaaagtaaagggacattaacacattttagtgaggatgtggagaaattagaatcctcatacactgctggtggagcagccattttggaaaacagtctgatagttccccaaacagttaagcagagttaccatatgaccccaaaattccactcatatgtatacacccatgacaagtaaaacatgtgtacacacaaaaacttgtataataatcatagtgtcattaatcacaataatataaaagtggaaacaacccataagtacatcaacttatggatggattaatgaaatgtgatatatccatacaatggaatattattcagcaataaaaagaaatgaaataatgatacatgctgcaacatggatgaaatttgaaagcagtatgctaagtaaaagaagccagacacaaaggacaacatatggtatgattctacttgcacaaaaaatccacaataggcaaatctataaagaaaaaagatttatggttacctagggctgagtttaccaaagagaaccagggaaagaaacagtaaagaagatttctcctgggatcagaacaaacctcaaagactttcgctaaaaaccacatttccaaagggactgaaatttaaatggatcaggctacagaacaatgtatactctaaggcattgtgaaaacaaagagctctatcagcaggcaattagtgagcctaaaaaggtgtgatcatagaaaaagatagtcaaagatagccctactaaaaccactgtcatctcaggatgactgtgcacatgctgaagttcatgtgcacatgctcaagttcaagaacaacatcaggggctttctgctagggggtgggggacaacttcaataaaatagtctagccaagtcactaaacaaacaagcaagcaacaccaacatgaggaggtgtggagggggcggcgtgtgcgggatcgtggaggtggggccgaggcagcggccgcctgagccccgctcggccttgggaacacgggggcggggcggccgcggctctgggcgacccgctgggtgcactagtgctcgggtcccaccgccctgaggctcgcgctcgagcgggtcagtcggtcggcggggcctgcgcggggcccgggcccatggcggcgtcggcggctctgtctgcagcggcggctgcggcggccctgtctggcctggcggtgcggctgtcgcgctcagctgcggcccgaggctcgtacggcgccttctgcaaggggctcacgcgcacgctgctcaccttcttcgacctggcctggcggctgcgcatgaacttcccctacttctacatcgtggcctcggtgatgcttaacgtccgcctgcaggtgcggatcgagtgagcgccggcggcggcggcggcgaaggcccggctgaaggggcgcccgtgtccccgcccgcccccggccgggtcgccggcatgaaggaaagctgggccgcggcggggggcggaggcggggcggctcggacccctggactctagacctacgccgccagggcacgacggcccagccctggccccggctgcggtctcagcccgggggccctggatcgcgcagaaacgcactgaatgggcccctgccatcgggctccagaaactacctgggctcggccgacctgttgcctcatattggccaaagagggggaaaccagaaggagggaattctgctgcggcgacttgactttccaggcccggagcagaaaggcattggcatttgtaggcggtgacccgccccttctctggccttgccaagagtcacatccctgcccaggggcacctctggccctggaacttgcctgggcagaggcagcgtgaagggcctgaacaagaggagaagaagggccttcctagtagaggcacagcatggacaaaggctcacaggggtgggggtgcccagtgatcgagtcctggcttgggaaggaaggtctgagttccctgggaactgaaatctgctagcagcactgtgagagaggtgtatttccccctcctaatgacagaggaaactgaggcttcagggaggggtggatttgcccttgacatgcagataggaggaggaggaactgcgtgtgcccctgggcctgcaggcccccacacccctccccagtcttcttcaagacctggcatggtgggaggagggagggggaagtggagaggggagcatagggctcctggggcaccaagggagagaggggcccaggggtagggaatctaggaatgtcgctttccttggagcagtacggaaagtcacagggaagatcaggaggacggacagctgagatgggagacaggagagatgagccccaggacccctggggagccaagctgtcccccacatcctagcctctcaccccacctggagcttcaccaagggctcctcagcagtgaagtggcacaagcctcccagtttggtgggcaagtgggggtgatcttggtgttgtggctcctggagacacgacataaccaggagggtgaagggataaacctggggtgggctggggctgagacccatggcatgaccccaattctctctcctcaagctcgaccccccatccccaggatcacacaggagaatctcatcctcacggcttggattgctcctgggggccccctggtgtgctgctaactggtgtacaatgctcaggagcagcccagaggggagccgggaagggaccctcgcccttaccatctatccccatttccgcatctcttgcactggtaccccgggcgccacgttctcagttcctgggactgaaaactgcagcagtctggccagctccagggacagagtggcccagccacctactatgtaccctcctcagctgcccactggactcaggtcctgaatgaagctgtccgcctgccttggcctcccaaagtgccgagattgcagcctctgcccggccgccaccccgtctgggaagtgaggagcgtctctgcctggccgcccatcgtctgggacgtgaggagcccctctgcctggctgctcagtctggaacgtgaggagcgtctctgcccgccgccatcccatctaggaagtgaggagcgcctcttcccgccgccatcctatctaggaagtgaggtctca

SEQ ID NO: 466577 - DNA, 5520 bp, Homo sapiens
gcctaacctccactgttacctgacttcaaagcttcaaaggataggccgactctcttattagagttgaagccaatgcttatttaccattccaaaaatcctggggcctttaaaaactatgctaaatctactctgcctgtgctctataaatggaaggacagaacttggatgacagcacatctgtttacagtatggtttactgactattttaagcccactgttgagactttctgctcagaaaccagagagattcctttcaaaatattactgctcattaacaatgcatctagtcacccgagagctctgatggaaatgtacaaggatattaatgttgttttcatgcctgtcaacacgtccattctgctgcctatgaatcaaggaaaattaccacagccactccaaccttcagcaagtaccaccctgatcagtcagcagccatccacatggaggcaagaccctacaccagcaaaaaaattaccactagatgaagcctcagatgatcattagcattttctagcaataaagtatttttaaattaaggtattccctgttgtctcattggcggctttctgagcagctgcaaaatatgtttttaacttttaagtggaagttgggggtcactggcatcgagtctggaacagtcattctcagcaagagctctttgaactctgacattctctagttttacggactcggaaatgaaagctcattagcatctacactgaagacgctcctgttcttcacagctttaatgatcactgttcctattgggttatatttcacaactaaatcttacatatttgaaggcgcccttgggatgtccaatagggacagctatttttacgctgctattgttgcagtggtcgccgtccatgtggtgctggccctctttgtgtatgtggcctggaatgaaggctcacgacagtggcgtgaaggcaaacaggattaaagtgaacatcacctttttatagcattaaattcattttttaaaatgataaatgctggagggggccatctgatttgaataaagttgaaagaacatgttaaagtcagtcttaaggagtcacgtttgagtatgtaaattttgatctttctaatatgttggtttgtatattcagttttaactgtatgaatctgatttgcaaatgagaatttggaaaagttaaattagttacaaagaaatatgttaatttaattagacaatactctggaaggaattttatcttctttcaacaaaacatgttttatagtattctgacttacggttgcttttgagttttactcatttggatatattaagatgcacacagtgaagcaaattaaactccactttacgctggaatgctttctttagcatgaaaataccaggtccttggatttgggattttaatttcctatggaaagttgcttaaattgtggacactggaattaatctgaatgtcactgaggaatttcacatgaagtgtaatccctagtcaataagaattatccattacattattttatgggaaaactaggctaaattacatccattcaggtaaaaggaccttagcttactgaaggatctaaagagcaaagcaaagatctcactactcaaacactcagcctgcttccttcaagtccccttgcaggccagctttgtgctttgcagaccaactttttaatgagatactttgcttcctcattcaacattgaagctaggcttcaattaaaaggttcgaggaagctccatttaaaattgttttttttactattttttaaaattgtagtgtatatgataggaatttgcatttaaatatgttcatttttgcatatgttaggagtggaaacaatctggaaaacatttttttttcatccaaaaagtattctccttgggcatatctgatggaaaaaaaccttgattttattttcgtatctttagtctgtgttctttctagttatttggtactaattatgtgcaatctaaaaacactcccacaagtatttgttttttaattataaaatcatagtatatgttctttgtagaaaactggaaaaatacatattcaaacaggaaaaaaaatcaaaattccccataatgttgccatctaaaaataacctctattttagttgatatcccgtattcatttttgaaagccattccttaatgctagtttgatacacactaaaagtttagcttacaagttcaaattctgccagcttttcctgacagctatttgcatttttttcagatgagtgattattggccattttctttttctttttctttattttatttatttatttttttgagacagagttttgctctgttgcccaggctggagtgcagtggtgcaatctcggctcactgcaacctctgcctcctgggttcaagtgattctccacctcagcctcccaagtagctgggactacggatgcctgccaccacgcctggctaatttttttttgtatttttttgtagagacggggtttcaccatgttgtccaggctaatcttgaacttgtgacctcaggtgatccacccgcctcggcctccgaaagtgctgggattacaggcgtgagctaccacgcccggccttattgaccattttctaaataagcacattctatctttattctcttaaaattcaaattttctgttactgataatcctaatactaggattcttgcttaagtatgtgaaaccattaccgatttgttgttcacatttattttttatgttgtgaaactggactaaaggaatagagggatgattagtcataaaagtcaaatagcatttgtgtttaactgttgagaaaagtgaaagatcggtatgattattatggaactgtttttaattcttgcttaaagactacaattttagtataatgacatttgagtctagggtagtatgtggtagatttctagatggtccctaattaagaagtattgttgtatttagaattgtccacctaatttctttttatataatgccaaggtatttcttgtgcttttgggatcttatgctgtttgtaaaatgttactgtccaatgttggattattgttttggtttcaggcatttgctgaataggtgatgatacatgggtatttttctgcaagtatttaaaccaggggcatatgcaaaggcagttgtaatttcctcttggaaaaagcgccaaatgtttgaaggttaaaatcaaatgctagggttgatatttaggcttataacaaaataggcttgttttcaaagcagttttttcctagagttttaactgttaactcactagtttgctgctgtttttaactatgttaaataacatatggtatttggcaaatagatttatttttcaaaatgtctcactagtttccttttacacaatgtatatacttcaagatgtatagaaaggaaagctacagttgagcccttatacatgttttaaggtagaaatatgttccctattgtttgaaaactgattgtaagaataacctcagttaggagatataacttgaagtgtcagtccaaactactgatttaaccctatttacggtaacacattaccttcctcacctcctgtttggccctggagaatgtagtcctttttctcatttgtgttgagaaatgaaaagtctgctgtagaatgtatctgatgtcattagttcttcaaatggataccattgtacatataacagtagaatttggtttggggttgttagtgaaaaaaaatttaaacctgccattaaaaatccccatgtttcatggaaatctaacagaaatacattgtaataattagaacattttgttttcttttttcttttttttttttcgagacggagttttgcccttcttgcccaggctggagtgcaagggcgcaatctcggctcgctgcaacctccgcctcccgggttcaagcagttctcctgcctcagccccctgagtacctcagatgacaggtgcgtgccaccacacccggctaatttttgtatttttagtagagacggggtttcaccatgttagccaggctagtctcgaactcctgacctcaggtgatccacccgcctccgcctcccaaagtgctgggattacaggtatcagccaccgtgcctggcctaataattggaacattttcatcatgaaaatgtcatcagctttgccaaaagaaacaaccaattgacttgtttggcgtttgttttccattttcatgtcaattttatgtatacagttagaatacccaaggagaccactaaaatcagttaaacaagtagggtatatacaaagaaagatgaaacccgaaagtacataaaaaggatttaaatccgattttagatgtacctagtgtgtatttcttatctctagacaagttcatgtttattgtttaatttatgcccaagtgaagttgtaaacttatggttcaactctgacacagaatttgtcacttgtctgaggtcagtggcaggtttctctgctgtcaagcactctgtgtcacccaccagattagtataactattaattcagactgtactcctatgtttaagataatttttacaagagctggctgaagcagcacattagtaacctgacaagatttctttttcccttttcagggggaaagggtcaccttaaaaataaattattttcagggactttgggaatctaatgataaatattacacataatctatgaatagcttaatcctttatatattccttaaaataggaattcctcgacatcactcctggccacactttccttgcctgtgttgttgctatgtgtatttgaaagtaatatctgcattccttttaagatgttctgtaagtcatatttgtcagttatacagagtagtcttccttttccccacgttcagtgtaatctcactgaacagtaataatagcaatagctaacaacatctgcacagcaccttacagtttgcaaagaacgttcacacattctcatttgagttttgcatagtgaacctgttacgagatgtctcttgacgtcgatgctaaaagtgttagaatctttacatcactagagtcattgaatatgctgtagtattgaatagtgccctgactagggggaggatttggatgtgctgcatttcaagccgtgtataatcatcaaaatggggggcttgagttctttagctacttgaatccgatttacttctgttaagtgatgcttttctaaccgttttctggatggattttgtattcactatattgtagcttgtaatttgtataaatgtaccatctgatgtcattaaaaaaagtgtttgtagtgctactttgctgtgtcctgattcaattaatgttttattaaccgctgtgtttttaaaaatttgtttgcctgcttctcattttataacatgtagaatatgtacagagctcactttaaaaaatttgttcgttggcctctgtttgtgctatgtagattatatagagagctgtcaaggataagtttttatgcagtaaatgtcaaccagaaatgctcaaactgattgggagtgtgggggaggggtgttgagctgtaaagggctggttatacttc

SEQ ID NO: 466578 - DNA, 4674 bp, Homo sapiens
gagcgcggccgccgagcccagctccgccgccgagcgcctgtgccggcacggctacaccatggagcgcccggataaggcggcgctgaacgcactgcagcctcctgagttcagaaatgaaagctcattagcatctacactgaagacgctcctgttcttcacagctttaatgatcactgttcctattgggttatatttcacaactaaatcttacatatttgaaggcgcccttgggatgtccaatagggacagctatttttacgctgctattgttgcagtggtcgccgtccatgtggtgctggccctctttgtgtatgtggcctggaatgaaggctcacgacagtggcgtgaaggcaaacaggattaaagtgaacatcacctttttatagcattaaattcattttttaaaatgataaatgctggagggggccatctgatttgaataaagttgaaagaacatgttaaagtcagtcttaaggagtcacgtttgagtatgtaaattttgatctttctaatatgttggtttgtatattcagttttaactgtatgaatctgatttgcaaatgagaatttggaaaagttaaattagttacaaagaaatatgttaatttaattagacaatactctggaaggaattttatcttctttcaacaaaacatgttttatagtattctgacttacggttgcttttgagttttactcatttggatatattaagatgcacacagtgaagcaaattaaactccactttacgctggaatgctttctttagcatgaaaataccaggtccttggatttgggattttaatttcctatggaaagttgcttaaattgtggacactggaattaatctgaatgtcactgaggaatttcacatgaagtgtaatccctagtcaataagaattatccattacattattttatgggaaaactaggctaaattacatccattcaggtaaaaggaccttagcttactgaaggatctaaagagcaaagcaaagatctcactactcaaacactcagcctgcttccttcaagtccccttgcaggccagctttgtgctttgcagaccaactttttaatgagatactttgcttcctcattcaacattgaagctaggcttcaattaaaaggttcgaggaagctccatttaaaattgttttttttactattttttaaaattgtagtgtatatgataggaatttgcatttaaatatgttcatttttgcatatgttaggagtggaaacaatctggaaaacatttttttttcatccaaaaagtattctccttgggcatatctgatggaaaaaaaccttgattttattttcgtatctttagtctgtgttctttctagttatttggtactaattatgtgcaatctaaaaacactcccacaagtatttgttttttaattataaaatcatagtatatgttctttgtagaaaactggaaaaatacatattcaaacaggaaaaaaaatcaaaattccccataatgttgccatctaaaaataacctctattttagttgatatcccgtattcatttttgaaagccattccttaatgctagtttgatacacactaaaagtttagcttacaagttcaaattctgccagcttttcctgacagctatttgcatttttttcagatgagtgattattggccattttctttttctttttctttattttatttatttatttttttgagacagagttttgctctgttgcccaggctggagtgcagtggtgcaatctcggctcactgcaacctctgcctcctgggttcaagtgattctccacctcagcctcccaagtagctgggactacggatgcctgccaccacgcctggctaatttttttttgtatttttttgtagagacggggtttcaccatgttgtccaggctaatcttgaacttgtgacctcaggtgatccacccgcctcggcctccgaaagtgctgggattacaggcgtgagctaccacgcccggccttattgaccattttctaaataagcacattctatctttattctcttaaaattcaaattttctgttactgataatcctaatactaggattcttgcttaagtatgtgaaaccattaccgatttgttgttcacatttattttttatgttgtgaaactggactaaaggaatagagggatgattagtcataaaagtcaaatagcatttgtgtttaactgttgagaaaagtgaaagatcggtatgattattatggaactgtttttaattcttgcttaaagactacaattttagtataatgacatttgagtctagggtagtatgtggtagatttctagatggtccctaattaagaagtattgttgtatttagaattgtccacctaatttctttttatataatgccaaggtatttcttgtgcttttgggatcttatgctgtttgtaaaatgttactgtccaatgttggattattgttttggtttcaggcatttgctgaataggtgatgatacatgggtatttttctgcaagtatttaaaccaggggcatatgcaaaggcagttgtaatttcctcttggaaaaagcgccaaatgtttgaaggttaaaatcaaatgctagggttgatatttaggcttataacaaaataggcttgttttcaaagcagttttttcctagagttttaactgttaactcactagtttgctgctgtttttaactatgttaaataacatatggtatttggcaaatagatttatttttcaaaatgtctcactagtttccttttacacaatgtatatacttcaagatgtatagaaaggaaagctacagttgagcccttatacatgttttaaggtagaaatatgttccctattgtttgaaaactgattgtaagaataacctcagttaggagatataacttgaagtgtcagtccaaactactgatttaaccctatttacggtaacacattaccttcctcacctcctgtttggccctggagaatgtagtcctttttctcatttgtgttgagaaatgaaaagtctgctgtagaatgtatctgatgtcattagttcttcaaatggataccattgtacatataacagtagaatttggtttggggttgttagtgaaaaaaaatttaaacctgccattaaaaatccccatgtttcatggaaatctaacagaaatacattgtaataattagaacattttgttttcttttttcttttttttttttcgagacggagttttgcccttcttgcccaggctggagtgcaagggcgcaatctcggctcgctgcaacctccgcctcccgggttcaagcagttctcctgcctcagccccctgagtacctcagatgacaggtgcgtgccaccacacccggctaatttttgtatttttagtagagacggggtttcaccatgttagccaggctagtctcgaactcctgacctcaggtgatccacccgcctccgcctcccaaagtgctgggattacaggtatcagccaccgtgcctggcctaataattggaacattttcatcatgaaaatgtcatcagctttgccaaaagaaacaaccaattgacttgtttggcgtttgttttccattttcatgtcaattttatgtatacagttagaatacccaaggagaccactaaaatcagttaaacaagtagggtatatacaaagaaagatgaaacccgaaagtacataaaaaggatttaaatccgattttagatgtacctagtgtgtatttcttatctctagacaagttcatgtttattgtttaatttatgcccaagtgaagttgtaaacttatggttcaactctgacacagaatttgtcacttgtctgaggtcagtggcaggtttctctgctgtcaagcactctgtgtcacccaccagattagtataactattaattcagactgtactcctatgtttaagataatttttacaagagctggctgaagcagcacattagtaacctgacaagatttctttttcccttttcagggggaaagggtcaccttaaaaataaattattttcagggactttgggaatctaatgataaatattacacataatctatgaatagcttaatcctttatatattccttaaaataggaattcctcgacatcactcctggccacactttccttgcctgtgttgttgctatgtgtatttgaaagtaatatctgcattccttttaagatgttctgtaagtcatatttgtcagttatacagagtagtcttccttttccccacgttcagtgtaatctcactgaacagtaataatagcaatagctaacaacatctgcacagcaccttacagtttgcaaagaacgttcacacattctcatttgagttttgcatagtgaacctgttacgagatgtctcttgacgtcgatgctaaaagtgttagaatctttacatcactagagtcattgaatatgctgtagtattgaatagtgccctgactagggggaggatttggatgtgctgcatttcaagccgtgtataatcatcaaaatggggggcttgagttctttagctacttgaatccgatttacttctgttaagtgatgcttttctaaccgttttctggatggattttgtattcactatattgtagcttgtaatttgtataaatgtaccatctgatgtcattaaaaaaagtgtttgtagtgcta

SEQ ID NO: 466579 - DNA, 5256 bp, Homo sapiens
gcctaacctccactgttacctgacttcaaagcttcaaaggataggccgactctcttattagagttgaagccaatgcttatttaccattccaaaaatcctggggcctttaaaaactatgctaaatctactctgcctgtgctctataaatggaaggacagaacttggatgacagcacatctgtttacagtatggtttactgactattttaagcccactgttgagactttctgctcagaaaccagagagattcctttcaaaatattactgctcattaacaatgcatctagtcacccgagagctctgatggaaatgtacaaggatattaatgttgttttcatgcctgtcaacacgtccattctgctgcctatgaatcaaggaaaattaccacagccactccaaccttcagcaagtaccaccctgatcagtcagcagccatccacatggaggcaagaccctacaccagcaaaaaaattaccactagatgaagcctcagatgatcattagcattttctagcaataaagtatttttaaattaaggtattccctgttgtctcattggcggctttctgagcagctgcaaaatatgtttttaacttttaagtggaagttgggggtcactggcatcgagtctggaacagtcattctcagcaagagctctttgaactctgacattctctagttttacggactcggaaatgaaagctcattagcatctacactgaagacgctcctgttcttcacagctttaatgatcactgttcctattgggttatatttcacaactaaatcttacatatttgaaggcgcccttgggatgtccaatagggacagctatttttacgctgctattgttgcagtggtcgccgtccatgtggtgctggccctctttgtgtatgtggcctggaatgaaggctcacgacagtggcgtgaaggcaaacaggattaaagtgaacatcacctttttatagcattaaattcattttttaaaatgataaatgctggagggggccatctgatttgaataaagttgaaagaacatgttaaagtcagtcttaaggagtcacgtttgagtatgtaaattttgatctttctaatatgttggtttgtatattcagttttaactgtatgaatctgatttgcaaatgagaatttggaaaagttaaattagttacaaagaaatatgttaatttaattagacaatactctggaaggaattttatcttctttcaacaaaacatgttttatagtattctgacttacggttgcttttgagttttactcatttggatatattaagatgcacacagtgaagcaaattaaactccactttacgctggaatgctttctttagcatgaaaataccaggtccttggatttgggattttaatttcctatggaaagttgcttaaattgtggacactggaattaatctgaatgtcactgaggaatttcacatgaagtgtaatccctagtcaataagaattatccattacattattttatgggaaaactaggctaaattacatccattcaggtaaaaggaccttagcttactgaaggatctaaagagcaaagcaaagatctcactactcaaacactcagcctgcttccttcaagtccccttgcaggccagctttgtgctttgcagaccaactttttaatgagatactttgcttcctcattcaacattgaagctaggcttcaattaaaaggttcgaggaagctccatttaaaattgttttttttactattttttaaaattgtagtgtatatgataggaatttgcatttaaatatgttcatttttgcatatgttaggagtggaaacaatctggaaaacatttttttttcatccaaaaagtattctccttgggcatatctgatggaaaaaaaccttgattttattttcgtatctttagtctgtgttctttctagttatttggtactaattatgtgcaatctaaaaacactcccacaagtatttgttttttaattataaaatcatagtatatgttctttgtagaaaactggaaaaatacatattcaaacaggaaaaaaaatcaaaattccccataatgttgccatctaaaaataacctctattttagttgatatcccgtattcatttttgaaagccattccttaatgctagtttgatacacactaaaagtttagcttacaagttcaaattctgccagcttttcctgacagctatttgcatttttttcagatgagtgattattggccattttctttttctttttctttattttatttatttatttttttgagacagagttttgctctgttgcccaggctggagtgcagtggtgcaatctcggctcactgcaacctctgcctcctgggttcaagtgattctccacctcagcctcccaagtagctgggactacggatgcctgccaccacgcctggctaatttttttttgtatttttttgtagagacggggtttcaccatgttgtccaggctaatcttgaacttgtgacctcaggtgatccacccgcctcggcctccgaaagtgctgggattacaggcgtgagctaccacgcccggccttattgaccattttctaaataagcacattctatctttattctcttaaaattcaaattttctgttactgataatcctaatactaggattcttgcttaagtatgtgaaaccattaccgatttgttgttcacatttattttttatgttgtgaaactggactaaaggaatagagggatgattagtcataaaagtcaaatagcatttgtgtttaactgttgagaaaagtgaaagatcggtatgattattatggaactgtttttaattcttgcttaaagactacaattttagtataatgacatttgagtctagggtagtatgtggtagatttctagatggtccctaattaagaagtattgttgtatttagaattgtccacctaatttctttttatataatgccaaggtatttcttgtgcttttgggatcttatgctgtttgtaaaatgttactgtccaatgttggattattgttttggtttcaggcatttgctgaataggtgatgatacatgggtatttttctgcaagtatttaaaccaggggcatatgcaaaggcagttgtaatttcctcttggaaaaagcgccaaatgtttgaaggttaaaatcaaatgctagggttgatatttaggcttataacaaaataggcttgttttcaaagcagttttttcctagagttttaactgttaactcactagtttgctgctgtttttaactatgttaaataacatatggtatttggcaaatagatttatttttcaaaatgtctcactagtttccttttacacaatgtatatacttcaagatgtatagaaaggaaagctacagttgagcccttatacatgttttaaggtagaaatatgttccctattgtttgaaaactgattgtaagaataacctcagttaggagatataacttgaagtgtcagtccaaactactgatttaaccctatttacggtaacacattaccttcctcacctcctgtttggccctggagaatgtagtcctttttctcatttgtgttgagaaatgaaaagtctgctgtagaatgtatctgatgtcattagttcttcaaatggataccattgtacatataacagtagaatttggtttggggttgttagtgaaaaaaaatttaaacctgccattaaaaatccccatgtttcatggaaatctaacagaaatacattgtaataattagaacattttgttttcttttttcttttttttttttcgagacggagttttgcccttcttgcccaggctggagtgcaagggcgcaatctcggctcgctgcaacctccgcctcccgggttcaagcagttctcctgcctcagccccctgagtacctcagatgacaggtgcgtgccaccacacccggctaatttttgtatttttagtagagacggggtttcaccatgttagccaggctagtctcgaactcctgacctcaggtgatccacccgcctccgcctcccaaagtgctgggattacaggtatcagccaccgtgcctggcctaataattggaacattttcatcatgaaaatgtcatcagctttgccaaaagaaacaaccaattgacttgtttggcgtttgttttccattttcatgtcaattttatgtatacagttagaatacccaaggagaccactaaaatcagttaaacaagtagggtatatacaaagaaagatgaaacccgaaagtacataaaaaggatttaaatccgattttagatgtacctagtgtgtatttcttatctctagacaagttcatgtttattgtttaatttatgcccaagtgaagttgtaaacttatggttcaactctgacacagaatttgtcacttgtctgaggtcagtggcaggtttctctgctgtcaagcactctgtgtcacccaccagattagtataactattaattcagactgtactcctatgtttaagataatttttacaagagctggctgaagcagcacattagtaacctgacaagatttctttttcccttttcagggggaaagggtcaccttaaaaataaattattttcagggactttgggaatctaatgataaatattacacataatctatgaatagcttaatcctttatatattccttaaaataggaattcctcgacatcactcctggccacactttccttgcctgtgttgttgctatgtgtatttgaaagtaatatctgcattccttttaagatgttctgtaagtcatatttgtcagttatacagagtagtcttccttttccccacgttcagtgtaatctcactgaacagtaataatagcaatagctaacaacatctgcacagcaccttacagtttgcaaagaacgttcacacattctcatttgagttttgcatagtgaacctgttacgagatgtctcttgacgtcgatgctaaaagtgttagaatctttacatcactagagtcattgaatatgctgtagtattgaatagtgccctgactagggggaggatttggatgtgctgcatttcaagccgtgtataatcatcaaaatggggggcttgagttctttagctacttgaatccgatttacttctgttaagtgatgcttttctaaccgttttctggatggattttgtattcactatattgtagcttgtaatttgtataaatgtaccatctgatgtcattaaaaaaagtgtttgtagtgcta

SEQ ID NO: 466580 - DNA, 663 bp, Homo sapiens
gagcggccgctcgcgatctaggactttgggaatctaatgataaatattacacataatctatgaatagcttaatcctttatatattccttaaaataggaattcctcgacatcactcctggccacactttccttgcctgtgttgttgctatgtgtatttgaaagtaatatctgcattccttttaagatgttctgtaagtcatatttgtcagttatacagagtagtcttccttttccccacgttcagtgtaatctcactgaacagtaataatagcaatagctaacaacatctgcacagcaccttacagtttgcaaagaacgttcacacattctcatttgagttttgcatagtgaacctgttacgagatgtctcttgacgtcgatgctaaaagtgttagaatctttacatcactagagtcattgaatatgctgtagtattgaatagtgccctgactagggggaggatttggatgtgctgcatttcaagccgtgtataatcatcaaaatggggggcttgagttctttagctacttgaatccgatttacttctgttaagtgatgcttttctaaccgttttctggatggattttgtattcactatattgtagcttgtaatttgtataaatgtaccatctgatgtcattaaaaaaagtgtttgtagtgcta

SEQ ID NO: 466581 - DNA, 2754 bp, Homo sapiens
  misc_feature (2711)..(2711): n is a, c, g, or t
  misc_feature (2721)..(2721): n is a, c, g, or t
gagcgcggccgccgagcccagctccgccgccgagcgcctgtgccggcacggctacaccatggagcgcccggataaggcggcgctgaacgcactgcagcctcctgagttcagaaatgaaagctcattagcatctacactgaagacgctcctgttcttcacagctttaatgatcactgttcctattgggttatatttcacaactaaatcttacatatttgaaggcgcccttgggatgtccaatagggacagctatttttacgctgctattgttgcagtggtcgccgtccatgtggtgctggccctctttgtgtatgtggcctggaatgaaggctcacgacagtggcgtgaaggcaaacaggattaaagtgaacatcacctttttatagcattaaattcattttttaaaatgataaatgctggagggggccatctgatttgaataaagttgaaagaacatgttaaagtcagtcttaaggagtcacgtttgagtatgtaaattttgatctttctaatatgttggtttgtatattcagttttaactgtatgaatctgatttgcaaatgagaatttggaaaagttaaattagttacaaagaaatatgttaatttaattagacaatactctggaaggaattttatcttctttcaacaaaacatgttttatagtattctgacttacggttgcttttgagttttactcatttggatatattaagatgcacacagtgaagcaaattaaactccactttacgctggaatgctttctttagcatgaaaataccaggtccttggatttgggattttaatttcctatggaaagttgcttaaattgtggacactggaattaatctgaatgtcactgaggaatttcacatgaagtgtaatccctagtcaataagaattatccattacattattttatgggaaaactaggctaaattacatccattcaggtaaaaggaccttagcttactgaaggatctaaagagcaaagcaaagatctcactactcaaacactcagcctgcttccttcaagtccccttgcaggccagctttgtgctttgcagaccaactttttaatgagatactttgcttcctcattcaacattgaagctaggcttcaattaaaaggttcgaggaagctccatttaaaattgttttttttactattttttaaaattgtagtgtatatgataggaatttgcatttaaatatgttcatttttgcatatgttaggagtggaaacaatctggaaaacatttttttttcatccaaaaagtattctccttgggcatatctgatggaaaaaaaccttgattttattttcgtatctttagtctgtgttctttctagttatttggtactaattatgtgcaatctaaaaacactcccacaagtatttgttttttaattataaaatcatagtatatgttctttgtagaaaactggaaaaatacatattcaaacaggaaaaaaaatcaaaattccccataatgttgccatctaaaaataacctctattttagttgatatcccgtattcatttttgaaagccattccttaatgctagtttgatacacactaaaagtttagcttacaagttcaaattctgccagcttttcctgacagctatttgcatttttttcagatgagtgattattggccattttctttttctttttctttattttatttatttatttttttgagacagagttttgctctgttgcccaggctggagtgcagtggtgcaatctcggctcactgcaacctctgcctcctgggttcaagtgattctccacctcagcctcccaagtagctgggactacggatgcctgccaccacgcctggctaatttttttttgtatttttttgtagagacggggtttcaccatgttgtccaggctaatcttgaacttgtgacctcaggtgatccacccgcctcggcctccgaaagtgctgggattacaggcgtgagctaccacgcccggccttattgaccattttctaaataagcacattctatctttattctcttaaaattcaaattttctgttactgataatcctaatactaggattcttgcttaagtatgtgaaaccattaccgatttgttgttcacatttattttttatgttgtgaaactggactaaaggaatagagggatgattagtcataaaagtcaaatagcatttgtgtttaactgttgagaaaagtgaaagatcggtatgattattatggaactgtttttaattcttgcttaaagactacaattttagtataatgacatttgagtctagggtagtatgtggtagatttctagatggtccctaattaagaagtattgttgtatttagaattgtccacctaatttctttttatataatgccaaggtatttcttgtgcttttgggatcttatgctgtttgtaaaatgttactgtccaatgttggattattgttttggtttcaggcatttgctgaataggtgatgatacatgggtatttttctgcaagtatttaaaccaggggcatatgcaaaggcagttgtaatttcctcttggaaaaagcgccaaatgtttgaaggttaaaatcaaatgctagggttgatatttaggcttataacaaaataggcttgttttcaaagcagttttttcctagagttttaactgttaactcactagtttgctgctgtttttaactatgttactgtcnaatgttggantattgttttgactactcctgagatcctgtagag

SEQ ID NO: 466582 - DNA, 896 bp, Homo sapiens
ttgatgttcactcttcccctcactcatgagaggccttctgccatcttggtccccagacccggccttgccactcagtgtccctaccactcgagaccctggctccaaaacgccactcatcccacagcctcctgagttcagaaatgaaagctcattagcatctacactgaagacgctcctgttcttcacagctttaatgatcactgttcctattgggttatatttcacaactaaatcttacatatttgaaggcgcccttgggatgtccaatagggacagctatttttacgctgctattgttgcagtggtcgccgtccatgtggtgctggccctctttgtgtatgtggcctggaatgaaggctcacgacagtggcgtgaaggcaaacaggattaaagtgaacatcacctttttatagcattaaattcattttttaaaatgataaatgctggagggggccatctgatttgaataaagttgaaagaacatgttaaagtcaaaaaaaaaaaaaaaaaactcagacgcctcggtggccgagaattacgggcactgaaggcgcgcgagacgggatggggctggctgcggctggggcggagccggcgggggcaacgcgggaagggcgcgccggcgaacctccgggtccccggcccggatccccggtccccagatggctccttaaggcccctggccggcgtccccgggcaggagcggggctatggcggccacccggggcgcctgggccggggaccgtggtggtgcccgtcgacggatagaaggacggttgggagacaccgcgagggggacccgcaagggcccgggaagccccgggggggagaaaaaagcgggagcgcgcgggataaaacggaaagcctgaagggagcctggagcatcgttagtaggg

SEQ ID NO: 466583 - DNA, 4701 bp, Homo sapiens
ttgatgttcactcttcccctcactcatgagaggccttctgccatcttggtccccagacccggccttgccactcagtgtccctaccactcgagaccctggctccaaaacgccactcatcccacagcctcctgagttcagaaatgaaagctcattagcatctacactgaagacgctcctgttcttcacagctttaatgatcactgttcctattgggttatatttcacaactaaatcttacatatttgaaggcgcccttgggatgtccaatagggacagctatttttacgctgctattgttgcagtggtcgccgtccatgtggtgctggccctctttgtgtatgtggcctggaatgaaggctcacgacagtggcgtgaaggcaaacaggattaaagtgaacatcacctttttatagcattaaattcattttttaaaatgataaatgctggagggggccatctgatttgaataaagttgaaagaacatgttaaagtcagtcttaaggagtcacgtttgagtatgtaaattttgatctttctaatatgttggtttgtatattcagttttaactgtatgaatctgatttgcaaatgagaatttggaaaagttaaattagttacaaagaaatatgttaatttaattagacaatactctggaaggaattttatcttctttcaacaaaacatgttttatagtattctgacttacggttgcttttgagttttactcatttggatatattaagatgcacacagtgaagcaaattaaactccactttacgctggaatgctttctttagcatgaaaataccaggtccttggatttgggattttaatttcctatggaaagttgcttaaattgtggacactggaattaatctgaatgtcactgaggaatttcacatgaagtgtaatccctagtcaataagaattatccattacattattttatgggaaaactaggctaaattacatccattcaggtaaaaggaccttagcttactgaaggatctaaagagcaaagcaaagatctcactactcaaacactcagcctgcttccttcaagtccccttgcaggccagctttgtgctttgcagaccaactttttaatgagatactttgcttcctcattcaacattgaagctaggcttcaattaaaaggttcgaggaagctccatttaaaattgttttttttactattttttaaaattgtagtgtatatgataggaatttgcatttaaatatgttcatttttgcatatgttaggagtggaaacaatctggaaaacatttttttttcatccaaaaagtattctccttgggcatatctgatggaaaaaaaccttgattttattttcgtatctttagtctgtgttctttctagttatttggtactaattatgtgcaatctaaaaacactcccacaagtatttgttttttaattataaaatcatagtatatgttctttgtagaaaactggaaaaatacatattcaaacaggaaaaaaaatcaaaattccccataatgttgccatctaaaaataacctctattttagttgatatcccgtattcatttttgaaagccattccttaatgctagtttgatacacactaaaagtttagcttacaagttcaaattctgccagcttttcctgacagctatttgcatttttttcagatgagtgattattggccattttctttttctttttctttattttatttatttatttttttgagacagagttttgctctgttgcccaggctggagtgcagtggtgcaatctcggctcactgcaacctctgcctcctgggttcaagtgattctccacctcagcctcccaagtagctgggactacggatgcctgccaccacgcctggctaatttttttttgtatttttttgtagagacggggtttcaccatgttgtccaggctaatcttgaacttgtgacctcaggtgatccacccgcctcggcctccgaaagtgctgggattacaggcgtgagctaccacgcccggccttattgaccattttctaaataagcacattctatctttattctcttaaaattcaaattttctgttactgataatcctaatactaggattcttgcttaagtatgtgaaaccattaccgatttgttgttcacatttattttttatgttgtgaaactggactaaaggaatagagggatgattagtcataaaagtcaaatagcatttgtgtttaactgttgagaaaagtgaaagatcggtatgattattatggaactgtttttaattcttgcttaaagactacaattttagtataatgacatttgagtctagggtagtatgtggtagatttctagatggtccctaattaagaagtattgttgtatttagaattgtccacctaatttctttttatataatgccaaggtatttcttgtgcttttgggatcttatgctgtttgtaaaatgttactgtccaatgttggattattgttttggtttcaggcatttgctgaataggtgatgatacatgggtatttttctgcaagtatttaaaccaggggcatatgcaaaggcagttgtaatttcctcttggaaaaagcgccaaatgtttgaaggttaaaatcaaatgctagggttgatatttaggcttataacaaaataggcttgttttcaaagcagttttttcctagagttttaactgttaactcactagtttgctgctgtttttaactatgttaaataacatatggtatttggcaaatagatttatttttcaaaatgtctcactagtttccttttacacaatgtatatacttcaagatgtatagaaaggaaagctacagttgagcccttatacatgttttaaggtagaaatatgttccctattgtttgaaaactgattgtaagaataacctcagttaggagatataacttgaagtgtcagtccaaactactgatttaaccctatttacggtaacacattaccttcctcacctcctgtttggccctggagaatgtagtcctttttctcatttgtgttgagaaatgaaaagtctgctgtagaatgtatctgatgtcattagttcttcaaatggataccattgtacatataacagtagaatttggtttggggttgttagtgaaaaaaaatttaaacctgccattaaaaatccccatgtttcatggaaatctaacagaaatacattgtaataattagaacattttgttttcttttttcttttttttttttcgagacggagttttgcccttcttgcccaggctggagtgcaagggcgcaatctcggctcgctgcaacctccgcctcccgggttcaagcagttctcctgcctcagccccctgagtacctcagatgacaggtgcgtgccaccacacccggctaatttttgtatttttagtagagacggggtttcaccatgttagccaggctagtctcgaactcctgacctcaggtgatccacccgcctccgcctcccaaagtgctgggattacaggtatcagccaccgtgcctggcctaataattggaacattttcatcatgaaaatgtcatcagctttgccaaaagaaacaaccaattgacttgtttggcgtttgttttccattttcatgtcaattttatgtatacagttagaatacccaaggagaccactaaaatcagttaaacaagtagggtatatacaaagaaagatgaaacccgaaagtacataaaaaggatttaaatccgattttagatgtacctagtgtgtatttcttatctctagacaagttcatgtttattgtttaatttatgcccaagtgaagttgtaaacttatggttcaactctgacacagaatttgtcacttgtctgaggtcagtggcaggtttctctgctgtcaagcactctgtgtcacccaccagattagtataactattaattcagactgtactcctatgtttaagataatttttacaagagctggctgaagcagcacattagtaacctgacaagatttctttttcccttttcagggggaaagggtcaccttaaaaataaattattttcagggactttgggaatctaatgataaatattacacataatctatgaatagcttaatcctttatatattccttaaaataggaattcctcgacatcactcctggccacactttccttgcctgtgttgttgctatgtgtatttgaaagtaatatctgcattccttttaagatgttctgtaagtcatatttgtcagttatacagagtagtcttccttttccccacgttcagtgtaatctcactgaacagtaataatagcaatagctaacaacatctgcacagcaccttacagtttgcaaagaacgttcacacattctcatttgagttttgcatagtgaacctgttacgagatgtctcttgacgtcgatgctaaaagtgttagaatctttacatcactagagtcattgaatatgctgtagtattgaatagtgccctgactagggggaggatttggatgtgctgcatttcaagccgtgtataatcatcaaaatggggggcttgagttctttagctacttgaatccgatttacttctgttaagtgatgcttttctaaccgttttctggatggattttgtattcactatattgtagcttgtaatttgtataaatgtaccatctgatgtcattaaaaaaagtgtttgtagtgcta

SEQ ID NO: 466584 - DNA, 1825 bp, Homo sapiens
gagcgcggccgccgagcccagctccgccgccgagcgcctgtgccggcacggctacaccatggagcgcccggataaggcggcgctgaacgcactgcagcctcctgagttcagaaatgaaagctcattagcatctacactgaagacgctcctgttcttcacagctttaatgatcactgttcctattgggttatatttcacaactaaatcttacatatttgaaggcgcccttgggatgtccaatagggacagctatttttacgctgctattgttgcagtggtcgccgtccatgtggtgctggccctctttgtgtatgtggcctggaatgaaggctcacgacagtggcgtgaaggcaaacaggattaaagtgaacatcacctttttatagcattaaattcattttttaaaatgataaatgctggagggggccatctgatttgaataaagttgaaagaacatgttaaagtcagtcttaaggagtcacgtttgagtatgtaaattttgatctttctaatatgttggtttgtatattcagttttaactgtatgaatctgatttgcaaatgagaatttggaaaagttaaattagttacaaagaaatatgttaatttaattagacaatactctggaaggaattttatcttctttcaacaaaacatgttttatagtattctgacttacggttgcttttgagttttactcatttggatatattaagatgcacacagtgaagcaaattaaactccactttacgctggaatgctttctttagcatgaaaataccaggtccttggatttgggattttaatttcctatggaaagttgcttaaattgtggacactggaattaatctgaatgtcactgaggaatttcacatgaagtgtaatccctagtcaataagaattatccattacattattttatgggaaaactaggctaaattacatccattcaggtaaaaggaccttagcttactgaaggatctaaagagcaaagcaaagatctcactactcaaacactcagcctgcttccttcaagtccccttgcaggccagctttgtgctttgcagaccaactttttaatgagatactttgcttcctcattcaacattgaagctaggcttcaattaaaaggttcgaggaagctccatttaaaattgttttttttactattttttaaaattgtagtgtatatgataggaatttgcatttaaatatgttcatttttgcatatgttaggagtggaaacaatctggaaaacatttttttttcatccaaaaagtattctccttgggcatatctgatggaaaaaaaccttgattttattttcgtatctttagtctgtgttctttctagttatttggtactaattatgtgcaatctaaaaacactcccacaagtatttgttttttaattataaaatcatagtatatgttctttgtagaaaactggaaaaatacatattcaaacaggaaaaaaaatcaaaattccccataatgttgccatctaaaaataacctctattttagttgatatcccgtattcatttttgaaagccattccttaatgctagtttgatacacactaaaagtttagcttacaagttcaaattctgccagcttttcctgacagctatttgcatttttttcagatgagtgattattggccattttctttttctttttctttattttatttatttatttttttgagacagagttttgctctgttgcccaggctggagtgcagtgagccaagatcgcatcattgcatttcagcctggacaacaagagcgaaactccatcaaataaataatatctaatagccaga

SEQ ID NO: 466585 - DNA, 561 bp, Homo sapiens
taggtagaaagatgtttatttgtgggaactgtcttttgtttgtagaattactcacctctccactgacattgaaagacagccatattgtttttagtgggattttaggagctgtgagcagaccactgggacaattcagtatggcaaaggtgaccagtgagccacagaagcctaatgaagatgtggacgaacagaccccatcaacctcaagtaccaaagggaggaagaaggggaagacaccccgtcaacgaaggtccagaagcggcgttaagggcctaaagaccaccaggaaggcgaaaagaccccttcgagggagctcgagccaaaaagccggtgaaactaacacccctgcaggaaaacctaagaaagctagaggaccaatactgcgtggtcgttatcaccggctgaaagaaaaaatgaagaaagaagaggccgacaaagagcaaagcgagacctcagttctgtgatgtctctagaggtccgccactgaaaagtcatcaatcatacagtcagtgaattctacaccaacaggttaaaaccatgaaaataaaatcaacctgaatc

SEQ ID NO: 466586 - DNA, 1646 bp, Homo sapiens
gtggaccggacgctgctgcgcctcctctctcaggccgcggttctatgctgccctgtgcccgcgccaaacgccctgatctctctctgtctcctctctcaatctctctttgcctttcctcctttccagatgcgaaggctgtagggactttggtgactgaagctggaggagacgaggagaagaaaatacggtccaaacccgagcagggagctggagcagaagaagaaagtcacttctgtgcgggagctgccgaccccacgatcaaggataaccagaagcgcggcggtggcgaccaggagccctcgcagcagcagcctgaggcttccagcccaggactcctccgcggaggagccacaaccccaatattagcggcgtctcttcagccccagtgcgttcagcaggttgcacctgaaggagctagacagcattttcccacgctctgaatatctcgacgtgttcgctcgaaagcagcttgcaatctgcatggatgtgagtgaagccgaagtggaagccagtaagcctgatgaaagcaattggtcagagtagccactctctgaaacctgcctcagtccttgaatacctttgtcctacacattctccaattggcctgtttttgttgccttttctatgtttgccaagtgagttttgaactttagcgggggaataatgggatacataaaccttagcctatggaaatttcccattaccagagggaatatgctttctaatgcgaaacagaactaaactgttacttctatttcctgtacaaggttaagtgtaaataaagttccattccttctaacaatggtatcctttagagaacacttctgtgtggagttatgttgggactgagtctgacttgaggagtttgcaaattaatgcaccaaggacccatattgtgagaaggttcaactgtatttaaaatatttaaaccaggctatgttcttagctaaatgaccaaatttataaatattcaggcattgggataagggaataagttacatacagaaagaacacattatatgagtaattaatgtatgtttagtttcactgagacttatggggaggacatagcttaaaagtccaagtgcctggtagtcctgctgttgtttttaagggtctgatgaagccatgtagaaagtggcagcccgcaattttgattttctccaatacttttatttgtaagccggaatacactgctaatatacttgcattacactgggggtgtgggggggcaggtttgcaaacaggaaatttgtttaaaaattggaataaaaaagaacaattttgaaaaagttttcacttaactaagaagggtgaaaaggttaaagaaaaattgcatacactcaaatatataccttgaaggtatggcacaaatggagctctatgagggaatattctctttaggaatttctgacaactaagaagttttttttatgttactgttttaaactggtgggttttatgtaatttgtttggtggtggggtggggcacgctcaatttagaccaggttcttacctgtgctaatttgaaatggtttttcattttcccaggcagtggtgattaatttgtaagtcatgagatcaagaaattactaagattacttcagtattattgactgagtatattttcaaaacaaagagaaaat

SEQ ID NO: 466587 - DNA, 924 bp, Homo sapiens
ctctgtgtggcatatggagattctgtcaaaactgcgctctactcatgctagcaatgactacgtggaacggcctccagccccctgtaaacaggccctctccagcccttcccttattgtgcaaacccacaagtctgattggtctctggctaccatgcctacttctctcccccgcagtctcagccagtgccatcaactgcagcccttgcctcagcatctgagccaatctagcattgccagctcaatgtcccatagcaccactgcctcttgatcaaaggctcttggccagcattacaccctcaccttcaggccaatccatcatccgaacccaacctggagcaggggtccacccaaaggctgatggtgctctgaagggagaagctgagcaatctgcagggcaccctagtgagcacctcttcatctgtgaggaatgtgggcgctgcaagtgcgtcccctgcacagcagctcgccctctcccctcctgctggctgtgcaaccagcgctgcctttgctctgctgagagcctcctcgattatggcacttgtctctgctgtgtcaagggcctcttctaccactgctccactgatgatgaagacaactgtgctgatgagccctgctcttgtgggcctagttcttgctttgtccgctgggcagccatgagcctcatctccctcttcctaccctgcctgtgctgctacctgcctacccgtggatgcctccatctgtgccaacagggctatgatagcctccggcgaccaggctgccgctgcaagaggcacaccaacactgtgtgcagaaagatctcttctggccgcacactgagttaacagcagaattgagactggaatataggccttctgactcctagttcagtattcttacccctgtaccacattgagtcatgggactttttcctagggctctatt

SEQ ID NO: 466588 - DNA, 3237 bp, Homo sapiens
gtaaatctactaaacttatttatacaagagaatgtctctggaaatacacaagtggtgagagaaggggaggggaggagaaggcctctgaggtaaactgtgaagggaagttgactgtgggtaaggggcagagaggcattcattgaactgctatttcttgaggtcactctgggcgaagggcagtgcctggggtcctacttgccggcccaggcacaggcacggagtcagaacatcctgccccgccccttccccccaacctttcaccttcctttccagccccaccccgctcccatggccccggaccttggcaacgctgcgcagcgcgtcagtcaacgtcacagggcgtgggggtggctagaggccccagtggcctctgatctcacagagcagatcagcgcgggtgtccagcgccccgatgtgggcagtcggggctagccgctggggcaggctgcccccagcaagaggagcggccgctccaaaccacaaaatctccaacgccggacagcgcggcctcggtcaccatacgctacaggcatcctgcaggccatcgcgtgtggtggagcgtccggcgcttatcgtggtcagtccccctctacgccaccgtccgattcccccgacgcccccgccgaccccggagcttgccctcagccccttcatctgccgaggcatacccttgctgcccatcccacccagggatcgccacctctgccctctaccaggctccgggcccggtgccgaggactggccgccaagggttgcggactatggccctaaagctcatccacaaggagttcctcgaactggcccgcgacccccagccccactgctcagcagggccagtgtgggacgatatgctccactggcaggccaccataacgaggcccaacgacagctcctacctgggaggggtcttcttcctaaagtttccctccgactacctattcaaaccacccaagatcaaatttaccaacggaatttaccatcaacgttaacggaaatacgcgacaggagggagtatggcagaatagctaaagactggactcagtagtgtaccatgtaatttcaaaatataattccatcgccttaataataaagatgcagaaagcagcttaggcctgccctgtggagcatcgctgcaggggccagcttgagcaacacggatcctgagagtgctcccaggtaggcaattgccccggtggaacgcctcgccacagcagcgcgtggcaggcccccgtggaggatcaacgcagtggctgaacaccgggaaggaactggcacttggagtccagacatctgaaacttggaactatgttgaaaaatttcaagaaaggatttaagggagattatgatgttactatgacaccaggaaaatttagaactttgtgtgaaatagactggccggcattagaggtgggttggccatcagaaggaaggctggacaggtcccttgtttcaaaggtatggcacaaggtaacccataagccagggtacccagaccagttcccatacatagacacttggttacagctagttttagaacccccacacacacagtggttgagagaacagcagcatcagcggctggcagaggcaaagaaagaccagcagagagacagagagaggaaagagacagagagaaaaggaggcaaagacagagaggaaaagacagagaggaagagacagagagacaaagagggagtcaagaagagagagagagagaggcagagagagaggaagagacagaggcaaaaggaaagtcagagagagacagaaagtcaaagagagaaagaaagagagaaatatacaagtagttaagaaaaaaaacagtgtaccctattcctttaaaagccaaggtaaatttaaaacctataattgataattagaggtattctccataaccctgtaacactctaataccactttgttgtcagtgtaaacaagggcatatccgaaagcactgagaccttcctatcaaaaatctttaacccagtaacctgcggatggcccagatgcattcaatctgtagcgccaacagctttgctaacagaagaaagtaaaaaaaataacttttagaggaaacctcattgtgagcacacctcaccagttcagaagtatcctaaaaaagaaaagaaaagaaaagaaaaggatgatttaacattaaccactgaaaattcttttaacccagcagttttcctaacaggggatctaaatcttaattaccatacaaaggtccgaccagacctaggaggaactcacttcaggacaggatgatctatggttcctcccgggtaattgaagggggaaaaaaagccatctataccaattctaagttaatttggactaaacaagttcttattaatagcaaaggataattgaaatcccaaacttacaagttttcaacaaaagtaaagtttgctaaaagttaacagtgtaacaagtattatagtaacttctaatcttgtggccttagacagcctagtccacagacataaaggaagttcgctttggaaaagaatggttatcatcttcgaaaaaaaaagagggggaagagggggtagaatttatgtaaaaagagtgttatatggtaaattcttgtcctgaaataaattaactggttgtttaaagaaagaaatgtttgtaataagtcagaaagttaaggtatgtcgaagaattgtctgcgaaagtcgtgaaagagaaaaaagttataaaaaaagtatgcaagaaatgttgtataatttaaaagtaataaggcctcctgagtaatattgaagaaacagtttatgtgcaaagtgtataaggaaagtaaaatatacctttggtaaaaggattataaggaggcataagaatgtggatttttatctacattaaaaggttaaaaaatattgttttgaaggtttaagcaagttttaaaatgttaattataaaggaaattctgtgtgtaaacatattagctaaagttaaagcagtatcatccagtttttctgtgaactggacatgaaagtaaaaacacaacaggtttttcttaaagcactaacctgctctttaaaaaagattataaaaggttaaaaagagtctataaaaatcttaccttatggtccaacattaaaaattgaataaatatgtatacaaatttttttaaaactaagtttaacattaatagcacagtaatataaaggtaaaatttagcttatctggtataaaaatcatacaagaagcattgtcaaatataaaatggtgttt

SEQ ID NO: 466589 - DNA, 3124 bp, Homo sapiens
gtaaatctactaaacttatttatacaagagaatgtctctggaaatacacaagtggtgagagaaggggaggggaggagaaggcctctgaggtaaactgtgaagggaagttgactgtgggtaaggggcagagaggcattcattgaactgctatttcttgaggtcactctgggcgaagggcagtgcctggggtcctacttgccggcccaggcacaggcacggagtcagaacatcctgccccgccccttccccccaacctttcaccttcctttccagccccaccccgctcccatggccccggaccttggcaacgctgcgcagcgcgtcagtcaacgtcacagggcgtgggggtggctagaggccccagtggcctctgatctcacagagcagatcagcgcgggtgtccagcgccccgatgtgggcagtcggggctagccgctggggcaggctgcccccagcaagaggagcggccgctccaaaccacaaaatctccaacgccggacagcgcggcctcggtcaccatacgctacaggcatcctgcaggccatcgcgtgtggtggagcgtccggcgcttatcgtgggatcgccacctctgccctctaccaggctccgggcccggtgccgaggactggccgccaagggttgcggactatggccctaaagctcatccacaaggagttcctcgaactggcccgcgacccccagccccactgctcagcagggccagtgtgggacgatatgctccactggcaggccaccataacgaggcccaacgacagctcctacctgggaggggtcttcttcctaaagtttccctccgactacctattcaaaccacccaagatcaaatttaccaacggaatttaccatcaacgttaacggaaatacgcgacaggagggagtatggcagaatagctaaagactggactcagtagtgtaccatgtaatttcaaaatataattccatcgccttaataataaagatgcagaaagcagcttaggcctgccctgtggagcatcgctgcaggggccagcttgagcaacacggatcctgagagtgctcccaggtaggcaattgccccggtggaacgcctcgccacagcagcgcgtggcaggcccccgtggaggatcaacgcagtggctgaacaccgggaaggaactggcacttggagtccagacatctgaaacttggaactatgttgaaaaatttcaagaaaggatttaagggagattatgatgttactatgacaccaggaaaatttagaactttgtgtgaaatagactggccggcattagaggtgggttggccatcagaaggaaggctggacaggtcccttgtttcaaaggtatggcacaaggtaacccataagccagggtacccagaccagttcccatacatagacacttggttacagctagttttagaacccccacacacacagtggttgagagaacagcagcatcagcggctggcagaggcaaagaaagaccagcagagagacagagagaggaaagagacagagagaaaaggaggcaaagacagagaggaaaagacagagaggaagagacagagagacaaagagggagtcaagaagagagagagagagaggcagagagagaggaagagacagaggcaaaaggaaagtcagagagagacagaaagtcaaagagagaaagaaagagagaaatatacaagtagttaagaaaaaaaacagtgtaccctattcctttaaaagccaaggtaaatttaaaacctataattgataattagaggtattctccataaccctgtaacactctaataccactttgttgtcagtgtaaacaagggcatatccgaaagcactgagaccttcctatcaaaaatctttaacccagtaacctgcggatggcccagatgcattcaatctgtagcgccaacagctttgctaacagaagaaagtaaaaaaaataacttttagaggaaacctcattgtgagcacacctcaccagttcagaagtatcctaaaaaagaaaagaaaagaaaagaaaaggatgatttaacattaaccactgaaaattcttttaacccagcagttttcctaacaggggatctaaatcttaattaccatacaaaggtccgaccagacctaggaggaactcacttcaggacaggatgatctatggttcctcccgggtaattgaagggggaaaaaaagccatctataccaattctaagttaatttggactaaacaagttcttattaatagcaaaggataattgaaatcccaaacttacaagttttcaacaaaagtaaagtttgctaaaagttaacagtgtaacaagtattatagtaacttctaatcttgtggccttagacagcctagtccacagacataaaggaagttcgctttggaaaagaatggttatcatcttcgaaaaaaaaagagggggaagagggggtagaatttatgtaaaaagagtgttatatggtaaattcttgtcctgaaataaattaactggttgtttaaagaaagaaatgtttgtaataagtcagaaagttaaggtatgtcgaagaattgtctgcgaaagtcgtgaaagagaaaaaagttataaaaaaagtatgcaagaaatgttgtataatttaaaagtaataaggcctcctgagtaatattgaagaaacagtttatgtgcaaagtgtataaggaaagtaaaatatacctttggtaaaaggattataaggaggcataagaatgtggatttttatctacattaaaaggttaaaaaatattgttttgaaggtttaagcaagttttaaaatgttaattataaaggaaattctgtgtgtaaacatattagctaaagttaaagcagtatcatccagtttttctgtgaactggacatgaaagtaaaaacacaacaggtttttcttaaagcactaacctgctctttaaaaaagattataaaaggttaaaaagagtctataaaaatcttaccttatggtccaacattaaaaattgaataaatatgtatacaaatttttttaaaactaagtttaacattaatagcacagtaatataaaggtaaaatttagcttatctggtataaaaatcatacaagaagcattgtcaaatataaaatggtgttt

SEQ ID NO: 466590 - DNA, 3098 bp, Homo sapiens
gtaaatctactaaacttatttatacaagagaatgtctctggaaatacacaagtggtgagagaaggggaggggaggagaaggcctctgaggtaaactgtgaagggaagttgactgtgggtaaggggcagagaggcattcattgaactgctatttcttgaggtcactctgggcgaagggcagtgcctggggtcctacttgccggcccaggcacaggcacggagtcagaacatcctgccccgccccttccccccaacctttcaccttcctttccagccccaccccgctcccatggccccggaccttggcaacgctgcgcagcgcgtcagtcaacgtcacagggcgtgggggtggctagaggccccagtggcctctgatctcacagagcagatcagcgcgggtgtccagcgccccgatgtgggcagtcggggctagccgctggggcaggctgcccccagcaagaggagcggccgctccaaaccacaaaatctccaacgccggacagcgcggcctcggtcaccatacgctacaggcatcctgcaggccatcgcgtgtggtggagcgtccggcgcttatcgtggctccgggcccggtgccgaggactggccgccaagggttgcggactatggccctaaagctcatccacaaggagttcctcgaactggcccgcgacccccagccccactgctcagcagggccagtgtgggacgatatgctccactggcaggccaccataacgaggcccaacgacagctcctacctgggaggggtcttcttcctaaagtttccctccgactacctattcaaaccacccaagatcaaatttaccaacggaatttaccatcaacgttaacggaaatacgcgacaggagggagtatggcagaatagctaaagactggactcagtagtgtaccatgtaatttcaaaatataattccatcgccttaataataaagatgcagaaagcagcttaggcctgccctgtggagcatcgctgcaggggccagcttgagcaacacggatcctgagagtgctcccaggtaggcaattgccccggtggaacgcctcgccacagcagcgcgtggcaggcccccgtggaggatcaacgcagtggctgaacaccgggaaggaactggcacttggagtccagacatctgaaacttggaactatgttgaaaaatttcaagaaaggatttaagggagattatgatgttactatgacaccaggaaaatttagaactttgtgtgaaatagactggccggcattagaggtgggttggccatcagaaggaaggctggacaggtcccttgtttcaaaggtatggcacaaggtaacccataagccagggtacccagaccagttcccatacatagacacttggttacagctagttttagaacccccacacacacagtggttgagagaacagcagcatcagcggctggcagaggcaaagaaagaccagcagagagacagagagaggaaagagacagagagaaaaggaggcaaagacagagaggaaaagacagagaggaagagacagagagacaaagagggagtcaagaagagagagagagagaggcagagagagaggaagagacagaggcaaaaggaaagtcagagagagacagaaagtcaaagagagaaagaaagagagaaatatacaagtagttaagaaaaaaaacagtgtaccctattcctttaaaagccaaggtaaatttaaaacctataattgataattagaggtattctccataaccctgtaacactctaataccactttgttgtcagtgtaaacaagggcatatccgaaagcactgagaccttcctatcaaaaatctttaacccagtaacctgcggatggcccagatgcattcaatctgtagcgccaacagctttgctaacagaagaaagtaaaaaaaataacttttagaggaaacctcattgtgagcacacctcaccagttcagaagtatcctaaaaaagaaaagaaaagaaaagaaaaggatgatttaacattaaccactgaaaattcttttaacccagcagttttcctaacaggggatctaaatcttaattaccatacaaaggtccgaccagacctaggaggaactcacttcaggacaggatgatctatggttcctcccgggtaattgaagggggaaaaaaagccatctataccaattctaagttaatttggactaaacaagttcttattaatagcaaaggataattgaaatcccaaacttacaagttttcaacaaaagtaaagtttgctaaaagttaacagtgtaacaagtattatagtaacttctaatcttgtggccttagacagcctagtccacagacataaaggaagttcgctttggaaaagaatggttatcatcttcgaaaaaaaaagagggggaagagggggtagaatttatgtaaaaagagtgttatatggtaaattcttgtcctgaaataaattaactggttgtttaaagaaagaaatgtttgtaataagtcagaaagttaaggtatgtcgaagaattgtctgcgaaagtcgtgaaagagaaaaaagttataaaaaaagtatgcaagaaatgttgtataatttaaaagtaataaggcctcctgagtaatattgaagaaacagtttatgtgcaaagtgtataaggaaagtaaaatatacctttggtaaaaggattataaggaggcataagaatgtggatttttatctacattaaaaggttaaaaaatattgttttgaaggtttaagcaagttttaaaatgttaattataaaggaaattctgtgtgtaaacatattagctaaagttaaagcagtatcatccagtttttctgtgaactggacatgaaagtaaaaacacaacaggtttttcttaaagcactaacctgctctttaaaaaagattataaaaggttaaaaagagtctataaaaatcttaccttatggtccaacattaaaaattgaataaatatgtatacaaatttttttaaaactaagtttaacattaatagcacagtaatataaaggtaaaatttagcttatctggtataaaaatcatacaagaagcattgtcaaatataaaatggtgttt

SEQ ID NO: 466591 - DNA, 2014 bp, Homo sapiens
gaaaatctttcatttcttaaaagacactatgggcacagctgcccagaccctgctcctggacagctggttaagtattcagatttctcaggcggtgggcagggccatagaactcccaagagattatgaccttggtctttgtctaccagggtgtgtagagaaagaccacccggtaggggcagggataggcatggctgagctcagcctctccttgggtgtggcttgctgtgactgctgtgggggatgggggtgtggtgtctggtccaatggagttatattcccagggggattatggctgcttctgctgaaccatacagtttgccagcaagtgggggaaagtcagcggtcatgggcctcaccctgctcccatgcagcctgcagccctaaaggctggtgtcattcccactgtgccctacaacagcaccgagtctatttcagggcaaccagtgaccagggctgagaacttgtcccagaccaccagcttccccactgacaaagcaagcagactcacagtttttcggcatctcagggggcctgcaacagtgatccagtttcttcaaagggtctgtggattctctcagctttcctggtatgttcctgcagtacttcttggagcaaaggtttacagtacgagtctccacatgctgctctgtccatctcagcaggagctgcaagctggtcctgcctcctatctgccatcttgcccccatgcatttatctgaaatcaaaatacttttaataaaagcattatactactaatattccagtgtgaaagttcctttctgctcatattagaaataatgtgaatctttactaatctgataggcaaaaaaaatcatctctcatcattgtttcaatataactcatttttgctctcttctgaaatttcatactgtggatgtgacataatcaattttcacaaccccatattattcagagtgttccaatattccctattatctacacgacatggatagcatcttttcagagtctgtgcactggtagtggttgtaatccagggcagagttcccatggctatttgctctggtgagctgaatgggtccccttggagcccaacaactatgttgagagaattgtagtattgtgataacagaacctggttgatgtaggagtgagtgtgtgtgtgtgagagagagagtgtgagtgtatgtgtgtgctgacaaccacatttccctttacttccttctggcttgtgtctttgcatctcatttcgtctccctttctaaattcaagcccaaaagtgaaaaaagggaaatatcaggatggcagtacttgtaaccagattttaatcaacattcttcactaagtcctgaagataaacatataaaaggaaatgctagcacaaagcgtgtgtgcctatgtaggccttgataagtattgctctacagacactcataaagtagtgccatttagactccccaagtatagggaggtgagaaaggctacagaggaatgaagaaagtactgacgctgacaaggtgttgcagaggaaaggccctggactctgtggtggacacacatattggtcatttgtctattttcggttttgttgtctgtgcttttaaggtcttagccataaaatatttgcctagaccaatgtactaaagtgtttcccccaggtttttgtctagtacttttatagtttcagatcttacatttaagtctttaattgatcttgagttgatgtctgtatatgatgagagacagagatgcagtttcattcttctgcatatgcatatccaattttcccaataccatttattgaggaggatgtcctttctccaacgtacgttcttggtgcctttgttgaaaatcagttttgtctgtaaacatgtggatttatttctgcgttctctattctgttccattggtctttgtgtctgttttcataccaataccatgctgttttgattaccatagccttgtaatatattttgaagtcaagtagtgtgatgcctccagctttgttctttttggtctggattggtttggttat

SEQ ID NO: 466592 - DNA, 871 bp, Homo sapiens
tgcagtacgggggttcgtcgtaggtgaccagcatgtacctgtctccacggctggccgggtcccgggcgcgcagctgcggggcaagggatgacggagggggtcgccgcctttggcaatgtccaaataagaggtgcccaggtcagtgcgctggttcatagaggcggacgtgtctatgaggaacagcaggatgggcatcttcccccgcactcctgcctccgctccccactctcccggccctcttgccctcactgccgcgtacggccacctgaaccctcaactctcgcagagccggggagcaaggagcaagaggaagagggggagacgggacgggacgggacggatgggaccgctcctggcctcctctttctgcagccccacctcctctccctccaagggaacttgaaagtcatccgtccgcgctcactagagcgctcgccccagactgagcgccgtctctgttcactgacaacttctgtctgctcacctaccatcggcaccatgtgaccagaacccatgccattggctgccaattatgtgatggtgattcgaaaagaagagtgaatttgagcaacagttgtacagaagtacagaagcagatgcttggacagtttgcacagaaaattcttcgctaactgcaatcgatcaatcctgccagtggcgaagacgaaaatatttcagaagcagcaaacttctttcctggcaggacgtactcacattcctttagatccctcccccgtcttgatcagtatttgtgagttggttgctggccttgcattccacatatatctacttagaaaggaaactaaagcttaaacacagttacagttacctaaactggccttttgtatgcacaagcttcttcagtttcact

SEQ ID NO: 466593 - DNA, 1473 bp, Homo sapiens
ttcaagtcacctgggatggcaagtgctgccaggagcgcgccggtgcgagtcgccgcagcctgcagccagctgctgttgccgccgccgctcggtcgtgggctagcgcgcagggtgcggggtgcgggcgggcaggcggcgtgtggtggggggcggggggtgttggcgtctgtcgtccgggcagctgggaaggcttctgtctctttggttccccctgtggctgctgcggggctgcggggctgcggggctgcggggctgcggggctgcggggctgcggggctgcggggctgcggggctgcggggctgccgggctgcgggcggtgggagatgacgggggtgggagcaggagcgggagcaggggcgggagcgggagcgggagtgggagtgctcagtctctcgggtcgcctggatatttatgaaaaggacgccagggaaagggctccgctgtagaccgaagggataagggttcgattcagaagggagcgttatttttatcccctctccacataatggaacgtttaaatggttaaatcaagtaccttgcaggagagggtggggtggccttgagaatacactcaaggcctcagtacatgcagtctggaagtgggggaatcaagagcaccctgtctctagtactgtcctcaatgataaggcgctgaggttcccaacctggaccaagaagtacatattcaggttcaaaggataaaccaaaacaaaacctgagctctctctctagaatgaagtgcctggtcccagttcaccatctaatatttatggaaagcttatcagagaacagaagtgtcagcagaggactgtaagtgctatgtgattggacgacggtggccatagaatttcacctgcccagcacgtattctctcatcctctcctcctctgccttctttgggagggagaaatcagaaggagtggggatgcagttcagagagcagaggagaagagaagaaaagaaggaagaaggaagaggactagggttgggtggggggggaggacaccaatgggaagagggacagatcaactctatacacaaaagtaaatcaaaacaccaaaaacaggggtctatgtaaagaagcctcttcccgtgaattgctcgttgcatagctgcagggagggtgtttaggggcatagagaatgaaaacatacctgtattttggtgtagggaaattgtttctgtcaattcacaccgtccacacaccacctcccaccccaaccccgccactaccaaattcctctaaataaaaataattatgagatacaggccaacaaaaacgtcagcgttaggctgttatttagagagaattggaaagcgtttgaatgtggccctgttgtttaataaacgataacaatgattaaaaaacaaaccgaaccctctttgaccatgtcaaaagggagctcaaacaagtcttaagatgtagcaattttacatgtatgccgatttgctatatgcatttttctgctctg

SEQ ID NO: 466594 - DNA, 1456 bp, Homo sapiens
ttcaagtcacctgggatggcaagtgctgccaggagcgcgccggtgcgagtcgccgcagcctgcagccagctgctgttgccgccgccgctcggtcgtgggctagcgcgcagggtgcggggtgcgggcgggcaggcggcgtgtggtggggggcggggggtgttggcgtctgtcgtccgggcagctgggaaggcttctgtctctttggttccccctgtggctgctgcggggctgcggggctgcggggctgcggggctgcggggctgcggggctgcggggctgcggggctgcggggctgcggggctgccgggctgcgggcggtgggagatgacgggggtgggagcaggagcgggagcaggggcgggagcgggagcgggagtgggagtgctcagtctctcgggtcgcctggatatttatgaaaaggacgccagggaaagggctccgctgtagaccgaagggataagggttcgattcagaagggagcgttatttttatcccctctccacataatggaacgtttaaatggttaaatcaagtaccttgcaggagagggtggggtggccttgagaatacactcaaggcctcagtacatgcagtctggaagtgggggaatcaagagcaccctgtctctagtactgtcctcaatgataaggcgctgaggttcccaacctggaccaagaagtacatattcaggttcaaaggataaaccaaaacaaaacctgagctctctctctagaatgaagtgcctggtcccagttcaccatctaatatttatggaaagcttatcagagaacagaagtgtcagcagaggactgtaagtgctatgtgattggacgacggtggccatagaatttcacctgcccagcacgtattctctcatcctctcctcctctgccttctttgggagggagaaatcagaaggagtggggatgcagttcagagagcagaggagaagagaagaaaagaaggaagaaggaagaggactagggttgggtggggggggaggacaccaatgggaagagggacagatcaactctatacacaaaagtaaatcaaaacaccaaaaacaggggtctatgtaaagaagcctcttcccgtgaattgctcgttgcatagctgcagggagggtgtttaggggcatagagaatgaaaacatacctgtattttggtgtagggaaattgtttctgtcaattcacaccgtccacacaccacctcccaccccaaccccgccactaccaaattcctctaaataaaaataattatgagatacaggccaacaaaaacgtcagcgttaggctgttatttagagagaattggaaagcgtttgaatgtggccctgttgtttaataaacgataacaatgattactaagttgtcctgagtcaatacaacaaatttagcaaatggtcctttgggtccttataaagtgaagagttgacggagacagatttgtatatgg

SEQ ID NO: 466595 - DNA, 692 bp, Homo sapiens
cggcagcgggttcagtcaccaggacacacaattataacatcaagatgccgaagactgaggaaactgtgctccagaatgatcccagtgtagcagagaatggggcccctgagcctaaaacaccagggcagagccagaaaagcaagagtttctgtttagatgaccagtctcctgatctgatagagacagttaatgaagtttccaagctgagcatttcacatgaaattgtagtaaaccaagatttctatgtggaagagaccattttgcctccaaacaggttgaacatcccaaatcggaaatccacgatgctccaaaatccaaaacattttgagcgccaacatgatgctcaaaggaaatgctcattgcggtatacaagtatgctgcaaatattccaaaatccaagaaatcctgtagaaggcaggtttgcggaggcaatgtacaatgctttttggaaccatctgaaagaacagctattgagtactcctcctgacttcacttgtgcccttgaacttctaaaagatgttaaggagaatcccggagatgaataggcgagcccttgcccacaaggaacttgcatgcttgagtcaaaaggctatttcaagggaaccttaaagattccagatttgctattttatcctcacactttggagtaaaacaatctaaaaatatccttatcctttattaagaatgcctca

SEQ ID NO: 466596 - DNA, 1989 bp, Homo sapiens
gcaaagcgccgacagtcccccgagcgaggacggcagcgagactccgaagcccccttagcaaccaagccggtgccgctgcccttgcgccgggactgcagccgggtcttccgaagtgaggatatgctgccctctagaggccgcggggtgacatggcccatgaggctgtctgggcagggcagctcgtgcccccaggcaggattccaacagtgcagaagcccccagtccccaagtccggggtggcaaggacttccagcctccccggggagccaccttggccctccctccctcctgctggctgggtgccgcgctgcggggctgctcaggttccctgctgagtcccccgctgggctgtgatcgttgcggatttaaacaccacactgtggaagcggagatggccccgcgtgcaccgctgaagtgaaggggctcgtggcaaatgatgcggggggacagcggccagagcagaccccggcggggtggcccgcccgggaggtggctgagggtccccggctgcggggtgaggggcgggaccgggaggcacaccctccgtgatcgccaccagaggccgcctggaacccgagtttcaacctcccggggatcctgtcccgcttcccagcgatgtttgccatgactgctgcgagttctccgacctcgaggccactctcctttccttccaaggacgcccagaacccgcggagggaggagggggtgagggaggagggagagaggaggcaggagggagggaggaaggtggcggggagaagaagagagggagggaggaaaaggaaggaactgcgttggcctgtcgcctccgcactgtaagattctggcacccagggtcccggccccctctcctggggccaaacgttccggttcccgatgccaggctgcagaaaaaatgagcacactgaacacgtggactagcacataaataaggttattacctcctttttattttttgcacactaattaataaactactgcaacggaaaaagagaaagcaggcagaatgcaaacagcctctcggtggctctgttatgtaggagggaggtatggaggctgcttggtggtcaaagaattcctccaatgcccgctccaaagcggagccctgcaacggccttaaatcaaaaggaaagcgggtgtcagcagcaagcacagaaagtggggcctagttcagccaggagctaacacaatattcctgctggggtggggatgggggcacgactattacaaaactagggccccctgaaagcgccctgccccacccaacacacacattcacttccttgtaggtttgcgctgcaggcagcttccgttgaaccatacccggacctccacccaccatgaccagagctgctggggctgggagcaggcacctgccccaagcactgggccaccagcgtccccttgcccaggaatttaggattggggatggccacgaccctgtggcctgacactcatggcacggttctgagggctgctcccctctgccctggcagcgtgattccatctgccgtgacgagagtccagcggcgctctgcattgaagcaaagccatggagccctgttgcaggagcacctgcaaacactcatcgcctccttatttctccggaggcctgcagcggttcccatactctggttgggaagatctgctccagagcccacgagaatttgccttagcgccaaggtgggccggcactgctgggggacccagtgcaccctccacagctgctggcccgggtgctaagcccctcactgcccggggctggcagcgccagccggccgctcagacagtgggcccaccgagcccacgcccacccagagctcacgctggcctgcaagtgctccatgcagccctggttcccgcccgcgtctctccctccacacctccccgcaagctgagggagccggcctcggcctcggccagcccagaaaggggctcccacagtgcagcggtgggctgaagggctcctcaagcatggccagagtgggc

SEQ ID NO: 466597 - DNA, 1287 bp, Homo sapiens
atccgaggattccacagatcttggagcatcaccaggtacatgttacacttcacaaaaaggaatctaagctgtctgttttattcagcattgcatcttctgtgcctagcacaagagttgatacataaggagtactttataaataaaaaaatgaaagtgtagtgatgagattcctttagctatctatctatatgtatatatctggttattcaaagcttccccacccccagtcatctaaatttttcaggtatcaagtgctcaacagacatatgatagtcaaggctcttagtctcattttttactctttgtcaagagaaatggaaaataagagtacttgggccctcttaagggagctcagagagaattactaaattagggacagtttcaatagttatcattctgtctacatgaacaatcaagaccaggactcagggaactttactctgtaacagaaagagaggattcagtgtttgccctgggagaattgtcccattcttgttgcttctctcctgagtacccactaccacaatgtcttctgtcaaggaattacaagtagcaagggaaggtctgaatgtaaggacaggcctagggaccttgcaagcacttgatatctctcctcttgctgactttgtcaacatagacatatagtgaaatgatgagggaggcagtcttggccctcatccaggtatctggtttttttttgtagaaagcacagataagtggtaaatggtctttttctgactttcattatgtggactggatggaggctttcaaactggtgccatactgctgcaggacctaaagggagccccatctttatggctgatcaactacaaccctatatgcctgaatactctgcaagaaggcctggagattttgcaaaactgatttattgagaatggcaaggagagccttgtgaacttttagctttggtgcacagctgataccaggagggaacatcctgaagtgtcagagaaaagtaaggcatatggctcacagtgatgatgccagtcagagccaggccagatggaaattgttttctgatgttactggttttcttttccctattagccaaagtgactatctcttaagagaagataatgtgacgtcaagggaagttggaaggcatggatttatatctatgtcagatcctggtttataatgttggccaaggcttatttatatatgtttatttagtattccataaaattgtacttcgtaatgaaaatgacacattttatcttaaatttagacaataaacaaaactttgttaccaaatcactcagaaat

SEQ ID NO: 466598 - DNA, 3058 bp, Homo sapiens
ggaagcaacttctttctaccggatgtacaaatataacccagggatactagtgaagcacactcaaaggttgcccacgttcagagttcttgtgggcatccctgtgcaaatggcgatgagagagctgaacgcggattcatgctcaagcccccagatgggggctatgtgggagactagtgggtctgtgaaagagaactccagtcagagtaagaaatacagcacaaaaatagagaatcttggtcctgagagcgcttgcaggcacttctggagcttccgttatcatgaagcaaccggaccgcttgagactatcagccaacttcagaaattgtgccatcagtggctgaggccagagatccactcaaaagagcagatcttggaaatgctggtgttagagcagttcctgagcattctgcccaaggagacccagaactgggtgcagaagcatcatccacagaatgtcaaacaggctctggtcctggtggaattcttgcagagggagcctgatggaacaaagaatgaggtcacagcccatgagctgggaaaggaggcagtgctcttgggaggaacagcagtggccccaggcttcaagtggaagccagcagagccccaaccaatgggtgtgttccagaaagaatattggaatacataccgggtactacaagaacagctgggctggaacactcacaaagaaacccagcctgtatatgaaagagaaatcagcttgggatgtttgtaaataggaaacagaaattttccctggctattttctacccacagctgtgcatgatcaacagatgttagccctttctgagcagaaaagaatcaaacactggaagatggcatctaaactcatcctgcctgagtccctgagtttgttgacatttgaagatgtggctgtgtatttttctgaggaagagtggcaattattgaatcctcttgagaagactctctacaatgatgtaatgcaggatatctatgagactgtcatctctctagggttaaagctaaaaaatgacactggaaatgatcatcctatatctgtttctacatcagaaatacaaacatcaggatgcgaagtatcaaaaaagaccagaatgaaaattgcccagaaaacaatgggcagggaaaatcctggtgatacacacagtgtacagaaatggcatcgagcttttccaaggaagaaaagaaagaaacctgcaacttgtaaacaagagcttccaaaacttatggatcttcatgggaaaggccccacaggggagaaaccttttaagtgtcaggaatgtgggaaaagcttcagagttagctctgatcttattaaacaccacagaattcacactggagagaaaccctataaatgtcaacaatgtgacaggaggtttagatggagttcagatcttaataagcacttcatgacccatcaaggaataaaaccatatagatgctcatggtgtgggaaaagctttagtcataacacaaatctacacacacaccaaagaattcacacaggagagaagccctttaaatgtgatgaatgtggaaaaagattcattcagaactcccaccttattaaacaccagagaactcacacaggtgagcagccttatacgtgtagcttatgcaagagaaactttagtaggcgatcgagccttcttagacaccagaaactccacagaagaagggaagcatgtctagtgtctccaaactgaggaaagttaccatgtagagcttgactttagaagtggtgaaagaatacaaaattatgaggcacccaatgataggaatctgtgattaataaaacatttgggaagggtacatgttacacttcacaaaaaggaatctaagctgtctgttttattcagcattgcatcttctgtgcctagcacaagagttgatacataaggagtactttataaataaaaaaatgaaagtgtagtgatgagattcctttagctatctatctatatgtatatatctggttattcaaagcttccccacccccagtcatctaaatttttcaggtatcaagtgctcaacagacatatgatagtcaaggctcttagtctcattttttactctttgtcaagagaaatggaaaataagagtacttgggccctcttaagggagctcagagagaattactaaattagggacagtttcaatagttatcattctgtctacatgaacaatcaagaccaggactcagggaactttactctgtaacagaaagagaggattcagtgtttgccctgggagaattgtcccattcttgttgcttctctcctgagtacccactaccacaatgtcttctgtcaaggaattacaagtagcaagggaaggtctgaatgtaaggacaggcctagggaccttgcaagcacttgatatctctcctcttgctgactttgtcaacatagacatatagtgaaatgatgagggaggcagtcttggccctcatccaggtatctggtttttttttgtagaaagcacagataagtggtaaatggtctttttctgactttcattatgtggactggatggaggctttcaaactggtgccatactgctgcaggacctaaagggagccccatctttatggctgatcaactacaaccctatatgcctgaatactctgcaagaaggcctggagattttgcaaaactgatttattgagaatggcaaggagagccttgtgaacttttagctttggtgcacagctgataccaggagggaacatcctgaagtgtcagagaaaagtaaggcatatggctcacagtgatgatgccagtcagagccaggccagatggaaattgttttctgatgttactggttttcttttccctattagccaaagtgactatctcttaagagaagataatgtgacgtcaagggaagttggaaggcatggatttatatctatgtcagatcctggtttataatgttggccaaggcttatttatatatgtttatttagtattccataaaattgtacttcgtaatgaaaatgacacattttatcttaaatttagacaataaacaaaactttgttaccaaatcactcagaaat

SEQ ID NO: 466599 - DNA, 3330 bp, Homo sapiens
ggaagcaacttctttctaccggatgtacaaatataacccagggatactagtgaagcacactcaaaggttgcccacgttcagagttcttgtgggcatccctgtgcaaatggcgatgagagagctgaacgcggattcatgctcaagcccccagatgggggctatgtgggagactagtgggtctgtgaaagagaactccagtcagagtaagaaatacagcacaaaaatagagaatcttggtcctgagagcgcttgcaggcacttctggagcttccgttatcatgaagcaaccggaccgcttgagactatcagccaacttcagaaattgtgccatcagtggctgaggccagagatccactcaaaagagcagatcttggaaatgctggtgttagagcagttcctgagcattctgcccaaggagacccagaactgggtgcagaagcatcatccacagaatgtcaaacaggctctggtcctggtggaattcttgcagagggagcctgatggaacaaagaatgaggtcacagcccatgagctgggaaaggaggcagtgctcttgggaggaacagcagtggccccaggcttcaagtggaagccagcagagccccaaccaatgggtgtgttccagaaagaatattggaatacataccgggtactacaagaacagctgggctggaacactcacaaagaaacccagcctgtatatgaaagagctgtgcatgatcaacagatgttagccctttctgagcagaaaagaatcaaacactggaagatggcatctaaactcatcctgcctgagtccctggtgagctgttatttctggcttttttcaggtgacttgactgtggccttgcctctgcttgtccctattgcctaggactcatagtgtccagcaggtgctttgaggcattttagccccagttattctctaggcaactaggcttggcacagtgggaactgggcacctcccaggtgatttactgatcctctttgctccttcctttctgccttctcacttttttcccctaaatcttgtactgttcacatcttcagcacctggcctaccatgtaattcagaaatgggtggtaggacagcttctgaagtggcaagtactaaactatagcccattctcttctttagagtttgttgacatttgaagatgtggctgtgtatttttctgaggaagagtggcaattattgaatcctcttgagaagactctctacaatgatgtaatgcaggatatctatgagactgtcatctctctagggttaaagctaaaaaatgacactggaaatgatcatcctatatctgtttctacatcagaaatacaaacatcaggatgcgaagtatcaaaaaagaccagaatgaaaattgcccagaaaacaatgggcagggaaaatcctggtgatacacacagtgtacagaaatggcatcgagcttttccaaggaagaaaagaaagaaacctgcaacttgtaaacaagagcttccaaaacttatggatcttcatgggaaaggccccacaggggagaaaccttttaagtgtcaggaatgtgggaaaagcttcagagttagctctgatcttattaaacaccacagaattcacactggagagaaaccctataaatgtcaacaatgtgacaggaggtttagatggagttcagatcttaataagcacttcatgacccatcaaggaataaaaccatatagatgctcatggtgtgggaaaagctttagtcataacacaaatctacacacacaccaaagaattcacacaggagagaagccctttaaatgtgatgaatgtggaaaaagattcattcagaactcccaccttattaaacaccagagaactcacacaggtgagcagccttatacgtgtagcttatgcaagagaaactttagtaggcgatcgagccttcttagacaccagaaactccacagaagaagggaagcatgtctagtgtctccaaactgaggaaagttaccatgtagagcttgactttagaagtggtgaaagaatacaaaattatgaggcacccaatgataggaatctgtgattaataaaacatttgggaagggtacatgttacacttcacaaaaaggaatctaagctgtctgttttattcagcattgcatcttctgtgcctagcacaagagttgatacataaggagtactttataaataaaaaaatgaaagtgtagtgatgagattcctttagctatctatctatatgtatatatctggttattcaaagcttccccacccccagtcatctaaatttttcaggtatcaagtgctcaacagacatatgatagtcaaggctcttagtctcattttttactctttgtcaagagaaatggaaaataagagtacttgggccctcttaagggagctcagagagaattactaaattagggacagtttcaatagttatcattctgtctacatgaacaatcaagaccaggactcagggaactttactctgtaacagaaagagaggattcagtgtttgccctgggagaattgtcccattcttgttgcttctctcctgagtacccactaccacaatgtcttctgtcaaggaattacaagtagcaagggaaggtctgaatgtaaggacaggcctagggaccttgcaagcacttgatatctctcctcttgctgactttgtcaacatagacatatagtgaaatgatgagggaggcagtcttggccctcatccaggtatctggtttttttttgtagaaagcacagataagtggtaaatggtctttttctgactttcattatgtggactggatggaggctttcaaactggtgccatactgctgcaggacctaaagggagccccatctttatggctgatcaactacaaccctatatgcctgaatactctgcaagaaggcctggagattttgcaaaactgatttattgagaatggcaaggagagccttgtgaacttttagctttggtgcacagctgataccaggagggaacatcctgaagtgtcagagaaaagtaaggcatatggctcacagtgatgatgccagtcagagccaggccagatggaaattgttttctgatgttactggttttcttttccctattagccaaagtgactatctcttaagagaagataatgtgacgtcaagggaagttggaaggcatggatttatatctatgtcagatcctggtttataatgttggccaaggcttatttatatatgtttatttagtattccataaaattgtacttcgtaatgaaaatgacacattttatcttaaatttagacaataaacaaaactttgttaccaaatcactcagaaat

SEQ ID NO: 466600 - DNA, 3394 bp, Homo sapiens
ggaagcaacttctttctaccggatgtacaaatataacccagggatactagtgaagcacactcaaaggttgcccacgttcagagttcttgtgggcatccctgtgcaaatggcgatgagagagctgaacgcggattcatgctcaagcccccagatgggggctatgtgggagactagtgggtctgtgaaagagaactccagtcagagtaagaaatacagcacaaaaatagagaatcttggtcctgagagcgcttgcaggcacttctggagcttccgttatcatgaagcaaccggaccgcttgagactatcagccaacttcagaaattgtgccatcagtggctgaggccagagatccactcaaaagagcagatcttggaaatgctggtgttagagcagttcctgagcattctgcccaaggagacccagaactgggtgcagaagcatcatccacagaatgtcaaacaggctctggtcctggtggaattcttgcagagggagcctgatggaacaaagaatgaggtcacagcccatgagctgggaaaggaggcagtgctcttgggaggaacagcagtggccccaggcttcaagtggaagccagcagagccccaaccaatgggtgtgttccagaaagaatattggaatacataccgggtactacaagaacagctgggctggaacactcacaaagaaacccagcctgtatatgaaagagaaatcagcttgggatgtttgtaaataggaaacagaaattttccctggctattttctacccacagctgtgcatgatcaacagatgttagccctttctgagcagaaaagaatcaaacactggaagatggcatctaaactcatcctgcctgagtccctggtgagctgttatttctggcttttttcaggtgacttgactgtggccttgcctctgcttgtccctattgcctaggactcatagtgtccagcaggtgctttgaggcattttagccccagttattctctaggcaactaggcttggcacagtgggaactgggcacctcccaggtgatttactgatcctctttgctccttcctttctgccttctcacttttttcccctaaatcttgtactgttcacatcttcagcacctggcctaccatgtaattcagaaatgggtggtaggacagcttctgaagtggcaagtactaaactatagcccattctcttctttagagtttgttgacatttgaagatgtggctgtgtatttttctgaggaagagtggcaattattgaatcctcttgagaagactctctacaatgatgtaatgcaggatatctatgagactgtcatctctctagggttaaagctaaaaaatgacactggaaatgatcatcctatatctgtttctacatcagaaatacaaacatcaggatgcgaagtatcaaaaaagaccagaatgaaaattgcccagaaaacaatgggcagggaaaatcctggtgatacacacagtgtacagaaatggcatcgagcttttccaaggaagaaaagaaagaaacctgcaacttgtaaacaagagcttccaaaacttatggatcttcatgggaaaggccccacaggggagaaaccttttaagtgtcaggaatgtgggaaaagcttcagagttagctctgatcttattaaacaccacagaattcacactggagagaaaccctataaatgtcaacaatgtgacaggaggtttagatggagttcagatcttaataagcacttcatgacccatcaaggaataaaaccatatagatgctcatggtgtgggaaaagctttagtcataacacaaatctacacacacaccaaagaattcacacaggagagaagccctttaaatgtgatgaatgtggaaaaagattcattcagaactcccaccttattaaacaccagagaactcacacaggtgagcagccttatacgtgtagcttatgcaagagaaactttagtaggcgatcgagccttcttagacaccagaaactccacagaagaagggaagcatgtctagtgtctccaaactgaggaaagttaccatgtagagcttgactttagaagtggtgaaagaatacaaaattatgaggcacccaatgataggaatctgtgattaataaaacatttgggaagggtacatgttacacttcacaaaaaggaatctaagctgtctgttttattcagcattgcatcttctgtgcctagcacaagagttgatacataaggagtactttataaataaaaaaatgaaagtgtagtgatgagattcctttagctatctatctatatgtatatatctggttattcaaagcttccccacccccagtcatctaaatttttcaggtatcaagtgctcaacagacatatgatagtcaaggctcttagtctcattttttactctttgtcaagagaaatggaaaataagagtacttgggccctcttaagggagctcagagagaattactaaattagggacagtttcaatagttatcattctgtctacatgaacaatcaagaccaggactcagggaactttactctgtaacagaaagagaggattcagtgtttgccctgggagaattgtcccattcttgttgcttctctcctgagtacccactaccacaatgtcttctgtcaaggaattacaagtagcaagggaaggtctgaatgtaaggacaggcctagggaccttgcaagcacttgatatctctcctcttgctgactttgtcaacatagacatatagtgaaatgatgagggaggcagtcttggccctcatccaggtatctggtttttttttgtagaaagcacagataagtggtaaatggtctttttctgactttcattatgtggactggatggaggctttcaaactggtgccatactgctgcaggacctaaagggagccccatctttatggctgatcaactacaaccctatatgcctgaatactctgcaagaaggcctggagattttgcaaaactgatttattgagaatggcaaggagagccttgtgaacttttagctttggtgcacagctgataccaggagggaacatcctgaagtgtcagagaaaagtaaggcatatggctcacagtgatgatgccagtcagagccaggccagatggaaattgttttctgatgttactggttttcttttccctattagccaaagtgactatctcttaagagaagataatgtgacgtcaagggaagttggaaggcatggatttatatctatgtcagatcctggtttataatgttggccaaggcttatttatatatgtttatttagtattccataaaattgtacttcgtaatgaaaatgacacattttatcttaaatttagacaataaacaaaactttgttaccaaatcactcagaaat

SEQ ID NO: 466601 - DNA, 2711 bp, Homo sapiens
gagtatagttctttatgagaacatagtggcacaatacctcttcattctttttattacttctctaatgtcatgcattccccaaatctgggctctgctcttgttcctccctccactaccaccccaaaaccaaaagtaagttctgtgctaatgaggatggggattatttctaggtcacagcccatgagctgggaaaggaggcagtgctcttgggaggaacagcagtggccccaggcttcaagtggaagccagcagagccccaaccaatgggtgtgttccagaaagaatattggaatacataccgggtactacaagaacagctgggctggaacactcacaaagaaacccagcctgtatatgaaagagaaatcagcttgggatgtttgtaaataggaaacagaaattttccctggctattttctacccacagctgtgcatgatcaacagatgttagccctttctgagcagaaaagaatcaaacactggaagatggcatctaaactcatcctgcctgagtccctgagtttgttgacatttgaagatgtggctgtgtatttttctgaggaagagtggcaattattgaatcctcttgagaagactctctacaatgatgtaatgcaggatatctatgagactgtcatctctctagggttaaagctaaaaaatgacactggaaatgatcatcctatatctgtttctacatcagaaatacaaacatcaggatgcgaagtatcaaaaaagaccagaatgaaaattgcccagaaaacaatgggcagggaaaatcctggtgatacacacagtgtacagaaatggcatcgagcttttccaaggaagaaaagaaagaaacctgcaacttgtaaacaagagcttccaaaacttatggatcttcatgggaaaggccccacaggggagaaaccttttaagtgtcaggaatgtgggaaaagcttcagagttagctctgatcttattaaacaccacagaattcacactggagagaaaccctataaatgtcaacaatgtgacaggaggtttagatggagttcagatcttaataagcacttcatgacccatcaaggaataaaaccatatagatgctcatggtgtgggaaaagctttagtcataacacaaatctacacacacaccaaagaattcacacaggagagaagccctttaaatgtgatgaatgtggaaaaagattcattcagaactcccaccttattaaacaccagagaactcacacaggtgagcagccttatacgtgtagcttatgcaagagaaactttagtaggcgatcgagccttcttagacaccagaaactccacagaagaagggaagcatgtctagtgtctccaaactgaggaaagttaccatgtagagcttgactttagaagtggtgaaagaatacaaaattatgaggcacccaatgataggaatctgtgattaataaaacatttgggaagggtacatgttacacttcacaaaaaggaatctaagctgtctgttttattcagcattgcatcttctgtgcctagcacaagagttgatacataaggagtactttataaataaaaaaatgaaagtgtagtgatgagattcctttagctatctatctatatgtatatatctggttattcaaagcttccccacccccagtcatctaaatttttcaggtatcaagtgctcaacagacatatgatagtcaaggctcttagtctcattttttactctttgtcaagagaaatggaaaataagagtacttgggccctcttaagggagctcagagagaattactaaattagggacagtttcaatagttatcattctgtctacatgaacaatcaagaccaggactcagggaactttactctgtaacagaaagagaggattcagtgtttgccctgggagaattgtcccattcttgttgcttctctcctgagtacccactaccacaatgtcttctgtcaaggaattacaagtagcaagggaaggtctgaatgtaaggacaggcctagggaccttgcaagcacttgatatctctcctcttgctgactttgtcaacatagacatatagtgaaatgatgagggaggcagtcttggccctcatccaggtatctggtttttttttgtagaaagcacagataagtggtaaatggtctttttctgactttcattatgtggactggatggaggctttcaaactggtgccatactgctgcaggacctaaagggagccccatctttatggctgatcaactacaaccctatatgcctgaatactctgcaagaaggcctggagattttgcaaaactgatttattgagaatggcaaggagagccttgtgaacttttagctttggtgcacagctgataccaggagggaacatcctgaagtgtcagagaaaagtaaggcatatggctcacagtgatgatgccagtcagagccaggccagatggaaattgttttctgatgttactggttttcttttccctattagccaaagtgactatctcttaagagaagataatgtgacgtcaagggaagttggaaggcatggatttatatctatgtcagatcctggtttataatgttggccaaggcttatttatatatgtttatttagtattccataaaattgtacttcgtaatgaaaatgacacattttatcttaaatttagacaataaacaaaactttgttaccaaatcactcagaaat

SEQ ID NO: 466602 - DNA, 907 bp, Homo sapiens
ggaagcaacttctttctaccggatgtacaaatataacccagggatactagtgaagcacactcaaaggttgcccacgttcagagttcttgtgggcatccctgtgcaaatggcgatgagagagctgaacgcggattcatgctcaagcccccagatgggggctatgtgggagactagtgggtctgtgaaagagaactccagtcagagtaagaaatacagcacaaaaatagagaatcttggtcctgagagcgcttgcaggcacttctggagcttccgttatcatgaagcaaccggaccgcttgagactatcagccaacttcagaaattgtgccatcagtggctgaggccagagatccactcaaaagagcagatcttggaaatgctggtgttagagcagttcctgagcattctgcccaaggagacccagaactgggtgcagaagcatcatccacagaatgtcaaacaggctctggtcctggtggaattcttgcagagggagcctgatggaacaaagaatgaggtcacagcccatgagctgggaaaggaggcagtgctcttgggaggaacagcagtggccccaggcttcaagtggaagccagcagagccccaaccaatgggtgtgttccagaaagaatattggaatacataccgggtactacaagaacagctgggctggaacactcacaaagaaacccagcctgtatatgaaagagaaatcagcttgggatgtttgtaaataggaaacagaaattttccctggctattttctacccacagctgtgcatgatcaacagatgttagccctttctgagcagaaaagaatcaaacactggaagatggcatctaaactcatcctgcctgagtccctggtagtgtgtcgacgacattaagatgtctctctgtatattct

SEQ ID NO: 466603 - DNA, 1938 bp, Homo sapiens
catagaatttctggaatttactatgataaagaaagaagaaaaaggctctggtgagaaacccattgtaccttctggatatgatcactacccaattttatcagtgtcattgatcactaacccagtgcctcgtatggtgccaggcacagagttactccaagaatgtacaataatggctggattctctttctccctgtgcaactcttcatgcatatttgaagggcagctgtcctcaggagacccctggcacttccctccatggtgggatgtgatgcctgattccagtgagttcatagagctgaacaaaaggaggcagcagatggctgaaattctgatccgatgtggctggttaatgcatgatctgaaaacccctgcactggtgattttgggacagatctagaatataccaataaatatattaacataccaagtagtctaggagcagccactgggcgaacaccaaaccttgcatccctgctgctgtctctgagctcagcagacacgtctttgcagaagagttctataatggtggtacaatggtgccccctcgtgacagaagcttgaactacagcttgaacatcgagatgaaaatatactgtctacgttgttcaacacaatagctaatggcaactgtggcagttgaacacccgaaacgtgatgaatgtgactgaggaactgaacttttagtttcattgtgacatgatgaatgaatttattgagccccaggaagaaggaaaattaaagaagagcaaagaataatagctggacagaagatgggggtcattgaacctatatcctagttgccagaccagtaaactgaccatgggacctgggggaggcagcagatgaccgaaaacctggagtgatgtggctgaataccgcatgatctgaagactgcactggtggctgcggtatgggtccaaatttttccttaacaaaaacaaaaaaagagcccaaaaccatactgactagtccaggaatagccattaggcaaacaactttttgctaccctggtgttaccgatttctgaactcaacaggtgaattcaaagatatgcctgtctttccagcatggggagctggatttgggtcagctcaggcgcatgatgttgaacagctcttatgagcttctgatagtgcccaggaagtacagaaacaactgtctacaaatctttgaactcaaggcatatcacagggacatttgctttcttcaactagatatctgttttctcataaagagaaacaatgagaaatggtttttcacaatgcctcgttagccctgaggctcagccatcccctagtgctgtgtcccaacatttaaaggccgttgaagtcccactctatgccatatactctgtacaggttttctcatttacccctcaggacagcactgtaaggatggtgtggtcagtcccatttcatagatgaccaaactcaggctttcagagcctaagtcacttctccagataggtggtaggattgaaatgaggttccatccctcatcatccatagacagccctgagtagcctcccttttagaagatgggcttccagggcttgagaaatggtcagattccacccccctgctattgtggaccaatgcgtcctcactccacaacccctctgggtgatgaagaagatagagaagattaaatcccaccatttatgccaagagacctgggtgtagggccacatgagttggttgcttctcgaagtggtgagtgggctcaggcagaagctcaagtgttggccttgggacaggtgagctggagagaaggaaagtaacatacactaaactactgtaagaaaatgcactttatatttcatctcctttaatcttaactgctattcaaggtacctatcactttgacaattattcaaatcagggtactttaggaaagtttatgtaaagcagggaataaactcttttctctccagttcag

SEQ ID NO: 466604 - DNA, 413 bp, Homo sapiens
ttaagtgtctgaaggaggttcgttctgaggatctgggacatgatgggtgctgaagcttctactcaagatttgaagggcagctgtcctcaggagacccctggcacttccctccatggtgggatgtgatgcctgattccagtgagttcatagagctgaacaaaagtacgttgtggaatagctcctgtgaggttcacaacatagtccggaagatgagaaactactttttttagtaacctggattcccatctaagagatgccttactttatcgtaaagcaatgagttgttcacttgaggagggaacttcatgtttaacatgtatttgcaacaaatttacatacattttctgcctgtatgaatagttgtcagtgatgcccatgaatttctcagatggatgttgaagtatacagttaga

SEQ ID NO: 466605 - DNA, 1827 bp, Homo sapiens
catagaatttctggaatttactatgataaagaaagaagaaaaaggctctggtgagaaacccattgtaccttctggatatgatcactacccaattttatcagtgtcattgatcactaacccagtgcctcgtatggtgccaggcacagagttactccaagaatgtacaataatggctggattctctttctccctgtgcaactcttcatgcatatttgaagggcagctgtcctcaggagacccctggcacttccctccatggtgggatgtgatgcctgattccagtgagttcatagagctgaacaaaaggaggcagcagatggctgaaattctgatccgatgtggctggttaatgcatgatctgaaaacccctgcactggtgattttgggacagatctagaatataccaataaatatattaacataccaagtagtctaggagcagccactgggcgaacaccaaaccttgcatccctgctgctgtctctgagctcagcagacacgtctttgcagaagagttctataatggtggtacaatggtgccccctcgtgacagaagcttgaactacagcttgaacatcgtgtgacatgatgaatgaatttattgagccccaggaagaaggaaaattaaagaagagcaaagaataatagctggacagaagatgggggtcattgaacctatatcctagttgccagaccagtaaactgaccatgggacctgggggaggcagcagatgaccgaaaacctggagtgatgtggctgaataccgcatgatctgaagactgcactggtggctgcggtatgggtccaaatttttccttaacaaaaacaaaaaaagagcccaaaaccatactgactagtccaggaatagccattaggcaaacaactttttgctaccctggtgttaccgatttctgaactcaacaggtgaattcaaagatatgcctgtctttccagcatggggagctggatttgggtcagctcaggcgcatgatgttgaacagctcttatgagcttctgatagtgcccaggaagtacagaaacaactgtctacaaatctttgaactcaaggcatatcacagggacatttgctttcttcaactagatatctgttttctcataaagagaaacaatgagaaatggtttttcacaatgcctcgttagccctgaggctcagccatcccctagtgctgtgtcccaacatttaaaggccgttgaagtcccactctatgccatatactctgtacaggttttctcatttacccctcaggacagcactgtaaggatggtgtggtcagtcccatttcatagatgaccaaactcaggctttcagagcctaagtcacttctccagataggtggtaggattgaaatgaggttccatccctcatcatccatagacagccctgagtagcctcccttttagaagatgggcttccagggcttgagaaatggtcagattccacccccctgctattgtggaccaatgcgtcctcactccacaacccctctgggtgatgaagaagatagagaagattaaatcccaccatttatgccaagagacctgggtgtagggccacatgagttggttgcttctcgaagtggtgagtgggctcaggcagaagctcaagtgttggccttgggacaggtgagctggagagaaggaaagtaacatacactaaactactgtaagaaaatgcactttatatttcatctcctttaatcttaactgctattcaaggtacctatcactttgacaattattcaaatcagggtactttaggaaagtttatgtaaagcagggaataaactcttttctctccagttcag

SEQ ID NO: 466606 - DNA, 2043 bp, Homo sapiens
ggccctcggcctctttgcacccggcagagtgacgagcttcgccggtgtcttcaacgaagtcctgtcggtccctaccggcacatcacacactcctggaagcatgatcttcactcccttccttccacctgctgacctgtctgtctttcagaatgtgaaagggctgcaaaacgaccctgaggaatgggtggctgtgtctgacgccacggaggacccatccggtggcacaggcttgcccagggaacctgctcttctgcgagggtcttggaggagccggttccagagagccctggcatgtttcaccaagtgtttcaggggaggataccgggcactcggaatctgagaccaccggagccacagacacagagccatgaacggtgaccaagccccttctgctgctccatgcccctgctcgccgcagtgtcccagtcaccaggcctgaaataaatgctggcacgcttgactgtttttgctttgtggcatttgatgtaactttcaacacgtcgggtgaagtgggggtggtcagctttggtggtggtggggttgtggagggagagagctagcatcttcctgagccctgttaggctgtccgccctcctcctcgaggcagcgctgcttgttcctgggtcctggtggcgatgggctgtggccaatcaatggtgagttttccacagctggcagctcggaccctgcctgagattgcaaccacactggcactgtcccaggtactgatacttgctccagccatggctctagccctggcactggcaactggcacttgcattggtgctggtgctgatgcttgcttcagccatggcataggccctggaactggaactggcactaacactggcacttgtcacgtcaccaacggcagctgccatctcgggcacggggtatctcctcctcttctctcaatgcctcatttactgccacggaaaggaactggggggtttctggggtccacaaaggaactttcagaagcacctgagcaggggctccatgcctcagaagaagtgctcccagggctccggggagcacttggtgtccccgctgcaggcgcccccgtgggggtttcttgggcaaggaggagaggagcaggccaccgggcctctgagacccgcaggccctgggtgtcacctctaccgcggacgttctcacctgcggctttggctggcccaggaagcaggaactctgggaagagatgcgcgtccacgggcattcggcggccggagcgctgtgtgccaggccgagaggacagtgacgtcgccgcggctgctgcggcggctgctaagaagacccggagccccagggtcttgagtcggagaccgccgccctcagaccgggaggaggaggagaaggaggaggaggaggaggaggaggaggaggaggaggagcaggaggaggaggaggaggaggaggaggaggaggaggaggaggaggaggaggaggaggaggaggaggaagaagcgggaggggagggggctaagcctccgccgcccgggtcttcccggagctgtgggaatgggcgggcgccgccccgcagtgcctcttctggcagaaaacagtaccgcaggctacagcctgagggatgcgggggcgctgctcccagaggtggggctgctcatgtgaggcttgaaagagaccataagcctaaaagccaggcccagtgtaagcgcttaataactgttacctgttgttgtgatgaatccgatcattctggattatcttcgtatccctccttctctcctgtggagaaggctcctaagagcgtaggcatttctgtccagcggctgcctctgcagcttcctcttcagatcatctacctgaagttgctttgctcagtgcctggcctagagtaagcacttaggtacttcaatcaccttttagtttgctttatatagcttttgcataattcttaagtttgtccatggcagtctttttagtttcattgctgctatgaattgtgtatttcccattatgtcttctaattacttatttctgacatataggaagcctactggttttgtatactttggggcatac

SEQ ID NO: 466607 - DNA, 1260 bp, Homo sapiens
catcacactacctgacttcaaactatactacaaggctacagtaacaaaaacagcatggtactggcagccagtgaccaaggcttagaacctgccccagaccacaagcctccccattacaaatgcaagcagactcacagtttttcagcatctaagggagcctgcagccatgatccagtttctttaaaggtctgtggattctcccagctttcctggtatgttcctgcagcagttcttggagaaaaaattcacagtgtgattctccacacactgctctgtccatccaagtgggagctgcaagctagtcctgctgcctcctatctgagtaaagaggcaaggagagagagggtttatgagaacctggattggaaagctacacggagaatgcaaccttacctgactcttcataaccttgtaaaaggacacagcttatctgcagttaataaccggcagagaaagagcagaaggatataagaacatcaacttaatttcccaacttcactgtgatctgcctatcaacccacacccatggaacaatcctaatcagaagacacaaggtatgagactgacagaggagtctctgtcttacgcattgtctgtcatgtaccagttggaaaagagagtgctggattattggcaattaaatactcaatttgtaagttacatctgctcacaattaattgaccacaattagtcatgtgacttcacacaaccgcgttggacctaaatgtgcaatcttatcatgtatctaaaacactgagagccaggaaatatgatgaccaaaccactgtgaagctaaggatactttccttgtgaagattgagcatggaagatagtggcagatagaccaccagatgtgtccaacaacaaagcaaattaagtcactggaaaagagaaaatatatattaataaacattaataaatatatttattatagtcttatttccatttatattgtgaaagaattttatagtttaagtaacatctcttgcctttctataaattagcatattgtgaagtttttattaaagaacaccattattgagcaaatgacattagaaaatacaattaggaaagaaataatatagatactaatcataaaattaatattatctaaggagttttttaaaagttgatagaaacttggttatagtgtttcaacttaaaatggtatattaaatagtatcaaacaatattttttcatttactcattcttctgacaggcatttaaggaatgctaatgtcatttgggaactgcaaatc

SEQ ID NO: 466608 - DNA, 1242 bp, Homo sapiens
caggcaggctgcaggcagcggataggacacagagacagacagacagacacacgcgcgggggatcgaagaccgcccagatacccaagatgcccactggatagagtgattaaccatccctgttaatgtggaacagagaggtttcctgggatactggactttcagtggtaaaagttggaaagtctaagctggctggcaaaatgtaataatgtgaaagaagaaaactctaggaagaaacttcaacagtaaaatgaaataaaatactaagaggattttcaggaaacgctgtttggaaggcagaagggagacgggacaaatagcaagattttaaagtgaagaggccggcccaatataggccctcgggagctggaaaggaaggccacctagtggcgtttgagcgaaggacacagcttatctgcagttaataaccggcagagaaagagcagaaggatataagaacatcaacttaatttcccaacttcactgtgatctgcctatcaacccacacccatggaacaatcctaatcagaagacacaaggtatgagactgacagaggagtctctgtcttacgcattgtctgtcatgtaccagttggaaaagagagtgctggattattggcaattaaatactcaatttgtaagttacatctgctcacaattaattgaccacaattagtcatgtgacttcacacaaccgcgttggacctaaatgtgcaatcttatcatgtatctaaaacactgagagccaggaaatatgatgaccaaaccactgtgaagctaaggatactttccttgtgaagattgagcatggaagatagtggcagatagaccaccagatgtgtccaacaacaaagcaaattaagtcactggaaaagagaaaatatatattaataaacattaataaatatatttattatagtcttatttccatttatattgtgaaagaattttatagtttaagtaacatctcttgcctttctataaattagcatattgtgaagtttttattaaagaacaccattattgagcaaatgacattagaaaatacaattaggaaagaaataatatagatactaatcataaaattaatattatctaaggagttttttaaaagttgatagaaacttggttatagtgtttcaacttaaaatggtatattaaatagtatcaaacaatattttttcatttactcattcttctgacaggcatttaaggaatgctaatgtcatttgggaactgcaaatc

SEQ ID NO: 466609 - DNA, 1396 bp, Homo sapiens
gatactcagatacccatctggcttcctggctttcctatctagtatgattgccccttctcctaagagcagtgaagaggaagggcaaaaggatgaagaagttcttcagggagaacaaggagattttaatgataatgataccgaaccagaaaatctgggtcacaggcctctcctcatggattctgaagatgaggaagaagaggagaaacgtagctctgattctgattatgagcaggctaaagcaaagtacagtgatatgagccctgtctacagagacaaatctggcagtggaccaacccaagatattaatacaatactcctcacctcagcccaattgtcctctgatgttggagtggagactcctaaacaggagttcgatatatttggcgccgtccccttctttgcagtgtgtgctcaacagccccagcaagaaaagaatgaaaagagcctccctcaacacaggtttcctgctacgggactccagcaggaggaatttgatgtattcacaaaggcgccttttagcaagaaggtgaatgtacaagaatgccatgcggtggggcctgagacacatcccaaaagcatagatatatttgacttcactccatttcagcccttcctcacatcaacaagtaaaagtgaaagcaacgaggacctttttgggcttgtgccctttgaggaaataatggggagccagcagcaaaaagtcaaacagcgcagcttacagaaactgtcctctcgccaaaggcgcacaaagcaggatatgtccaaaagtaatgggaagcggcatcatggcacgccaactagcaaaaagaagactttgaagcctacctaccgcactccagagagggctcgcaggcacaaaaaagtgggtcgccgagtctctcaaaccagcaatgaatttgtaaccatctcagactccaaggagaacattggtgccgcagtgactgatgggaacgatagggggaacgtcttacaactcgaggagagtctgttggacccctttggtgccaagcccttccatcctccagacctgtcatggcaccctctacatcagggcctgaatgacatccgtgctgatcacaatactgtcctgcctaagcagccaaggcaaaattcactacatgggtcattccatagtgcagatgtattgacaatggatgattttggtgccatgccctttacagaacttgtggtgcaaagcatcactctacagcagtcccaacagtcccaaccagtcgaattagacccatttgaatcatggtcaaagtgtaggtcactccacacagctgatgctcaggtcattgcattatgagaattatgagaataaagctctcaagctttcagtttaggctggtcttttagagttccttgaggtataatgttagtttggatttttaag

SEQ ID NO: 466610 - DNA, 1121 bp, Homo sapiens
  misc_feature (1112)..(1113): n is a, c, g, or t
  misc_feature (1115)..(1115): n is a, c, g, or t
  misc_feature (1118)..(1118): n is a, c, g, or t
  misc_feature (1120)..(1120): n is a, c, g, or t
aatagaaagtttcttccttgggcaaggggtagggagaaggaatgtttctctaagatagaaagatctacaaaatcacttctttatagaccaagagtatgtctcagagccatcatctttaagccttggaattttaagatgcatattcccttctcgtcgtaggtctcctcgattataccacaaaatggctaaccaaagcagccacagacatcactacactatgtccgagttctcctgactcacctagctcctcctgcagcatggcgtgttcacttccaagcggggcaggtaacaattcagagccccccagtccaacaatggtgctataccaaggctacctgaacctcctcctctgggatcttgaaaacgtagaattcccagagactctgctgatggacagaatccggctccaggaactggcattccagttgcaccagttaactgtcctggcctcagtcttgctagtggccagaagcttctctggtgaagttttattcagatcacctgaatttgtggatagactgaaatgcaccaccaaggccctaactgaggaatttatctccaggcctgaagagactatgctgagtgtgagtgaacaggtgtctcaggaagtccatcaaggccttaaggacatgggcctcactactctgagcagtgaaaacacagcatctcttctaggccaactccagaacatcaccaagaaagagaactgcattcgtagcattgttggtaagaatctccatggtcgtcgtgcagaaaagtggcaagaatgtggggcatgggtgggtagaccttaccctgaatatcagtggatccgtttttttctcaaatgctgtttgcttcatggcatgcaggagtctctgctacactttcctggaggcctcattctcattgaaaaggagttggcagaactgggctggaagtttctcaatctgatgcatcataatcagcaggtatttggcccatactatgctgagatcctaaaacacatcatccatccagctcaagcacaagaaacagatgtggagcctaactgatagtgctggaccccagctatggcaacagggactcaggagagagaggtcagcatgtttctgggaggacatcacctgtgnntngcnanc

SEQ ID NO: 466611 - DNA, 763 bp, Homo sapiens
ccaataaaggtctcccatgctgagaaaaataatcatggcatctcatgaaggaaagactagtccaagaggattaagttcttctgttgtctggatggatgatcttgtgttccccagattttgcccatgatttccttctcatgcttatttgcaaaagattacacacattcatcccagcttagattaaaacagcttccaaagcccttgagggcaactgtcttagagtaacctctctgtgggaagagtaactttatgaaaaataagtatgtggaatcgtgttggagaaatgtctttagacttatgatcagaaatatctatgtattctgtatatttgtattattgaaatgtatcgataacaaaactttttatctgcacacacacacacacacacacacacacccctggttccaggagcccggtgatgaggagcctcagcaagaggaaccaccaactgaaagtcgggatcctgcacctggtcaggagagagaagaagatcagggtgcagctgagactcaagtgcctgacctggaagctgatctccaggagctgtctcagtcaaagactgggggtgaatgtggaaatggtcctgatgaccaggggaagattctgccaaaatcagaacaatttaaaatgccagaaggaggtgacaggcaaccacaggtttaaatgaagacaagctgaaacaacacaaaactgtttttatctaagatatttgacttaaaaatatcgaaataaacttttgcagctttctccaaaaaaagtcttg

SEQ ID NO: 466612 - DNA, 371 bp, Homo sapiens
aagccgtggtcactgcagttttaattctctggctgtattttcccaaatgtctccacggaggagagttcagttgtgaaaccaaacctcatcggaaatatcctgtcttttgccaggagccttaagaaattgctcagctagcttgaccaacttaatggcttcccaagcattcagaaggcacacatacttacacttgccctgagacttagttcgaaagtatttacaaacttttaaaaaatgacaagttaatatttggtcatggaagtggtcaaatatagctgtcttttcaagtgcatttaccaattcacagtattctgtttgcagtgtgaaatatgatttggcgaggaagatcaacatataggcctaggccgagg

SEQ ID NO: 466613 - DNA, 547 bp, Homo sapiens
ccctcggccccttttcccacgtggtgaatgccctggagttgtgagggtgtgagggtcgcgttcctgctgtctggactttttctgtcccactgagacgcagctgtgtgaaatatgatttggcgaggaagatcaacatataggcctaggccgaggagaagtgtaccacctcctgagctgattgggcctatgctggagcccggtgatgaggagcctcagcaagaggaaccaccaactgaaagtcgggatcctgcacctggtcaggagagagaagaagatcagggtgcagctgagactcaagtgcctgacctggaagctgatctccaggagctgtctcagtcaaagactgggggtgaatgtggaaatggtcctgatgaccaggggaagattctgccaaaatcagaacaatttaaaatgccagaaggaggtgacaggcaaccacaggtttaaatgaagacaagctgaaacaacacaaaactgtttttatctaagatatttgacttaaaaatatcgaaataaacttttgcagctttctccaaaaaaagtcttg

SEQ ID NO: 466614 - DNA, 1305 bp, Homo sapiens
ggctattccatcatggcgaggatggcggtactgtggcggaagatgagagataacttccagagcaaggagttccgggaatacgtgagcagcactcacttctggggtcccgcgttcagctggggccttccgctggctgcctttaaagacatgaaggcgtcgccggagatcatcagtggccgcatgacaacagcgctcatcttgtactcggcgatcttcatgcgcttcgcctaccgcgtacagcctcgaaacctgctgctgatggcgtgccactgtaccaacgtgatggcgcagagtgtgcaggccagtcgctacctactctactactacggcggcggcggcgccgaggctaaagcccgcgaccctccggctaccgccgccgctgccaccagcccgggttcccagcccccgaaacaagcttcttaagaactgagagggcctgatctcatctctgcaggtcacaagcactgaactgccattcctcctgaaaaaagaccaatgaagacctcggttttgactctaaaacagtgcgaatctgacttaaacctgcagtttgattaataaagaaatacaaagtaacattgaaccgaagttgagtgttgccttttttgtaaactgaaaatgttttttagaaggggagggtggattagctggtctttctcttcacaggacctgcaactcaagatagtttatatgggggaggaagactttgaatgaaaagcacttcacagtattcactaactcgtagcttttttgttttttttttaaagctctcttgggaacgtatttctgttacttgttttggatgtccagagcgaacagggttgcttagtatcacacatgactcacagcttggtgcagtcacaaatctgtatatcaaaaaaagtctgggggctctttctactgagggaaatgtttcgaagtgggttttaaatgaatgtcgtgaggtacagtgtagcctcaagagaacctaggatctcttggcgacggagagcaattatagaatctgccatggagacaggataaacaattctgaggacaattgccatcaaccctggattctaggtaaataggaatcttgggggttcctacggattcttaaaccacagagccgagaaaagggaaacgagaagggtggggtggtggggcagtaggctaaggccattacctacatagcagaggctgccctctacgatttgacccaaaaatttcccctgtccctgcctctgaaggatgcggaaagttccagagtgtttactggtgaaccccaaagtaggtgtttagaagtgtttgaaccctgctttagat

SEQ ID NO: 466615 - DNA, 2000 bp, Homo sapiens
agtttttggcaattatgagtagagctactttaaacaatcatgcacagggttttgtgtgaacataggttttcatttctgtggagtaaatattggattactaggtcatatggggctagtgacatttgaagatgtagctgtggatttcacccaggaggagtggcagtacctgaacccaccacagaggaccctgtacagagacgtgatgctggagacctacagcaacttggtctttgtggggcagcaggttaccaaaccaaacctcatcctcaagttggaggtagaagaatgcccggcagaaggaaaaatcccattttggaactttccagaagtctgtcaagttgatgaacagattgagaggcaacatcaggatgaccaagataaatgtctgctgatgcaagttggattttctgacaagaaaacaattatcaccaagagtgctcgtgactgtcatgagtttggaaacatacttcatctgagtacaaaccttgttgcttcaatacaaagacccgataaacacgaatcatttggaaataatatggtagataatttagacttatttagtagaagttctgcagaaaataaatatgataatggatgtgcaaaattgttcttccatactgagtatgagaaaacaaatcctggaatgaagccctatggctataaagagtgtgggaaaggtcttaggcgaaagaaaggccttagtctacatcagagaattaaaaatggagagaaaccctttgaatgtactgcatgtaggaaaaccttcagcaagaagtcacacctcattgtacattggagaactcatacgggagagaaaccttttggatgtaccgaatgtggaaaagcttttagccaaaaatctcagctcattatacacttgcgaactcatacaggagagagaccctttgagtgtcctgaatgtggaaaagccttcagagaaaagtcaactgtcatcatacattacaggactcacacaggagaaaaaccttatgaatgtaatgaatgtggaaaagccttcactcagaagtccaacctcattgtccatcagaaaacccacactggagagaaaacctatgaatgcactaaatgtggagaatctttcatacagaagcttgatctaattatacatcatagtacccatacaggaaagaaaccccatgaatgtaatgagtgtaagaaaactttcagtgataagtcaactctcattatacaccagagaactcatacgggagagaaacctcataaatgtactgaatgtgggaagtctttcaatgagaagtcaaccctcattgtgcatcaaagaactcatacaggagagaaaccctatgaatgtgatgtgtgtggaaaaaccttcacgcaaaagtcaaaccttggtgtacatcagagaactcattcaggagagaaaccctttgaatgtaatgaatgtgagaaagccttctctcagaagtcctacctcatgctgcatcagagaggtcatacaggagagaaaccttacgagtgcaatgaatgtgaaaaagcattttcacagaaatcatatctcattatacatcaaagaactcatacagaagaaaaaccctataaatgtaatgaatgtggcaaagccttcagagaaaaagaacgcacacgggagagaaaccctatgcatgcactgagtgtggcaaagccttccgagaaaagtcaacattcactgtacatcaaagaactcatactggagagaaaccctataaatgtacagaatgtgggaaagcctttacccaaaaatcaaaccttattgtacatcagcgaacccatgcaggaaagaaagcccatggaagaggccacactcggaagtcaaagttcatggcacattagagagctaatcagcagtatctattatggacactgaaagaaagttgtgtcaattttactcacattttaaaagtatattttgacttgtggtttaaatatgggagtaaattcagcctttcttcttttcatctcagtcataacccaaaagctac

SEQ ID NO: 466616 - DNA, 890 bp, Homo sapiens
tgccctcaagatgaccaagtgggagacagaagcaccagtggtggcagaaacccctgacatcaagttctttgggaagtggagcactgatgatgcacagatcagtgacatttcccttcaggattacattgcagtgaaggagaagtataccaagtacctgcctcacagcatagggctgcaagaaccctctgcaggttctggtgaatgccagcatcaaatgtggccctgggaggactccacatatatcgagcaagctgagactgtgagacagcaggatgtggacatgtccccactgtaccatgtgaatcaagccatctggctgctgtacacagggcaggccctaatccactatgactgctgtccttataagaggaggaaatttgaacacagacacacacagagaggagaccatgaagacacagggagaagacaactatctccaagccaaggaaagaggccacagaagaaaccaatcctgccaactccttgatcttggcacctagtctccagaattgaagtcaactgccattttatgagctgtgagctgccctatggagaggtccacatggtaaggaactgatgtctctggccaacagccagagaggactgaatccttctagctaccacagaagtgagtttggaagcagatccttccccaagctgagccttcagatgagaccacagaccatgcactgcaccttgattgcagccttctgagagaccctaagccagagacatccaactacaccatgctcaagttgctgacccacagataccatgagataataaatgttgtcttaagctactgattttggggtaatttgctttgaagtaatagatagctaatgcaatcttcaataatataatgatctaaaataaaatacttttgttta

SEQ ID NO: 466617 - DNA, 1328 bp, Homo sapiens
ggtacgttcctcatgaaagggacgacgggagctgcatgaaagccgaagttatggaccgctagcatctgtcactggccaccggtttccgggagtaagcggcagctaccttacagccctgacacgagccgggtgctctctcttctcaccgcggcccacgtctcctcgctggctccggtggcctcgctgggtcgcgaggaggcggaggactgtactctgaggccaaaagccagagtcggccctgaacgcccacgactctcagggtccagaggccgtgagaccggccgcggctgaaaggtaaagaaaccaagtggaagagtgtttcctcctctggccgtaaagcagctgtccccgccctactccggaccgccccaaagactccatgggatggacctgagtcagccgaatcctagccccttcccttgggcctgctgtggtgctcgacatcagtgacagacggaagcagcagaccatcaaggctacgggaggcccggggcgcttgcgaagatgaagtttggctgcctctccttccggcagccttatgctggctttgtcttaaatggaatcaagactgtggagacgcgctggcgtcctctgctgagcagccagcggaactgtaccatcgccgtccacattgctcacagggactgggaaggcgatgcctgtcgggagctgctggtggagagactcgggatgactcctgctcagattcaggccttgctcaggaaaggggaaaagtttggtcgaggagtgatagcgggactcgttgacattggggaaactttgcaatgccccgaagacttaactcccgatgaggttgtggaactagaaaatcaagctgcactgaccaacctgaagcagaagtacctgactgtgatttcaaaccccaggtggttactggagcccatacctaggaaaggaggcaaggatgtattccaggtagacatcccagagcacctgatccctttggggcatgaagtgtgacaagtgtgggctcctgaaaggaatgttccagagaaaccagctaaatcatggcaccttcaatttgccatcgtgacgcagacctgtataaattaggttaaagatgaatttccactgctttggagagtcccacccactaagcactgtgcatgtaaacaggttcctttgctcagatgaaggaagtagggggtggggctttccttgtgtgatgcctccttaggcacacaggcaatgtctcaagtactttgaccttagggtagaaggcaaagctgccagtaaatgtctcagcattgctgctaattttggtcctgctagtttctggattgtacaaataaatgtgttgtagatga

SEQ ID NO: 466618 - DNA, 1068 bp, Homo sapiens
atgacctttcctctttatcttccttgttgtgcaggtaaagaaaccaagtggaagagtgtttcctcctctggccgtaaagcagctgtccccgccctactccggaccgccccaaagactccatgggatggacctgagtcagccgaatcctagccccttcccttgggcctgctgtggtgctcgacatcagtgacagacggaagcagcagaccatcaaggctacgggaggcccggggcgcttgcgaagatgaagtttggctgcctctccttccggcagccttatgctggctttgtcttaaatggaatcaagactgtggagacgcgctggcgtcctctgctgagcagccagcggaactgtaccatcgccgtccacattgctcacagggactgggaaggcgatgcctgtcgggagctgctggtggagagactcgggatgactcctgctcagattcaggccttgctcaggaaaggggaaaagtttggtcgaggagtgatagcgggactcgttgacattggggaaactttgcaatgccccgaagacttaactcccgatgaggttgtggaactagaaaatcaagctgcactgaccaacctgaagcagaagtacctgactgtgatttcaaaccccaggtggttactggagcccatacctaggaaaggaggcaaggatgtattccaggtagacatcccagagcacctgatccctttggggcatgaagtgtgacaagtgtgggctcctgaaaggaatgttccagagaaaccagctaaatcatggcaccttcaatttgccatcgtgacgcagacctgtataaattaggttaaagatgaatttccactgctttggagagtcccacccactaagcactgtgcatgtaaacaggttcctttgctcagatgaaggaagtagggggtggggctttccttgtgtgatgcctccttaggcacacaggcaatgtctcaagtactttgaccttagggtagaaggcaaagctgccagtaaatgtctcagcattgctgctaattttggtcctgctagtttctggattgtacaaataaatgtgttgtagatga

SEQ ID NO: 466619 - DNA, 670 bp, Homo sapiens
tttttccgccccctttttgggccccctttgttgcacgaaaaccggggtgcgcctatctttggggccccccccgggggtttttttttttggccccccccccttttttttttttttttttttttgttttttgtttgtttttttttgtaggtggtgaggttgtggaactagaaaatcaagctgcactgaccaacctgaagcagaagtacctgactgtgatttcaaaccccaggtggttactggagcccatacctaggaaaggaggcaaggatgtattccaggtagacatcccagagcacctgatccctttggggcatgaagtgtgacaagtgtgggctcctgaaaggaatgttccagagaaaccagctaaatcatggcaccttcaatttgccatcgtgacgcagacctgtataaattaggttaaagatgaatttccactgctttggagagtcccacccactaagcactgtgcatgtaaacaggttcctttgctcagatgaaggaagtagggggtggggctttccttgtgtgatgcctccttaggcacacaggcaatgtctcaagtactttgaccttagggtagaaggcaaagctgccagtaaatgtctcagcattgctgctaattttggtcctgctagtttctggattgtacaaataaatgtgttgtagatga

SEQ ID NO: 466620 - DNA, 953 bp, Homo sapiens
ggtacgttcctcatgaaagggacgacgggagctgcatgaaagccgaagttatggaccgctagcatctgtcactggccaccggtttccgggagtaagcggcagctaccttacagccctgacacgagccgggtgctctctcttctcaccgcggcccacgtctcctcgctggctccggtggcctcgctgggtcgcgaggaggcggaggactgtactctgaggccaaaagccagagtcggccctgaacgcccacgactctcagggtccagaggccgtgagaccggccgcggctgaaaggtaccagggcccctgatgccggagcccgtgtgctcggccctcttgcagacggtacttgcgggctggggtttctttcccctgggtttcgggcagagaacccgtgcggggcgcgcccgaagcgccctttggtgtcccttgctctccccatggtctcggcccccctccttctaagcgcgtgtacccgcgacctgcgtctgcaagtgctgctccacacacagcggccccatctcggcccggtcttccctgcctcccgcttggcccctgtgctgtaagctcgcctggaccccaggccgggcggtgcatagctctgtggcctgtggccccgtgctcagcatgacctaaccagaattaagcagtggacaatgggatttaggccccccaaaccctcgtccgatgacaatgggaggggaagtgtgatttttctcccctcggatggagcgtgctcagctgtaggaatgtgactcaacttgctgaaatgattttctgctctgcggactggtgcaccctgtgacccagacagatgtggagggtcccaccgctctgattagcagaaccaaaccgtgagtgaggtgcacatgtgttattcttaggaccggccctcccagctcttggtttccaatgcctgctgagtagaagaccttcctagggccattaaccag

SEQ ID NO: 466621 - DNA, 419 bp, Homo sapiens
ggtacgttcctcatgaaagggacgacgggagctgcatgaaagccgaagttatggaccgctagcatctgtcactggccaccggtttccgggagtaagcggcagctaccttacagccctgacacgagccgggtgctctctcttctcaccgcggcccacgtctcctcgctggctccggtggcctcgctgggtcgcgaggaggcggaggactgtactctgaggccaaaagccagagtcggccctgaacgcccacgactctcagggtccagaggccgtgagaccggccgcggctgaaaggtaaagaaaccaagtggaagagtgtttcctcctctggccgtaaagcagctcgcccctgagttgcagctcgctcctgagttgcagctcgcgcctgagtgctgctcgcccctgagttgcagctcgcg

SEQ ID NO: 466622 - DNA, 454 bp, Homo sapiens
aaaggaaggacagagagaggagtaggggcagctcaagggtggagttcagggccagggggcggggccacgggcctgaggggtgagggcggccactatttctgactgttctgttaggtgccacgtactgggctgggtgctcttggtgccttatctcccttcctcacagccatgtggaaactggatcttggctcatggcttggtcctcgtgcctgtccaaaacctcgctggaatctggatttggatcaggtgaagaaccagatgggcccccgcttgttggctctccaccaacagatggggccagcttggcttcatattcctgttcagtgttctgactcgccatggagctacaccagaatcaggagcattttgtacccaaggcccttatcactgtcctagcaagtccaaaatgccttcagtcagagtaggcgtgcccaataaatactgtccacaaaat

SEQ ID NO: 466623 - DNA, 1379 bp, Homo sapiens
ggtacgttcctcatgaaagggacgacgggagctgcatgaaagccgaagttatggaccgctagcatctgtcactggccaccggtttccgggagtaagcggcagctaccttacagccctgacacgagccgggtgctctctcttctcaccgcggcccacgtctcctcgctggctccggtggcctcgctgggtcgcgaggaggcggaggactgtactctgaggccaaaagccagagtcggccctgaacgcccacgactctcagggtccagaggccgtgagaccggccgcggctgaaaggtaccagggcccctgatgccggagcccgtgtgctcggccctcttgcagacggtaaagaaaccaagtggaagagtgtttcctcctctggccgtaaagcagctgtccccgccctactccggaccgccccaaagactccatgggatggacctgagtcagccgaatcctagccccttcccttgggcctgctgtggtgctcgacatcagtgacagacggaagcagcagaccatcaaggctacgggaggcccggggcgcttgcgaagatgaagtttggctgcctctccttccggcagccttatgctggctttgtcttaaatggaatcaagactgtggagacgcgctggcgtcctctgctgagcagccagcggaactgtaccatcgccgtccacattgctcacagggactgggaaggcgatgcctgtcgggagctgctggtggagagactcgggatgactcctgctcagattcaggccttgctcaggaaaggggaaaagtttggtcgaggagtgatagcgggactcgttgacattggggaaactttgcaatgccccgaagacttaactcccgatgaggttgtggaactagaaaatcaagctgcactgaccaacctgaagcagaagtacctgactgtgatttcaaaccccaggtggttactggagcccatacctaggaaaggaggcaaggatgtattccaggtagacatcccagagcacctgatccctttggggcatgaagtgtgacaagtgtgggctcctgaaaggaatgttccagagaaaccagctaaatcatggcaccttcaatttgccatcgtgacgcagacctgtataaattaggttaaagatgaatttccactgctttggagagtcccacccactaagcactgtgcatgtaaacaggttcctttgctcagatgaaggaagtagggggtggggctttccttgtgtgatgcctccttaggcacacaggcaatgtctcaagtactttgaccttagggtagaaggcaaagctgccagtaaatgtctcagcattgctgctaattttggtcctgctagtttctggattgtacaaataaatgtgttgtagatga

SEQ ID NO: 466624 - DNA, 1576 bp, Homo sapiens
ggtacgttcctcatgaaagggacgacgggagctgcatgaaagccgaagttatggaccgctagcatctgtcactggccaccggtttccgggagtaagcggcagctaccttacagccctgacacgagccgggtgctctctcttctcaccgcggcccacgtctcctcgctggctccggtggcctcgctgggtcgcgaggaggcggaggactgtactctgaggccaaaagccagagtcggccctgaacgcccacgactctcagggtccagaggccgtgagaccggccgcggctgaaaggtaccagggcccctgatgccggagcccgtgtgctcggccctcttgcagacggtaaagaaaccaagtggaagagtgtttcctcctctggccgtaaagcagctcagatctgggacagggcgtctgctgacagtggagagcagtggtgggggaaggggcttgaggaaggtggcacccagaggggtggagaggagatgtctgactgagggccatctgaggtcacggtgcatcctgaggacagagctgagattggatatcaacgatgtgggctcagcagccctggagtaggagctgggaagctgtccccgccctactccggaccgccccaaagactccatgggatggacctgagtcagccgaatcctagccccttcccttgggcctgctgtggtgctcgacatcagtgacagacggaagcagcagaccatcaaggctacgggaggcccggggcgcttgcgaagatgaagtttggctgcctctccttccggcagccttatgctggctttgtcttaaatggaatcaagactgtggagacgcgctggcgtcctctgctgagcagccagcggaactgtaccatcgccgtccacattgctcacagggactgggaaggcgatgcctgtcgggagctgctggtggagagactcgggatgactcctgctcagattcaggccttgctcaggaaaggggaaaagtttggtcgaggagtgatagcgggactcgttgacattggggaaactttgcaatgccccgaagacttaactcccgatgaggttgtggaactagaaaatcaagctgcactgaccaacctgaagcagaagtacctgactgtgatttcaaaccccaggtggttactggagcccatacctaggaaaggaggcaaggatgtattccaggtagacatcccagagcacctgatccctttggggcatgaagtgtgacaagtgtgggctcctgaaaggaatgttccagagaaaccagctaaatcatggcaccttcaatttgccatcgtgacgcagacctgtataaattaggttaaagatgaatttccactgctttggagagtcccacccactaagcactgtgcatgtaaacaggttcctttgctcagatgaaggaagtagggggtggggctttccttgtgtgatgcctccttaggcacacaggcaatgtctcaagtactttgaccttagggtagaaggcaaagctgccagtaaatgtctcagcattgctgctaattttggtcctgctagtttctggattgtacaaataaatgtgttgtagatga

SEQ ID NO: 466625 - DNA, 1525 bp, Homo sapiens
ggtacgttcctcatgaaagggacgacgggagctgcatgaaagccgaagttatggaccgctagcatctgtcactggccaccggtttccgggagtaagcggcagctaccttacagccctgacacgagccgggtgctctctcttctcaccgcggcccacgtctcctcgctggctccggtggcctcgctgggtcgcgaggaggcggaggactgtactctgaggccaaaagccagagtcggccctgaacgcccacgactctcagggtccagaggccgtgagaccggccgcggctgaaaggtaaagaaaccaagtggaagagtgtttcctcctctggccgtaaagcagctcagatctgggacagggcgtctgctgacagtggagagcagtggtgggggaaggggcttgaggaaggtggcacccagaggggtggagaggagatgtctgactgagggccatctgaggtcacggtgcatcctgaggacagagctgagattggatatcaacgatgtgggctcagcagccctggagtaggagctgggaagctgtccccgccctactccggaccgccccaaagactccatgggatggacctgagtcagccgaatcctagccccttcccttgggcctgctgtggtgctcgacatcagtgacagacggaagcagcagaccatcaaggctacgggaggcccggggcgcttgcgaagatgaagtttggctgcctctccttccggcagccttatgctggctttgtcttaaatggaatcaagactgtggagacgcgctggcgtcctctgctgagcagccagcggaactgtaccatcgccgtccacattgctcacagggactgggaaggcgatgcctgtcgggagctgctggtggagagactcgggatgactcctgctcagattcaggccttgctcaggaaaggggaaaagtttggtcgaggagtgatagcgggactcgttgacattggggaaactttgcaatgccccgaagacttaactcccgatgaggttgtggaactagaaaatcaagctgcactgaccaacctgaagcagaagtacctgactgtgatttcaaaccccaggtggttactggagcccatacctaggaaaggaggcaaggatgtattccaggtagacatcccagagcacctgatccctttggggcatgaagtgtgacaagtgtgggctcctgaaaggaatgttccagagaaaccagctaaatcatggcaccttcaatttgccatcgtgacgcagacctgtataaattaggttaaagatgaatttccactgctttggagagtcccacccactaagcactgtgcatgtaaacaggttcctttgctcagatgaaggaagtagggggtggggctttccttgtgtgatgcctccttaggcacacaggcaatgtctcaagtactttgaccttagggtagaaggcaaagctgccagtaaatgtctcagcattgctgctaattttggtcctgctagtttctggattgtacaaataaatgtgttgtagatga

SEQ ID NO: 466626 - DNA, 1916 bp, Homo sapiens
ggtacgttcctcatgaaagggacgacgggagctgcatgaaagccgaagttatggaccgctagcatctgtcactggccaccggtttccgggagtaagcggcagctaccttacagccctgacacgagccgggtgctctctcttctcaccgcggcccacgtctcctcgctggctccggtggcctcgctgggtcgcgaggaggcggaggactgtactctgaggccaaaagccagagtcggccctgaacgcccacgactctcagggtccagaggccgtgagaccggccgcggctgaaaggtaccagggcccctgatgccggagcccgtgtgctcggccctcttgcagacggtaaagaaaccaagtggaagagtgtttcctcctctggccgtaaagcagctcagatctgggacagggcgtctgctgacagtggagagcagtggtgggggaaggggcttgaggaaggtggcacccagaggggtggagaggagatgtctgactgagggccatctgaggtcacggtgcatcctgaggacagagctgagattggatatcaacgatgtgggctcagcagccctggagtaggagctgggaaggtcagtgccttggtggcggcagggccagggcactgagagtattggcagggcacagcaggggaaagggaagagaagcagagcgtgggactgtccctctgtgctggaagagggctaacaccagccccgactctccgctctggctaggccgagggggccctctgtcctctgtgttgccctagggctcggtgacctctgtcatagcactgaccacatgctatcctgcctgtgccttcctctagctgtccccgccctactccggaccgccccaaagactccatgggatggacctgagtcagccgaatcctagccccttcccttgggcctgctgtggtgctcgacatcagtgacagacggaagcagcagaccatcaaggtcagtgcgatttaggccacctgagagacacggggggaaggtcaggccactgcccatgagcttgaagggctggcgtgtgatgcgcttctgtgcttccgcaggctacgggaggcccggggcgcttgcgaagatgaagtttggctgcctctccttccggcagccttatgctggctttgtcttaaatggaatcaagactgtggagacgcgctggcgtcctctgctgagcagccagcggaactgtaccatcgccgtccacattgctcacagggactgggaaggcgatgcctgtcgggagctgctggtggagagactcgggatgactcctgctcagattcaggccttgctcaggaaaggggaaaagtttggtcgaggagtgatagcgggactcgttgacattggggaaactttgcaatgccccgaagacttaactcccgatgaggttgtggaactagaaaatcaagctgcactgaccaacctgaagcagaagtacctgactgtgatttcaaaccccaggtggttactggagcccatacctaggaaaggaggcaaggatgtattccaggtagacatcccagagcacctgatccctttggggcatgaagtgtgacaagtgtgggctcctgaaaggaatgttccagagaaaccagctaaatcatggcaccttcaatttgccatcgtgacgcagacctgtataaattaggttaaagatgaatttccactgctttggagagtcccacccactaagcactgtgcatgtaaacaggttcctttgctcagatgaaggaagtagggggtggggctttccttgtgtgatgcctccttaggcacacaggcaatgtctcaagtactttgaccttagggtagaaggcaaagctgccagtaaatgtctcagcattgctgctaattttggtcctgctagtttctggattgtacaaataaatgtgttgtagatga

SEQ ID NO: 466627 - DNA, 1240 bp, Homo sapiens
ggtacgttcctcatgaaagggacgacgggagctgcatgaaagccgaagttatggaccgctagcatctgtcactggccaccggtttccgggagtaagcggcagctaccttacagccctgacacgagccgggtgctctctcttctcaccgcggcccacgtctcctcgctggctccggtggcctcgctgggtcgcgaggaggcggaggactgtactctgaggccaaaagccagagtcggccctgaacgcccacgactctcagggtccagaggccgtgagaccggccgcggctgaaaggtaaagaaaccaagtggaagagtgtttcctcctctggccgtaaagcagctgtccccgccctactccggaccgccccaaagactccatgggatggacctgagtcagccgaatcctagccccttcccttgggcctgctgtggtgctcgacatcagtgacagacggaagcagcagaccatcaaggctacgggaggcccggggcgcttgcgaagatgaagtttggctgcctctccttccggcagccttatgctggctttgtcttaaatggaatcaagactgtggagacgcgctggcgtcctctgctgagcagccagcggaactgtaccatcgccgtccacattgctcacagggactgggaaggcgatgcctgtcgggagctgctggtggagagactcgggatgactcctgctcagattcaggccttgctcaggaaaggggaaaagtttggtcgaggagtgatagcgggactcgttgacattggggaaactttgcaatgccccgaagacttaactcccgatgaggttgtggaactagaaaatcaagctgcactgaccaacctgaagcagaagtacctgactgtgatttcaaaccccaggtggttactggagcccatacctaggaaaggaggcaaggatgtattccaggtagacatcccagagcacctgatccctttggggcatgaagtgtgacaagtgtgggctcctgaaaggaatgttccagagaaaccagctaaatcatggcaccttcaatttgccatcgtgacgcagacctgtataaattaggttaaagatgaatttccttgtgtgatgcctccttaggcacacaggcaatgtctcaagtactttgaccttagggtagaaggcaaagctgccagtaaatgtctcagcattgctgctaattttggtcctgctagtttctggattgtacaaataaatgtgttgtagatga

SEQ ID NO: 466628 - DNA, 1236 bp, Homo sapiens
ggtacgttcctcatgaaagggacgacgggagctgcatgaaagccgaagttatggaccgctagcatctgtcactggccaccggtttccgggagtaagcggcagctaccttacagccctgacacgagccgggtgctctctcttctcaccgcggcccacgtctcctcgctggctccggtggcctcgctgggtcgcgaggaggcggaggactgtactctgaggccaaaagccagagtcggccctgaacgcccacgactctcagggtccagaggccgtgagaccggccgcggctgaaaggtaaagaaaccaagtggaagagtgtttcctcctctggccgtaaagcagctgtccccgccctactccggaccgccccaaagactccatgggatggacctgagtcagccgaatcctagccccttcccttgggcctgctgtggtgctcgacatcagtgacagacggaagcagcagaccatcaagactgtggagacgcgctggcgtcctctgctgagcagccagcggaactgtaccatcgccgtccacattgctcacagggactgggaaggcgatgcctgtcgggagctgctggtggagagactcgggatgactcctgctcagattcaggccttgctcaggaaaggggaaaagtttggtcgaggagtgatagcgggactcgttgacattggggaaactttgcaatgccccgaagacttaactcccgatgaggttgtggaactagaaaatcaagctgcactgaccaacctgaagcagaagtacctgactgtgatttcaaaccccaggtggttactggagcccatacctaggaaaggaggcaaggatgtattccaggtagacatcccagagcacctgatccctttggggcatgaagtgtgacaagtgtgggctcctgaaaggaatgttccagagaaaccagctaaatcatggcaccttcaatttgccatcgtgacgcagacctgtataaattaggttaaagatgaatttccactgctttggagagtcccacccactaagcactgtgcatgtaaacaggttcctttgctcagatgaaggaagtagggggtggggctttccttgtgtgatgcctccttaggcacacaggcaatgtctcaagtactttgaccttagggtagaaggcaaagctgccagtaaatgtctcagcattgctgctaattttggtcctgctagtttctggattgtacaaataaatgtgttgtagatga

SEQ ID NO: 466629 - DNA, 1157 bp, Homo sapiens
ggtacgttcctcatgaaagggacgacgggagctgcatgaaagccgaagttatggaccgctagcatctgtcactggccaccggtttccgggagtaagcggcagctaccttacagccctgacacgagccgggtgctctctcttctcaccgcggcccacgtctcctcgctggctccggtggcctcgctgggtcgcgaggaggcggaggactgtactctgaggccaaaagccagagtcggccctgaacgcccacgactctcagggtccagaggccgtgagaccggccgcggctgaaaggtaaagaaaccaagtggaagagtgtttcctcctctggccgtaaagcagctgtccccgccctactccggaccgccccaaagactccatgggatggacctgagtcagccgaatcctagccccttcccttgggcctgctgtggtgctcgacatcagtgacagacggaagcagcagaccatcaaggctacgggaggcccggggcgcttgcgaagatgaagtttggctgcctctccttccggcagccttatgctggctttgtcttaaatggaatcaagactgtggagacgcgctggcgtcctctgctgagcagccagcggaactgtaccatcgccgtccacattgctcacagggactgggaaggcgatgcctgtcgggagctgctggtggagagactcgggatgactcctgctcagattcaggccttgctcaggaaaggggaaaagtttggtcgaggagtgatagcgggactcgttgacattggggaaactttgcaatgccccgaagacttaactcccgatgaggttgtggaactagaaaatcaagctgcactgaccaacctgaagcagaagtacctgactgtgatttcaaaccccaggtggttactggagcccatacctaggaaaggaggcaaggatgtattccaggtagacatcccagagcacctgatccctttggggcatgaagtgtgacaagtgtgggctcctgaaaggaatgttccagagaaaccagctaaatcatggcaccttcaatttgccatcgtgacgcagacctgtataaattaggttaaagatgaatttccactgctttggagagtcccacccactaagcatctggaaattcatcttaacctaaagaaaaaaggatc

SEQ ID NO: 466630 - DNA, 660 bp, Homo sapiens
gactactccgatgaggttgtgatagaagtagctgatgacactgagcagagtactgatgtgatttcaacccgagtgttctgggcctactagggaagggcagattattcagaatccatagaggttcagctggcgaatgaaactcgtcaagttgtctgttttgaagatcctctctgcacctttccgttgaagaacctccctctggaagagatccttgtcgatgatcacggcgtctccatcatcgttccagctcacagacttgaatgtgtcttcctccacaatcgtccaaagctttcttgggaaggagagcctaaaaaggttgtggttgtcttccacgttgaccacgcgttggtttcggtcttcgggtggtgagttatcttgggagcctggatcttggctcatggcttggtcctcgtgcctgtccaaaacctcgctggaatctggatttggatcaggtgaagaaccagatgggcccccgcttgttggctctccaccaacagatggggccagcttggcttcatattcctgttcagtgttctgactcgccatggagctacaccagaatcaggagcattttgtacccaaggcccttatcactgtcctagcaagtccaaaatgccttcagtcagagtaggcgtgcccaataaatactgtccacaaaat

SEQ ID NO: 466631 - DNA, 1501 bp, Homo sapiens
ggtacgttcctcatgaaagggacgacgggagctgcatgaaagccgaagttatggaccgctagcatctgtcactggccaccggtttccgggagtaagcggcagctaccttacagccctgacacgagccgggtgctctctcttctcaccgcggcccacgtctcctcgctggctccggtggcctcgctgggtcgcgaggaggcggaggactgtactctgaggccaaaagccagagtcggccctgaacgcccacgactctcagggtccagaggccgtgagaccggccgcggctgaaaggtaccagggcccctgatgccggagcccgtgtgctcggccctcttgcagacggtaaagaaaccaagtggaagagtgtttcctcctctggccgtaaagcagggtactctctgcagcaccagctgtccccgccctactccggaccgccccaaagactccatgggatggacctgagtcagccgaatcctagccccttcccttgggcctgctgtggtgctcgacatcagtgacagacggaagcagcagaccatcaaggctacgggaggcccggggcgcttgcgaagatgaagtttggctgcctctccttccggcagccttatgctggctttgtcttaaatggaatcaagactgtggagacgcgctggcgtcctctgctgagcagccagcggaactgtaccatcgccgtccacattgctcacagggactgggaaggcgatgcctgtcgggagctgctggtggagagactcgggatgactcctgctcagattcaggccttgctcaggaaaggggaaaagtttggtcgaggagtgatagcgggactcgttgacattggggaaactttgcaatgccccgaagacttaactcccgatgaggttgtggaactagaaaatcaagctgcactgaccaacctgaagcagaagtacctgactgtgatttcaaaccccaggtggttactggagcccatacctaggaaaggaggcaaggatgtattccaggtagacatcccagagcacctgatccctttggggcatgaagtgtgacaagtgtgggctcctgaaaggaatgttccagagaaaccagctaaatcatggcaccttcaatttgccatcgtgacgcagacctgtataaattaggttaaagatgaatttccactgctttggagagtcccacccactaagcactgtgcatgtaaacaggttcctttgctcagatgaaggaagtagggggtggggctttccttgtgtgatgcctccttaggcacacaggcaatgtctcaagtactttgaccttagggtagaaggcaaagctgccagtaaatgtctcagcattgctgctaattttggtcctgctagtttctggatttactcctaatgattggttgcatgtgctccagtgggcccagataaagtgtttcttattccccttggtcaagttgtccccagagtggtgctgtgcctgagcatggtgggagcactcccctcactcgtct

SEQ ID NO: 466632 - DNA, 1815 bp, Homo sapiens
ggtacgttcctcatgaaagggacgacgggagctgcatgaaagccgaagttatggaccgctagcatctgtcactggccaccggtttccgggagtaagcggcagctaccttacagccctgacacgagccgggtgctctctcttctcaccgcggcccacgtctcctcgctggctccggtggcctcgctgggtcgcgaggaggcggaggactgtactctgaggccaaaagccagagtcggccctgaacgcccacgactctcagggtccagaggccgtgagaccggccgcggctgaaaggtaccagggcccctgatgccggagcccgtgtgctcggccctcttgcagacggtaaagaaaccaagtggaagagtgtttcctcctctggccgtaaagcagctcagatctgggacagggcgtctgctgacagtggagagcagtggtgggggaaggggcttgaggaaggtggcacccagaggggtggagaggagatgtctgactgagggccatctgaggtcacggtgcatcctgaggacagagctgagattggatatcaacgatgtgggctcagcagccctggagtaggagctgggaaggtcagtgccttggtggcggcagggccagggcactgagagtattggcagggcacagcaggggaaagggaagagaagcagagcgtgggactgtccctctgtgctggaagagggctaacaccagccccgactctccgctctggctaggccgagggggccctctgtcctctgtgttgccctagggctcggtgacctctgtcatagcactgaccacatgctatcctgcctgtgccttcctctagctgtccccgccctactccggaccgccccaaagactccatgggatggacctgagtcagccgaatcctagccccttcccttgggcctgctgtggtgctcgacatcagtgacagacggaagcagcagaccatcaaggctacgggaggcccggggcgcttgcgaagatgaagtttggctgcctctccttccggcagccttatgctggctttgtcttaaatggaatcaagactgtggagacgcgctggcgtcctctgctgagcagccagcggaactgtaccatcgccgtccacattgctcacagggactgggaaggcgatgcctgtcgggagctgctggtggagagactcgggatgactcctgctcagattcaggccttgctcaggaaaggggaaaagtttggtcgaggagtgatagcgggactcgttgacattggggaaactttgcaatgccccgaagacttaactcccgatgaggttgtggaactagaaaatcaagctgcactgaccaacctgaagcagaagtacctgactgtgatttcaaaccccaggtggttactggagcccatacctaggaaaggaggcaaggatgtattccaggtagacatcccagagcacctgatccctttggggcatgaagtgtgacaagtgtgggctcctgaaaggaatgttccagagaaaccagctaaatcatggcaccttcaatttgccatcgtgacgcagacctgtataaattaggttaaagatgaatttccactgctttggagagtcccacccactaagcactgtgcatgtaaacaggttcctttgctcagatgaaggaagtagggggtggggctttccttgtgtgatgcctccttaggcacacaggcaatgtctcaagtactttgaccttagggtagaaggcaaagctgccagtaaatgtctcagcattgctgctaattttggtcctgctagtttctggattgtacaaataaatgtgttgtagatga

SEQ ID NO: 466633 - DNA, 1399 bp, Homo sapiens
ggtacgttcctcatgaaagggacgacgggagctgcatgaaagccgaagttatggaccgctagcatctgtcactggccaccggtttccgggagtaagcggcagctaccttacagccctgacacgagccgggtgctctctcttctcaccgcggcccacgtctcctcgctggctccggtggcctcgctgggtcgcgaggaggcggaggactgtactctgaggccaaaagccagagtcggccctgaacgcccacgactctcagggtccagaggccgtgagaccggccgcggctgaaaggtaccagggcccctgatgccggagcccgtgtgctcggccctcttgcagacggtaaagaaaccaagtggaagagtgtttcctcctctggccgtaaagcagggtactctctgcagcaccagctgtccccgccctactccggaccgccccaaagactccatgggatggacctgagtcagccgaatcctagccccttcccttgggcctgctgtggtgctcgacatcagtgacagacggaagcagcagaccatcaaggctacgggaggcccggggcgcttgcgaagatgaagtttggctgcctctccttccggcagccttatgctggctttgtcttaaatggaatcaagactgtggagacgcgctggcgtcctctgctgagcagccagcggaactgtaccatcgccgtccacattgctcacagggactgggaaggcgatgcctgtcgggagctgctggtggagagactcgggatgactcctgctcagattcaggccttgctcaggaaaggggaaaagtttggtcgaggagtgatagcgggactcgttgacattggggaaactttgcaatgccccgaagacttaactcccgatgaggttgtggaactagaaaatcaagctgcactgaccaacctgaagcagaagtacctgactgtgatttcaaaccccaggtggttactggagcccatacctaggaaaggaggcaaggatgtattccaggtagacatcccagagcacctgatccctttggggcatgaagtgtgacaagtgtgggctcctgaaaggaatgttccagagaaaccagctaaatcatggcaccttcaatttgccatcgtgacgcagacctgtataaattaggttaaagatgaatttccactgctttggagagtcccacccactaagcactgtgcatgtaaacaggttcctttgctcagatgaaggaagtagggggtggggctttccttgtgtgatgcctccttaggcacacaggcaatgtctcaagtactttgaccttagggtagaaggcaaagctgccagtaaatgtctcagcattgctgctaattttggtcctgctagtttctggattgtacaaataaatgtgttgtagatga

SEQ ID NO: 466634 - DNA, 1487 bp, Homo sapiens
ggtacgttcctcatgaaagggacgacgggagctgcatgaaagccgaagttatggaccgctagcatctgtcactggccaccggtttccgggagtaagcggcagctaccttacagccctgacacgagccgggtgctctctcttctcaccgcggcccacgtctcctcgctggctccggtggcctcgctgggtcgcgaggaggcggaggactgtactctgaggccaaaagccagagtcggccctgaacgcccacgactctcagggtccagaggccgtgagaccggccgcggctgaaaggtaaagaaaccaagtggaagagtgtttcctcctctggccgtaaagcagctgtccccgccctactccggaccgccccaaagactccatgggatggacctgagtcagccgaatcctagccccttcccttgggcctgctgtggtgctcgacatcagtgacagacggaagcagcagaccatcaaggctacgggaggcccggggcgcttgcgaagatgaagtttggctgcctctccttccggcagccttatgctggctttgtcttaaatggaatcaagactgtggagacgcgctggcgtcctctgctgagcagccagcggaactgtaccatcgccgtccacattgctcacagggactgggaaggcgatgcctgtcgggagctgctggtggagagactcgggatgactcctgctcagattcaggccttgctcaggaaaggggaaaagtttggtcgaggagtgatagcgggactcgttgacattggggaaactttgcaatgccccgaagacttaactcccgatgaggttgtggaactagaaaatcaagctgcactgaccaacctgaagcagaagtacctgactgtgatttcaaaccccaggtggttactggagcccatacctaggaaaggaggcaaggatgtattccagaatccatagaggttcagctggcgaatgaaactcgtcaagttgtctgttttgaagatcctctctgcacctttccgttgaagaacctccctctggaagagatccttgtcgatgatcacggcgtctccatcatcgttccagctcacagacttgaatgtgtcttcctccacaatcgtccaaagctttcttgggaaggagagcctaaaaaggttgtggttgtcttccacgttgaccacgcgttggtttcggtcttcgggtggtgagttatcttgggagcctggatcttggctcatggcttggtcctcgtgcctgtccaaaacctcgctggaatctggatttggatcaggtgaagaaccagatgggcccccgcttgttggctctccaccaacagatggggccagcttggcttcatattcctgttcagtgttctgactcgccatggagctacaccagaatcaggagcattttgtacccaaggcccttatcactgtcctagcaagtccaaaatgccttcagtcagagtaggcgtgcccaataaatactgtccacaaaat

SEQ ID NO: 466635 - DNA, 1243 bp, Homo sapiens
  misc_feature (1178)..(1179): n is a, c, g, or t
  misc_feature (1239)..(1239): n is a, c, g, or t
ggtacgttcctcatgaaagggacgacgggagctgcatgaaagccgaagttatggaccgctagcatctgtcactggccaccggtttccgggagtaagcggcagctaccttacagccctgacacgagccgggtgctctctcttctcaccgcggcccacgtctcctcgctggctccggtggcctcgctgggtcgcgaggaggcggaggactgtactctgaggccaaaagccagagtcggccctgaacgcccacgactctcagggtccagaggccgtgagaccggccgcggctgaaaggtaaagaaaccaagtggaagagtgtttcctcctctggccgtaaagcagctgtccccgccctactccggaccgccccaaagactccatgggatggacctgagtcagccgaatcctagccccttcccttgggcctgctgtggtgctcgacatcagtgacagacggaagcagcagaccatcaaggctacgggaggcccggggcgcttgcgaagatgaagtttggctgcctctccttccggcagccttatgctggctttgtcttaaatggaatcaagactgtggagacgcgctggcgtcctctgctgagcagccagcggaactgtaccatcgccgtccacattgctcacagggactgggaaggcgatgcctgtcgggagctgctggtggagagactcgggatgactcctgctcagattcaggccttgctcaggaaaggggaaaagtttggtcgaggagtgatagcgggactcgttgacattggggaaactttgcaatgccccgaagacttaactcccgatgaggttgtggaactagaaaatcaagctgcactgaccaacctgaagcagaagtacctgactgtgatttcaaaccccaggtggttactggagcccatacctaggaaaggaggcaaggatgtattccaggtagacatcccagagcacctgatccctttggggcatgaagtgtgacaagtgtgggctcctgaaaggaatgttccagagaaaccagctaaatcatggcaccttcaatttgccatcgtgacgcagacctgtataaattaggttaaagatgaatttccactgctttggagagtcccacccactaagcactgtgcatgtaaacaggttcctttgctcagatgaaggaagtagggggtggggctttnntttttttgattcttttttttgttttctttcattttttcaagttctttgtccttatgggtngaat

SEQ ID NO: 466636 - DNA, 717 bp, Homo sapiens
  misc_feature (14)..(14): n is a, c, g, or t
cgagctcggtaccnaaacgaccgaagacttaactcccgatgaggttgtggaactagaaaatcaagctgcactgaccaacctgaagcagaagtacctgactgtgatttcaaaccccaggtggttactggagcccatacctaggaaaggaggcaaggatgtattccagaatccatagaggttcagctggcgaatgaaactcgtcaagttgtctgttttgaagatcctctctgcacctttccgttgaagaacctccctctggaagagatccttgtcgatgatcacggcgtctccatcatcgttccagctcacagacttgaatgtgtcttcctccacaatcgtccaaagctttcttgggaaggagagcctaaaaaggttgtggttgtcttccacgttgaccacgcgttggtttcggtcttcgggtggtgagttatcttgggagcctggatcttggctcatggcttggtcctcgtgcctgtccaaaacctcgctggaatctggatttggatcaggtgaagaaccagatgggcccccgcttgttggctctccaccaacagatggggccagcttggcttcatattcctgttcagtgttctgactcgccatggagctacaccagaatcaggagcattttgtacccaaggcccttatcactgtcctagcaagtccaaaatgccttcagtcagagtaggcgtgcccaataaatactgtccacaaaat

SEQ ID NO: 466637 - DNA, 1371 bp, Homo sapiens
tccagtggccaggactgggagtttacgttgtagcgtttgaaggacggtgggtgccataatgaaggcctggggcactgtggtagtgaccttggccacgctgatggttgtcactgtggatgccaagatctatgaacgctgcgagctggcggcaagactggagagagcagggctgaacggctacaagggctacggcgttggagactggctgtgcatggctcattatgagagtggctttgacaccgccttcgtggaccacaatcctgatggcagcagtgaatatggcattttccaactgaattctgcctggtggtgtgacaatggcattacacccaccaagaacctctgccacatggattgtcatgacctgctcaatcgccatattctggatgacatcaggtgtgccaagcagattgtgtcctcacagaatgggctttctgcctggacttcttggaggctacactgttctggccatgatttatctgaatggctcaaggggtgtgatatgcatgtgaaaattgatccaaaaattcatccatgactcagattcgaagagacagattttatcttcctttcatttctttctcttgtgcatttaataaaggatggtatctataaacaatgcaaaagatgctctgatgtctgactctcttcatttattcaatgcctggaggaagtgaggagcgtctctgcccggccgcccatcgtctgggatgtggggagcgcctctgccccgccgccccgtctgagatgtgaagagtgcctctgccccgccgcgaccccgtctgggaactgaggagtgtctctgccccgccgccaccccgtctgggaggtgaggagcgtctctgactggccgcccagtatgagaagtgaggagctcctccgcccgcagccgccccatctgggaagtgaggagcatctccgcctggcagccgccccgtccgggagggaggtgggggggtcagcccctgcccagccagccgccctgtccaggaggtgggggggtcagcccctgcgcagccagcagccctgtcagggaggtggggggcagcccccaccaggccgccgccccgtctgggaggtggggggcgcctctgcccggccaccccatctgggaagtgaggagcccctctgcccagctgccaccccgtctgggaggtgtacccaacagctcattgagaacgggccatgatgacgatggcggttttgttgaatagaaaagggggaaatgtggggaaaagaaagagaaatcagattgttactgtgtctgtgtagaaagaagtagacataggagactccattttgttctgtactaagaaaaattcttctgccttgggatgctgttaatctataaccttacccccagccccgtgc

SEQ ID NO: 466638 - DNA, 1440 bp, Homo sapiens
caagtcagaatgtccgaaaatgtctcagatggtctatttaaggagtcagccaaaacccaccaaaaccaaaatggcaatgagagtgacatctgtcaggcccctcttctgcaggtctgctgcagttttctggaggtccgctcaagaccctatttacctgggtatcaccagcagaggctgcagaacagcaaagactgctgcctgctccttcctctggaagctttgtcccagaggggcagcggcctgatgccagccagagcactcctggacccacttgaggaggcagtctgtcccttagcagagctcgagcgctgcactggaaaaaccttttcaggatgcactgctctcttcagagccagcaggcaagaacatttaagtccgctgaagctgtgcccacagccgccccttcccccaggtgctctgtcccagggagatgagagttttatctataagaccctgactgaggctgttgactttctttcacagatgccctgcccagtgaggaagaatctagagaggcagtctggccacagctgctttgctgccctgtgtcacgtggtgaatgccccactcagtgcgcatgctgcacagatctgttactgcagatttctgttgctacgcatgtctgttacgcatgcgccttgttgcctaccttctgtccatgcagagctttgtgagaagaggtagtatcttcattctttccaccatcttgattctttctctctgactgaggctcagccgtgggaaatatgagtgagcatgtaagaacaagatcccaatcctcagaaagaggaaatgactaagagtcttcccagccagttgtatctgtgattgtccagcagcccactgaggaaaaacgtcaagaagaggagccaccaactgaaaatcagggtattgcacctactggggagatcgaaaatgaagcggcacctgcccttcaaggacctgatgtggaagcttttcaacaggaactggctctgcttaagatagaggatgcacctggagatggtcctgatgtcagggaggggactctgcccactttcgatcccactaaagtgctggaagcaggtaatgggcaaccataggtttaaaccaagacaaatgaagactgaaaccaagaatgttgttcttatgctggaaatttgactgctaacattctcttaataaagttttacagttttctgcaaataattctttcatatttttgttaaatttatttctgaatttttaatactcccgagaactgtatcttttatgaaagtttaaatcctgtgtttgagatggtatataaagataaaatgttgatacattgattttctatcatagatagataggaagctggaagctttcatagggggatgccagcagctgcacagatagaaaaggccacatggggccagtcttgctagcggtctatctattttgttaatcatttcaaaaaaa

SEQ ID NO: 466639 - DNA, 911 bp, Homo sapiens
ctctctctcattgcaacccccatccccagatagccacagagctcctacatctcctccctcagatctttcccctgtcttgactccttccttgggtttttcgtcggccatggcaagcgccggaatctcctcagctgccgtttcacaaaagaggtaccaggtccgcaccaaacgagcacacaagcagcaccaggagctgcagaagaaggaggcggcagcgatggaccagggcagagggtgcgcgcacgtcgtgcgctccctgcctccaccctgcgtgcgcgagcacgagccgccggagcctcccattctgcggcatacgcgccaccagcagcatcccctggaaggctgcagaagcagcgctgggcccctagcagttccagaaaaaaagtgggaggtgatagggcaccggcagtgtctggtcttgggaagacgcctctcacctggggagggaacaattgaagctttcaataaccttctttttcctctaaaccgttttgtgaatgttaaacagtaaacttttcattttctcgatacatcagtctcctttgccctcttgccagcgaagaccttactcaaaggaaacaaatgggacaaataggaatggggagggggcatcctaccccatatctgaggtgcgactgcgggacgtagagcggactgggcctttcccgttggcgcgtggcctcaatcagagatggggttccgccatattgctcacgctggcctagaactgccgagctcaaagaatccacctaccgtgacgtcccaaagttgtggaattgcagtgcttcactggccccggccttatttccaaaatgaaataactcacataagttctgtggtgacatgtaaaaacccaattcccgtaacagctttcccaacgttgattttttagacatgatgaatgttatgtg

SEQ ID NO: 466640 - DNA, 1346 bp, Homo sapiens
tgggaaatatgagtgagcatgtgagaacaagatcccaatcctcagaaagaggaaatgaccaagagtcttcccagccagttggatctgtgattgtccaggagcccactgaggaaaaacgtcaagaagaggaaccaccaactgataatcagggtattgcacctagtggggagatcgaaaatgaaggagcacctgccgttcaagggcctgacatggaagcttttcaacaggaactggctctgcttaagatagaggatgagcctggagatggtcctgatgtcagggaggggattatgcccacttttgatctcactaaagtgctggaagcaggtgatgcgcaaccataggtttcaagcaagacaaatgaagactgaaaccaagaacgttattcttaatctggaaatttgactgataatattctcttaataaagttttaagttttctgcaaagaatccttacacagttttgttaaatttatttctggatctttaatactcttgagaattgtatcttttttgaaagtttaaatcctgtatttgagatggtacatagagataaaatgttggtacattgattttctatcatagatagataggaacctggacgctttcatagggggatgccaacagctgcacagatggaaaaggccacctggggccaggcatgtccaccatgggctttccacctcctcgtttttagcacatgcacagagcgctggtggtttactccacagaggcaggaaaacttcagtcacgaggcgaataccccactcagtgcgcatgctgcacagacctgttggtgcccatgtctgttgctatgcgtgtctgttgttgcgcaggcgccttgctgcccgtcttgtgtccgcacagaggtctgcaaggagagagagtgtcttcattctttccgccatcttgattctttctcactgaccaagactcagccgtgggaaatatgagtgagcttgtaagagcaagatcccaatcctcagaaagaggaaatgaccaagagtcttcccagccggttggatctgtgattgtccaggagcccactgaggaaaaacgtcaagaagaggaaccaccaactgataatcaggggcctgacatggaagcttttcaacaggaactggctctgcttaagatagaggatgagcctggagatggtcctgatgtcagggagggtattatgcccacttttgatctcactaaagtgctggaagcaggtgatgcgcaaccataggtttcaagcaagacaaatgaagactgaaaccaagaacgttattcttaatctggaaatttgactgataatattctcttaataaagttttaagttttctgcaaagaatccttaca

SEQ ID NO: 466641 - DNA, 1339 bp, Homo sapiens
tgggaaatatgagtgagcatgtgagaacaagatcccaatcctcagaaagaggaaatgaccaagagtcttcccagccagttggatctgtgattgtccaggagcccactgaggaaaaacgtcaagaagaggaaccaccaactgataatcagggtattgcacctagtggggagatcgaaaatgaaggagcacctgccgttcaagggcctgacatggaagcttttcaacaggaactggctctgcttaagatagaggatgagcctggagatggtcctgatgtcagggaggggattatgcccacttttgatctcactaaagtgctggaagcaggtgatgcgcaaccataggtttcaagcaagacaaatgaagactgaaaccaagaacgttattcttaatctggaaatttgactgataatattctcttaataaagttttaagttttctgcaaagaatccttacacagttttgttaaatttatttctggatctttaatactcttgagaattgtatcttttttgaaagtttaaatcctgtatttgagatggtacatagagataaaatgttggtacattgattttctatcatagatagataggaacctggacgctttcatagggggatgccaacagctgcacagatggaaaaggccacctggggccaggcatgtccaccatgggctttccacctcctcgtttttagcacatgcacagagcgctggtggtttactccacagaggcaggaaaacttcagtcacgaggcgaataccccactcagtgcgcatgctgcacagacctgttggtgcccatgtctgttgctatgcgtgtctgttgttgcgcaggcgccttgctgcccgtcttgtgtccgcacagaggtctgcaaggagagagagtgtcttcattctttccgccatcttgattctttctcactgaccaagactcagccggtaggtctgcagaacggtgttactgggaatttagttgtgagagaatgtgtggaggagccagctggctttggacaggtcctgcggcacagtctgtggcttctgagggaaaagggcctcggggccgtcatccagctcctcccagatgatcctacctccagccctcagtaattggttgctcatttagatcagaacgctgaggcacaaagaacttgtgtaatttgcaaatgattgcagagttttaaaatagcatagaagggattagaattcatggaggttattttggagtataataaaatgcatccttaaaaaaaagctaccttgctcattgtgttagtagggatgattctgaatgaaagtaacagaatattcctacctaaactgtttcaagccacgaagcaa

SEQ ID NO: 466642 - DNA, 1133 bp, Homo sapiens
ttaatgaatttactatttattaagtggaagcggatcaccataaaggtcttcatccttatcatcttcccattgagtagatggagggttggtcctgctgtctcagtaatggcagagcagatagcaaactcacatacaggtggacatgtgcagttcagccctgtgttgttcaagggtcagctgtacagtcaaggttatccttctctaaattacatggagatgacgttttatcaaggcttttctcatctgttcaattctcaccttctcagcatgaaaacagaatgcccagcaggtggtcctcatgacccctcaaagagaggttcccccaagcaatcatgattcaaatattttcatcttaagtagcttgaacgttagccttgtcacccaggtgaatttagtctcatgattaggtaactatgtatttcatatgttcatagtctatcttgagctttaaaagagatttatggcatcatattcacagctacgaaggttcataattttggggccacttctacagtcatttcatacaatttatttgtgaaatatagaaaaaaactattcaataatcaaatccagttatttttcttttacatttatttaaaatgattaaaaatagtttatgacagttttagaaaatggaatggattaaaggctaaaaatgtttagattccatttaagtaggtgtgtgtgtgtgtgtgtgtgtaactaaaaacacaggttttttcacaagaatttaattaagctcatgctgaaactcttatagggaaaatagtaattgagcatcagacatcaccactcctgaaaaaaaccttctacaagaattgaaaagtgttgcaggacctaatactgaaataggaaatatggactatcttcaaattgcacaaatgatgcatgaatccacatctgagacccgcaactccgaggtacctaatgtgaatgattaaagatattttacaaaccggggagccctttcaagtgctttccactttcaaccttctctctttgaagaccccaattcataatggtgagcataaaacatgcatactgggaatttttatgggccccatatatacattccagactgtacatgaatgtcttgatctttggttctgatatttatggcaaagtctaaatgt

SEQ ID NO: 466643 - DNA, 1114 bp, Homo sapiens
gaaactgtcaatggcaatcaacgcaagctacagtcaggccttcctgatctagatgaatacctaggatgatcgatggtctgtggataccaggcactgtgctgagggctgttcctgcatcagctcagccttggggacagggggtccactttcaaatccgtccagcccctgaggcattggggaaatccttaggagccaagaagtgccccggcggagccccctttgccagtacgacctcagttttctatcctctggatgccagccccaaagaagagaaatgccaggatgaagctggcccctccaaggaagtctcagttcttgtgcaaggaaggggagactctcccagcttctatgctttctccttgttggctccaatagtcgccagatgtctgcacagccttgtgctgccaactcgttccatggggcctgtgttggcttctcattgctccagcagggaaaccgtggagtgctgtgctcttgctctggagtataaggcactaagtcacaaggcaaccctcatgatccccgggcaaaagggtagctctgtttttaaacccggaggaggcatcttcccccgggggttgccgggcttctgttcctgtgtgtgttggtctccaggaagccatggagagcttggcagcagagacagagtctcgatatgtcgccaagcttggtctcaaactccaaggctcaagtgctcaagtgatccacccacctcgacctcccaaagtgctgggattacagggaaaatagtaattgagcatcagacatcaccactcctgaaaaaaaccttctacaagaattgaaaagtgttgcaggacctaatactgaaataggaaatatggactatcttcaaattgcacaaatgatgcatgaatccacatctgagacccgcaactccgaggtacctaatgtgaatgattaaagatattttacaaaccggggagccctttcaagtgctttccactttcaaccttctctctttgaagaccccaattcataatggtgagcataaaacatgcatactgggaatttttatgggccccatatatacattccagactgtacatgaatgtcttgatctttggttctgatatttatggcaaagtctaaatgt

SEQ ID NO: 466644 - DNA, 1372 bp, Homo sapiens
gaaactgtcaatggcaatcaacgcaagctacagtcaggccttcctgatctagatgaatacctaggatgatcgatggtctgtggataccaggcactgtgctgagggctgttcctgcatcagctcagccttggggacagggggtccactttcaaatccgtccagcccctgaggcattggggaaatccttaggagccaagaagtgccccggcggagccccctttgccagtacgacctcagttttctatcctctggatgccagccccaaagaagagaaatgccaggatgaagctggcccctccaaggaagtctcagttcttgtgcaaggaaggggagactctcccagcttctatgctttctccttgttggctccaatagtcgccagatgtctgcacagccttgtgctgccaactcgttccatggggcctgtgttggcttctcattgctccagcagggaaaccgtggagtgctgtgctcttgctctggagtataaggcactaagtcacaaggcaaccctcatgatccccgggcaaaagggtagctctgtttttaaacccggaggaggcatcttcccccgggggttgccgggcttctgttcctgtgtgtgttggtctccaggaagccatggagagcttggcagcagggaaaatagtaattgagcatcagacatcaccactcctgaaaaaaaccttctacaagaattgaaaagtgttgcaggacctaatactgaaataggaaatatggactatcttcaaattgcacaaatgatgcatgaatccacatctgagacccgcaactccgaggtacctaatgtgaatgattaaagatattttacaaaccggggagccctttcaagtgctttccactttcaaccttctctctttgaagaccccaattcataatgagatttctttagggcatcctctgctctcaaatcccaagtgattcttcaaacccaggagtgtggagccggcattgaaccaggaagccacagcagatctttcttctcccctatggtctgagcgcaccttcggaatttcagagaggcttataattcagtgtttcggtagttttctttgcgggtggggttctgggcaaaacattcacattcaacccaggtatttttcctgactcgcctgtgacgaaaatttcactgaatacaaaacagaacagaactatatttggtagttaaaccaaccgtcatgcttatagtcttgcaatgtaggtggtaattttgtgtgttggtttctttttctttcctttttttctcctcctcttttacattagacagataatgtgccagcctcattgtaacaaggtttagaggaaggtacagctcacacctgaccatgaaaacccaattgttggccaggca

SEQ ID NO: 466645 - DNA, 1068 bp, Homo sapiens
agcagttcctgctctacaagttcaaaatgaaacagcgtattttgaaggaagatatgctgaagattgtcaacccaagataccaaaaccagtttgctgagattcacagaagagcttctgagcacattgaggttgtctttgcagttgacttgaaggaagtcaacccaacttgtcacttatatgaccttgtcagcaagctgaaactccccaacaatgggaggattcatgttggcaaagtgttacccaagactggtctcctcatgactttcctggttgtgatcttcctgaaaggcaactgtgccaacaaggaagatacctggaaatttctggatatgatgcaaatatatgatgggaagaagtactacatctatggagagcccaggaagctcatcactcaggatttcgtgaggctaacgtacctggagtaccaccaggtgccctgcagttatcctgcacactatcaattcctttggggtccaagagcctatactgaaaccagcaagatgaaagtcctggaatatttggccaaggtcaatgatattgctccaggtgccttctcatcacaatatgaagaggctttgcaagatgaggaagagagcccaagccagagatgcagccgaaactggcactactgcagtggccaagactgtctcagggcgaagttcagcagcttctctcaaccctattgaagtctgaagcttttttcatccagtcaagcaaatataacatcaccaaaagggattttttttggaaatacaaaagaacccccagtaaaataattgagataatgaaatagaaaaaaataataaaacatgatcttggttttcttcattcctttcagtcttttgttttataaaattaaattaaaatttataccttgatatgtttagcttaacaatgtaggataaattaaatttaataagttagatctcttgctcactctctctcatattccccaaacatcatttgagtacctgctttttggaaggctctgtaacagctcttctgtgtataacgggaccaaagccaccctaactaaagcccataatgttaaagatgttactgggaccc

SEQ ID NO: 466646 - DNA, 404 bp, Homo sapiens
  misc_feature (1)..(1): n is a, c, g, or t
naccacgcgttcgcggagcggtgggtggtataatttattgttaaatatttgaacaataaaaaaggtacaaaaagtgaagtacaaattacccaaatctctccacccttatataatcattgtcaaccctttgatgagtgatatttccctatacctatgtacccagatagatatatgcatagataaaagtgatgaaatataagtgctgttctatctgtattttttcaccaaacaatatatgttgtgagcttctatgtcaataaatatatatatcagcatctgccttaatgtgtctgtgctgttaggaagaatttttaaaaaagaaaatatagtaaaaaactgtaaaggggggttgtactctgaggtgggatttttaaccgcattttgcaaatgaaaaaaaataaatg

SEQ ID NO: 466647 - DNA, 2378 bp, Homo sapiens
agcggacaggctggcggcgctcggtgtcgtgtgccggacatcctgtcctgctcgtcctcctgcataccaccctgcgccggtgcacactgacacggactcacttcaggctcatctggcgaatcgcggacccgaggaacgaggcttcagttctttgccgcctgcaaggcggagaccagaaggcggaatccacagctggcgacgcgggagcatctgctgtccaccagcggagcacaggccatcaaagccgcatctgaacttgaattctgtgcagctgattgcagagctggacccggatctgcgaccccctgtggacagaggttgaccgtaccccggagaggagctttctcacggagggcactggttgcagaggctggaagtgaaataaagacgcgctcttgtttcagagttcgtcccctgctgagataggaaggcagagccacctcctctcctctcccacctgcagattaagcttttctaaaaagcctaggcatcttcttatattcagataccctatcgtcgtcagtcatggctagcatcattgcacgtgtcggtaacagccggcggctgaatgcacccttgccgccttgggcccattccatgctgaggtccctggggagaagtctcggtcctataatggccagcatggcagacagaaacatgaagttgttctcggggagggtggtgccagcccaaggggaagaaacctttgaaaactggctgacccaagtcaatggcgtcctgccagattggaatatgtctgaggaggaaaagctcaagcgcttgatgaaaacccttaggggccctgcccgcgaggtcatgcgtgtgcttcaggcgaccaaccctaacctaagtgtggcagatttcttgcgagccatgaaattggtgtttggggagtctgaaagcagtgtgactgcccatggtaaattttttaacaccctacaagctcaaggggagaaagcctccctttatgtgatccgtttagaggtgcagctccagaacgctattcaggcaggcattatagctgagaaagatgcaaaccggactcgcttgcagcagctccttttaggcggtgagctgagtagggacctccgactcagacttaaggattttctcaggatgtatgcaaatgagcaggagcggcttcccaactttctggagttaatcagaatggtaagggaggaagaggattgggatgatgcttttattaaacggaagcgtccaaaaaggtctgagtcaatggtggagagggcagtcagccctgtggcatttcagggctccccaccgatagtgatcggcagtgctgactgcaatgtgatagagatagatgataccctcgacgactccgatgaggatgtgatcctggtggagtctcaggaccctccacttccatcctggggtgcccctcccctcagagacagggccagacctcaggatgaagtgctggtcattgattccccccacaattccagggctcagtttccttccaccagtggtggttctggctataagaataacggtcctggggagatgcgtagagccaggaagcgaaaacacacaatccgctgttcgtattgtggtgaggaaggccactcaaaagaaacctgtgacaacgagagtgacaaggcccaggtttttgagaatttgatcatcactctccaggagctgacccatactgagatggagaggtcaagagtggcccctggcgaatacaatgacttctctgagccactgtaagggaccacccccaggtttcagtgaacccttacctatattcagcatccagtagtgggaaaactggggtgggggtgggggtgggacttctaactgcatgaattaatccacaaagcggctatcttttggggtggagtagaaagggtcttggataccagcacattggagggagatagcctgacctctgtccttgctccttctccctgcagcctacgggtctgttttctgtgtgtgcccatttccttgacagctttattctttgtgaaagtggtataatttattgttaaatatttgaacaataaaaaaggtacaaaaagtgaagtacaaattacccaaatctctccacccttatataatcattgtcaaccctttgatgagtgatatttccctatacctatgtacccagatagatatatgcatagataaaagtgatgaaatataagtgctgttctatctgtattttttcaccaaacaatatatgttgtgagcttctatgtcaataaatatatatatcagcatctgccttaatgtgtctgtgctgttaggaagaatttttaaaaaagaaaatatagtaaaaaactgtaaaggggggttgtactctgaggtgggatttttaaccgcattttgcaaatgaaaaaaaataaatg

SEQ ID NO: 466648 - DNA, 2373 bp, Homo sapiens
tgtctcagctggcagaggataaaagccgccgcggctgccttaggaacggcgctgcctcgtctctgctacccctggttgggcggccctgcgaagcagctccttcgggcagccccgggtcgcttagcggccaaggaggcttcagttctttgccgcctgcaaggcggagaccagaaggcggaatccacagctggcgacgcgggagcatctgctgtccaccagcggagcacaggccatcaaagccgcatctgaacttgaattctgtgcagctgattgcagagctggacccggatctgcgaccccctgtggacagaggttgaccgtaccccggagaggagctttctcacggagggcactggttgcagaggctggaagtgaaataaagacgcgctcttgtttcagagttcgtcccctgctgagataggaaggcagagccacctcctctcctctcccacctgcagattaagcttttctaaaaagcctaggcatcttcttatattcagataccctatcgtcgtcagtcatggctagcatcattgcacgtgtcggtaacagccggcggctgaatgcacccttgccgccttgggcccattccatgctgaggtccctggggagaagtctcggtcctataatggccagcatggcagacagaaacatgaagttgttctcggggagggtggtgccagcccaaggggaagaaacctttgaaaactggctgacccaagtcaatggcgtcctgccagattggaatatgtctgaggaggaaaagctcaagcgcttgatgaaaacccttaggggccctgcccgcgaggtcatgcgtgtgcttcaggcgaccaaccctaacctaagtgtggcagatttcttgcgagccatgaaattggtgtttggggagtctgaaagcagtgtgactgcccatggtaaattttttaacaccctacaagctcaaggggagaaagcctccctttatgtgatccgtttagaggtgcagctccagaacgctattcaggcaggcattatagctgagaaagatgcaaaccggactcgcttgcagcagctccttttaggcggtgagctgagtagggacctccgactcagacttaaggattttctcaggatgtatgcaaatgagcaggagcggcttcccaactttctggagttaatcagaatggtaagggaggaagaggattgggatgatgcttttattaaacggaagcgtccaaaaaggtctgagtcaatggtggagagggcagtcagccctgtggcatttcagggctccccaccgatagtgatcggcagtgctgactgcaatgtgatagagatagatgataccctcgacgactccgatgaggatgtgatcctggtggagtctcaggaccctccacttccatcctggggtgcccctcccctcagagacagggccagacctcaggatgaagtgctggtcattgattccccccacaattccagggctcagtttccttccaccagtggtggttctggctataagaataacggtcctggggagatgcgtagagccaggaagcgaaaacacacaatccgctgttcgtattgtggtgaggaaggccactcaaaagaaacctgtgacaacgagagtgacaaggcccaggtttttgagaatttgatcatcactctccaggagctgacccatactgagatggagaggtcaagagtggcccctggcgaatacaatgacttctctgagccactgtaagggaccacccccaggtttcagtgaacccttacctatattcagcatccagtagtgggaaaactggggtgggggtgggggtgggacttctaactgcatgaattaatccacaaagcggctatcttttggggtggagtagaaagggtcttggataccagcacattggagggagatagcctgacctctgtccttgctccttctccctgcagcctacgggtctgttttctgtgtgtgcccatttccttgacagctttattctttgtgaaagtggtataatttattgttaaatatttgaacaataaaaaaggtacaaaaagtgaagtacaaattacccaaatctctccacccttatataatcattgtcaaccctttgatgagtgatatttccctatacctatgtacccagatagatatatgcatagataaaagtgatgaaatataagtgctgttctatctgtattttttcaccaaacaatatatgttgtgagcttctatgtcaataaatatatatatcagcatctgccttaatgtgtctgtgctgttaggaagaatttttaaaaaagaaaatatagtaaaaaactgtaaaggggggttgtactctgaggtgggatttttaaccgcattttgcaaatgaaaaaaaataaatg

SEQ ID NO: 466649 - DNA, 3773 bp, Homo sapiens
cctgcctcacgagacacttgggacagcgcagaattctcttcctgcttctcctgtcttcctaacccccaaatgcaggcagagcagctgcttctggcttgcaaggatggctttccggactttggccaggatcctcctagtaaccccttggcccaagcccgggacggccactgtcctgtgggaaaggaggccaggagggcaggccttgaacaactggcatgaaggagtgaggcccaaggaaggtccagagcccacccagcaggctagagggagaacggctgcctttgggtcctcaccagcttcaacagggatccaggtccttgccctgcctgtttaccaggcctgtggtgggcagggcaatgagtctctgctgcctggaaggcttgccactatctgtttcatggatacaaagacagaagggaacatcctgttcagagaagaggactccacatccctgagctcagcagtggtcgggcccacatcagagctcatagctgctcgtgctgtgttacactgccctgtctcaggccccgaggaggagacagacagggaaacatcattaacatggaaggtaccaggaaagggtcatataatggaataccacacagcagtgaaaaagaacatggccacatgtaacatgtaacaacatgggcggctctcccagatgtgatgttaagtgagggaaatacagcataaagaaagaacatactatggcatgctatatttatattccatggatatgaacttcaaaaacatgcggaaccaacctacagggagagaagtcaaaatagtagtttcccttgggacagggattactgattgggaagaggcacacaagagccttctggagtgctgaaaatggtctatatctcgacctaggtggtggttacagaggctgatacatattatgtaccaatgtgctggagctggctttcactggctcttcccaactcagtattcaatgacttcacactgccagcttgagatgagccatgatgggaatgtcagcaccacagaagtcagcaggtgccgcagatgccctcctttaagcagatcactcagcattttccagtacaccctgtacacaacactatttcagatcatcttatgtatttgtcagcttaccgatctgctgtatgtctcctctacatgaagtttcatgagggcagggtctatggcttgtcatttttgccactgtatccctggttcctagaacaatgcttgttgtatagtaggtatccaatacatgctgcttgaatgaataaaagtctgagggaaacactggaaacacaagagaggaaactgttacctttgtacctgaatacggaatatttgagctgaggcttcaaccataaaaaagagtttgctaaggagccaagggagaaaggacttcccaggcagagggaataaaatggaggcatgaaagagcatgggaggtctgggggaaagccagccgccagagtggctgtattgtaggtcctcagtgaagatggaaaacagctggctcttccctcaaagctcagtggccctctaggtcccaggccttagtttccattggccacatttctctgtctggcctagctctgtgggggcagcccctgtggccttgccaagatgcccaaaggcagtaggttcggccctgaatgcaaagctcgaggacagggagaaaagaggacagagtggagacaaaggagactgaaacaagtggatgggttgaaaagatgtttagagattgcttagaatagcagatttcctataactggcacttgtaaataagggaatggtaaaagaaatgttgttaggtccacccagtagaatactatttgtaaaaacagagcaaaagatttctaatactgaacagaaagattgacaaaatatacttttaggtgaaaaatgcaaggtacagaacagcatgtagagtattgtattttgtggaagaaaggaagcaatatctattgtttgtctttccataaagatgcactggaaggaaacccaccccccaaataaaggtggtttatgtgtgtgttttagggggagtgctgaagttaatggagttgggtgagactccttactaaatctcgttttatatttattttgatttttcaatgtatttcctgtttagaaataaataatcttgaaagccaaagcaacttaggaagtaaaacgagcaggattggctatgaggttggtaatgtggaagatgttgaaaatgactcctaggcttgtgtaactagatgtaagggggtccctttgctatgataagggacaggagaagacagtaggtttggggaggaagatcatgagatcagtttaggacacattgagtgtgaaatgccttcaaaagagtgagatgactctttgaagaagtttggctgtgaagaagaagagagaggcagggaagtagctgcagaaggaagtaaggtcctggaaggtgggttggtttcttggtttcagtgggagacacctgggcacctgaaaagcagtagggaaagatccagttgaaagggagaacctggttgtccttgagccatgtcattgttaattatcccattttagggatgaggaaatgaggctctggaaggcccaagatcacatcgctagtaagtggcagaaccgaaactggaagctacatcttctgactcccagaccaatggagccatggaaaggtgctggcagggagccattaggagataggattaatgaggtcaccaggcccagaggctcagaagacacccacgtattctgaataatccctctagagcagttgtctcaactgggggtgattttgtcccccaggagacatttgacaatgtctggagacagtttggttgtcagaactcagggtgggggtgtgctattggcacctcgtgggcagaggccagggatactgctaacagtctgcctcactgccccccacccccagcaatgcacaggacagcccttgcaacaagtcaatagtgcccaggttgagaaaccctgctctagaagctccaggggttcagggagcttgtcagcatctccactctctccacaaatgcgagtatctttgttgtttttactatctttttatttctgtgatttgggcacattgtaaaacattcaaacaatgcaaaagtttttaaagtattaagtaaaagtcttgcctccctcaatcagaattccccagaggtaatggttgttattgtaactttagtaaacgggttgaaatccacaagcagaaaacttattttctccctcctatttcttcctaaacactctctgtgacctatttctcccctacttcttggatgaaatctcctgaagagccagaactttttgagacgctttcagataattaaaaaaaatcctccaattacctccaggaattaacatgtccagcctagtggaacagacaaaacccaaacttcactaaaaatgaaagctttacccttctcctccactgaggcctgtcaggctgcagaggccagggatgtggtcagtgtcttctctcttttctgtccctactggcttattatttagccagtttccctgttgatgcatattgaggtagtttccagttttttacttttataaacaatgttgagccatccttgtacctatgtttatctgtacacacttgttatttctttaggacaaatttctagaaatcaacgtgctgagaagtcatgggcattggttgtcacaaagaagccttaacttttggtcccaggttatggatatgtttggcagaaatgtttccactgaaatgtatccactgacagccaggaacacccctt

SEQ ID NO: 466650 - DNA, 1838 bp, Homo sapiens
ccctttgaccggaggccggaaacgcagggacttctgggggggaacccaagcttctaccgaaaatcgcaaaccatgcctgctcttcgaaacagatcaggagtaatgcaggcccggcttcagcatcttagtagcctagaaagttcatttacacttaatcacagttctacaacaactgaagcagacattttccaccaggcacttcttgaaggcaatacagctactgaagtttccctaacagtactagacaccatatcatttttcactcagtgcttcaagacccaacttttaaataatgatggccataacccattaatgaaaaaagtgtttgatatacatcttgcttttcttaaaaatggacaatctgaagtgtcgctgaaacatgtatttgcctcactgagagctttcatcagtaagtttccttcagcatttttcaaaggaagagtaaacatgtgtgctgcattttgctatgaggttttaaagtgctgcacatcgaagattagctcaaccaggaatgaagcatctgcacttttgtatcttttgatgagaaacaactttgagtataccaaaaggaaaacctttttgaggacacatctacaggaggtcttgctggagttgctagaacaatgtgtggatggcttatggaaggcagaacgttatgaaataatttctgagatttccaagttgatcgttccaatttatgagaaacgtcagcgtaaaataatcagtgttgttttcactaaaccttcacttcaaaaagctgtcaaatttccatgttacccagggaagaggcatagacatgattctattctttataatttagcggagaacctaaaggtgctggcaaatgacagtggggtagatgtgaatgaaatgaagcatgatattaagaaatacattgtcattgaggaacagaaaaccacataccgcgtgttctcactcaagtgggagctgaacaatgagaacccatggacacagagaggggaacaactcacacagggcttgttgtgggaagaagatggaaaggagtacatctataaagaaccaaagctcactggcctctcagaaatttccttgagacttgttaaactttatggtgaaaagtttggtacggagaatgtcaaaataattcaggattcagacaaggtaaatgccaaagagcttgatccaaaatatgctcatatacaagttacttatgtgaagccttactttgatgacaaagaactcacagaaaggaagaccgagtttgaaagaaatcataatatcagcagatttgtttttgaggccccttacactttatcaggcaaaaaacagggctgtatagaagaacagtgcaaacgccgtacaatcttgacaacttcaaactcgtttccttacgtgaagaagaggattcctattaactgtgaacagcagattaatttaaaaccaattgatgttgccactgatgaaataaaagataaaactgcagagctgcaaaagctttgctcctctactgacgtggacatgattcagctccaacttaaattgcagggctgtgtttctgtgcaggtcaatgctggtccattagcatatgcaagagctttcttaaatgacagccaagctagcaagtatccacctaagaaagtgagtgagttgaaagacatgtttaggccatacaattacaatgtcattgctactaccacctatgaagcagtatagtttatttaataaaacaaaacctaagacctctaagttattagccctgaaggagaagcattctctgccccatctatacctttgatgaggcattggacagcaatagcattcttgtctggaaacatgaccggcgggcaaatatcaag

SEQ ID NO: 466651 - DNA, 1300 bp, Homo sapiens
agatgaggagatgcaaaaggggttcaagacagcttgcgatcgtcttctcccgccccttgccacctccccgaacacccgcccccgacgcccgacaacacccccgcccacttcaatccaggcaaatcataaatcctacccagtcggcagcatccagatgagccacaactcctttctcagcgcaaccaggccatgggagtgctccatcccctgcctcgcagttactgattctccaagccgggcgccgcccagtcctggtggggcttcccccacccctctccgcgccgggaaatcgcgcgctctttctttacctgcgctccactggtgggcagcgtatgctcccgcgtcgacagctctgtttcgccttccggtccccatagctctgcaggggaacaggatcgctggcgcctcctgggccgctaagcgaccccggggctgcccggcttagcgagtgcttcgcagagaggtagccgagtcgaggcagcgcggttcccaaggaagtcacggctgcggccaccctccagttcggacctccgggcagccgcggttgctttcagtctctgcccattgagacaaaagagcgtgacaagccgcgcgacgcggccaatcagcggggcgaggaggcggcctccccaagcagcctctggccctgaagctactgctagcaagactcgggagctggctggcgggggctgaggccgacaggcacgggagccggcgcggcgtcaagtggagctcggacgcacggaccaggcccatttccctttcatctacagcaatgttcttactcctctcctgctgtaaagccactcatcttcgatttccctgaggacttctgctcctacagactctcgacggagtaaagcttccgatagaggggaaacagattcgctactagtgttgatagtcaagttactaaggttctttatcaacgtctcggagcagatttgagaggcccctgaatcgtcccgggaattttcttcggtgagcatttgtggagactctgggatgtaggttggattaaacttctgtgatgggtccatcggcgtcttgacacaacactaagcttctcctggatctttgaaacgtagcagaaactgatgacggagcctcaaattgctacaaggtagccggaaagagcaagagtgagtgtacttcggatgaagggaatgtggaccctcaggactaaagcagtgggagaggcctgggaggtggggcctggggagggcgaggtctgctctgaagtcaccaagctcctgatcttagaagagatggtgggcgcaggctctggaggctcaagcgg

SEQ ID NO: 466652 - DNA, 953 bp, Homo sapiens
gtagagctaaagttattcaaatacattcagattacacagatcccttatgaattactagtatcatagtaggaagaaaaagatacaagaagaaaaatacatcctagaactcattatcaaaattattggtgtatagtctgttctagcatagattagctttctcaacctgctatataaaattaccagcaagaaaaaaaggtgcaagaataagatttatggctgaagtggcttggtgtcttgattctctattctagcattctcagaaggatcccatccgttagacacgcagaaactgcagggacatttgaatggtcttgattccttcttaactcccttaggctcctcgtttgttggtcttctttcatgcatacgaactctgccgagtaacatgtatctcgatcttgccatcttttctctctgcacagacagcaatgttcttactcctctcctgctgtaaagccactcatcttcgatttccctgaggacttctgctcctacagactctcgacggagtaaagcttccgatagaggggaaacagattcgctactagtgttgatagtcaagttactaaggttctttatcaacgtctcggagcagatttgagaggcccctgaatcgtcccgggaattttcttcggtgagcatttgtggagactctgggatgtaggttggattaaacttctgtgatgggtccatcggcgtcttgacacaacactaagcttctcctggatctttgaaacgtagcagaaactgatgacggagcctcaaattgctacaaggtagccggaaagagcaagagtgagtgtacttcggatgaagggaatgtggaccctcaggactaaagcagtgggagaggcctgggaggtggggcctggggagggcgaggtctgctctgaagtcaccaagctcctgatcttagaagagatggtgggcgcaggctctggaggctcaagcgg

SEQ ID NO: 466653 - DNA, 2084 bp, Homo sapiens
agatgaggagatgcaaaaggggttcaagacagcttgcgatcgtcttctcccgccccttgccacctccccgaacacccgcccccgacgcccgacaacacccccgcccacttcaatccaggcaaatcataaatcctacccagtcggcagcatccagatgagccacaactcctttctcagcgcaaccaggccatgggagtgctccatcccctgcctcgcagttactgattctccaagccgggcgccgcccagtcctggtggggcttcccccacccctctccgcgccgggaaatcgcgcgctctttctttacctgcgctccactggtgggcagcgtatgctcccgcgtcgacagctctgtttcgccttccggtccccatagctctgcaggggaacaggatcgctggcgcctcctgggccgctaagcgaccccggggctgcccggcttagcgagtgcttcgcagagaggtagccgagtcgaggcagcgcggttcccaaggaagtcacggctgcggccaccctccagttcggacctccgggcagccgcggttgctttcagtctctgcccattgagacaaaagagcgtgacaagccgcgcgacgcggccaatcagcggggcgaggaggcggcctccccaagcagcctctggccctgaagctactgctagcaagactcgggagctggctggcgggggctgaggccgacaggcacgggagccggcgcggcgtcaagtggagctcggacgcacggaccaggcccatttccctttcatctgttgtagttctagcagtgagaacttctcactgaatgccacagaaattaaagacacagttgttggaggtatgatgtcagacagcatttgtcaccaaggttggcagaaaatggctagtccaggagagttgaaaatgagcttccacatctgcaaatcgggatgtgttggaacagtactcaacttgtggattcaaggaagtatgaacacagagtctgcataaggaaaggaaaaagatgcatttatctcctaattacactggtgatttccacttatgtcactctgtacatccatgtccctttcttcattttaacttcttatttaaaaataatttcaaacatttaaaaatgttgcaagcataaataaagcttaaagaacacccatgtcccctttaccctaattcccctattattaatgtttctccccatttgctttattatttaagtgtgcactctgtctatacacacacaggatattttttccctgaactgtgaattgcatacatcaattttcagtattcctcgattcaatgtttgcaaatccaaattcttttaaaaaagactgtgttttatctctatgacaatggaaccgttattgcagaatattataaaatgaaaagtcacatggtatatgtgatactgtgaaatatatatttgctcttcgatcctgtttcctggcatgcaactcttaaaatccttagaatttccaaagtgatatctttttgtatgctaataattgactgatggctggcagcctctggttgcttcaggatgggaactagtcaccagagagaccaaggcgccattagagggttgggacttaacagcctcattcccgacctccagggaggggagaggggtggaaggttaagtcgatcaccagtggccaatgatttaatcaatcatacctatgtaatggagcttccataaaatccccaaggaactgggtttggttagcttccagatagctgaatatatggaggttcctggagggtggtgacccaaggagggcatggaagctctgagccccttccccagtacctcaccctatgcatctcttcatctctatcctttgcaatatcctttataataaactggtcaacgttaggtatttccctgagttctgtgagcctttctgacaaattaatcaaacccaaagagggggtcatgtgaaccgaaacttgaagcccatctgtcagaagttctggaggactggatttgcgactggtgtctgaagggcctgggaacagtcttgtgagacctagtcctcagcttgtgggatatgacgctatctccaggtagatttgtgtcagaattgaat

SEQ ID NO: 466654 - DNA, 1080 bp, Homo sapiens
acatgcgtgggcagagtcacaacacagatgctcacccgcacacagaggcatgtgcaccagctccctgcacactcgtgcctggcgtgctcagaggaccacccatgctgctcagggagacagggcttgctcactaatgtccggctgtcatttctccacctaagagccttccatggctccctactgcctacagcattgaatcccaaaaagtcatactctttggactttgaaggttctccacccggtgccccaccctccccacagagctcttcctcattctgtctctgttccctgctttggccagtggctatcctcaatgtgacccacactacacttctgcccacactgcagctctttacccagttaccctccagttcctcacaacggcaagccccaatccctgcttcatttttgtatatgggcgctggacctacagccccactgtccagccatttggaaacaaaaacagatgctattgttcttccttagagaacgtggccagtagaaacagggcacactggaaatcagagtgaatgttcttgaaagagggtcatgggtcaaccaggccaagccaaaggatgcggtagaaccattttccttagaaatctttgggagtgaagtaggcttcagccactcccatccctgcccttgcagctaccactgcgccattagtttagacagggttagggatagagggggaggggtccagatgtggagaaaaaatcagattgcctgtggcccccaggctccttccccagctgcttctgtcctagctcaggcctgggtgccattcttacactctctcagttgtgtgctcacccccgcacacatcacacaccttgctggtcacacagtcacagcctggcctctgctcctgtggtccagtggctggacaccccctgggatggctcaaaggagtcaggacttggaagtggggacatccgggtagctgaaggaaatccacacacccagactctcagacctgaggtaggctccccaggggctgggataggagttggacggaatggaggatggaggacagtgagaagaagaaaggaagagaaatgcaaagtgtggcagccg

SEQ ID NO: 466655 - DNA, 1192 bp, Homo sapiens
tgtaggtggcccagttctcgccatgccacttcacattttcttccctgaacacatgtctctgtgtctgaatttccccttttgccgtctggggtttggggcaattctggaccttgtgaaatctactttccgcccctttgaagacacctcaggcatccttggttgtgtcataatcttggtgaaacttactggaacgatacctttactttacagaaaacaaaacaaacaagaaaaggtcaaaacccagaaatatcagctgcttgtcttctgctgctgcttgtgggccatagtggcatcggccgctttccgctccttcgtgctcaggcctttgtcagaggtcgtctcagaggaaggcttaaccatctcagaggcaactgccagtggatggcgagctctgcattccacgcattcttccactcctgttctgcgaccactccagttccaaaaaagctcggtggtactacgaatcctctctaaatcatactcctcatctgtttattccttatttcttcctccaggagcccactttctcttgagaaagctgcagatcctcgttcagcatggtgcaccagggttcccaaagacctgatgtgtgaggcttctttgccttttcataggtcttggctcaaatcctgactcccctgtgaagatgtcctgaccctcccagcctagagccactactccctccttgaatctcaggatctccaactgtgacatggccatactatttgccacatccccacagacggattgtgatgaggaaggaaagagagagtccatgtagcatgctagatgcggtgtctggtgcaggcctgtgggctcccctaaaatgtggcactccaatgacaatccatccctctctatggagcctacgacagcacacacctcagcgttctagagaggacaggtttcaggccaccggaggaatttagggagtgactacaggagcgaccttatcccacactgtttgaacaagcactgtgggccaatggccatggactgagccagtggaaagtggggcttggacccctctgattggacgtttccatcatcccaacgatgcgttagttccaagtcatgaaggtgggtatttccagaaataaaacaatataacctggaaaagaacagacagaatcagatacattagaagtagttggagtaataacttcagtttctagggagcttggagaggtat

SEQ ID NO: 466656 - DNA, 1580 bp, Homo sapiens
actctttgtcaagaaacaaagatcttgtattcatgtaaatgagtttaattatacagcttgctgttgaaaagtctgtggttaaggatacttatagaatccagtttggtttttctttcaatttctcacttttgcagttatgaatatagacaattaggcatttggttaaatggaaagagagagcagttgctgaactaggtgagggagaactaagcatactgagactgtagagtatcagttgtctctggataatccaagaagatggtcatcaaatctaggctgaggactaccacaaagactcccactgccaagaattaaggaacaggtggagactaatattgactcctcacaaatcccaggctgactcaacagcagagaaaacagcagacaatgtctcttctagcaccccgttctgtgtgatcaccaatcgccctctgcctagcactgccaatggggttacagctactcctgtgctctccattactggaacagattcctctgtggaagccagggagaagaggaggtcctatctgactcctgtacaggataaggaagcagagttttaaggacagcacgctccagacaagctcggcagacacgaaggtctactcaaggtgtcaccctagcagaccttcaagaagcagaaaggacattcagccagtcgagggcagagaggcaagctcaggagcagcctcgtgagaagcctacagacactgaagggcttgaggggagccctgagaagcatgagacctaagcagttcctgcaacagaagctggggagggccagcagccctggggcaggagtctggatgaagaggcctgacatccaactcttccctgcagtgaaaggcctaagttcagcttttctgaagacactcgaggctcctgtaaaatcctaagtctgattcgttttcctctctctctggggctcgattgcttaatatggtaagagactgtgtgtatatcgcgagtcggaggccaaacacaccgtatttcatctgtagcattcaagacttcaaactgtttactgaagctgtaagggaaaaagatgagcagaaggaaataagctttgtttctctgacagttccagaagttagcggggtttggtggaagggtattttggcaccagcagagagcatgctgggctgctgcaaggagcaggagctggcaatcaacagcgagtttggatgttggcaactgaaatggggagaaaaggggatgagccatcttgcagaccactgcttaagaagactgactgtggcagtttgcagtgtggaagggggaaagatggtgaaagctccaagtaggaggctagggctgccattcgtggggatgtttgtggaggatatgtcgcagaaagaaactactcgctttaccagcatccaagatgaggctcatgtccagtgctctagcctcatatctcaggcccaccccttattccagagtaaatagtattttattcaagttgcccatattttcaagttctgtcttggttcagagctttctccctttgctttttcccatactgttttctgttagtcttctcagagctgacactttcttcttttcaggtcttagattac

SEQ ID NO: 466657 - DNA, 2805 bp, Homo sapiens
ccgtggaggaaggcagacttcagactgaaggacagagaaggcaactgccctacagccctgcaggtcttcaagtctgtggttgtgggcactaacccagacaagaaaaggaaagacctgcagtatcggtgcaggaaaggcaaagaagggaacatctcaacatggaaaagctctacaaagaaaatgaaggaaagccagagaatgaaagaaacctagaaagtgagggaaagccagaggatgagggaagtacagaagatgaaggaaagtcagacgaggaagaaaagccggacatggaggggaagacagaatgcgagggaaagcgagaggatgagggagagccaggtgatgagggacaactggaagatgagggaaaccaggaaaagcagggcaagtctgaaggtgaggacaagccacaaagtgagggcaagccagcctcccaggccaagccagagagccagccgcgggccgccgaaaagcgcccggctgaagattatgtgccccggaaagcaaaaagaaaaaccgacagggggacggacgattcccccaaggactctcaggaggacttacaagaaaggcatctgagcagtgaggagatgatgagagaatgtggagatgtgtcaagggctcaggaggagctaaggaaaaaacagaaaatgggtggttttcattggatgcaaagagatgtacaggatccattcgccccaaggggccaacggggtgtgaggggagtgaggggcggaggtaggggccagaaagacttagaagatgtcccatatgtttaatgtctttggcctttaattctgatttctctgatgggaatattgccagtcctgcttttcctggcaggcatttgccggcctatgtgctttaaccttaagctgatactttcctttaggtgtcactcttgttaccagcagacttttgacccaactacagtgctctgtcttttagtagaggattttcacccatgtgcatggaataaatgttcatggtacattgtaaaataacaataaaaaagagttttcagaaccatgtatacagtatcagcccatttctgaaaaaaaatgtttacataatatatccatacatgggggacactatgcaattgagtagatcaaagagaaatcatgaatttctttgtgtggtgggactgaaaattattctttttctcatctgtacttcttttaaatctaaaaagcacaggctatttttgttttaaaggaagtaataaaagaagaaataaatgactcttaaaacccaataatagaaaagcaaaccccaaaaaaggctacgggaagtaaagatatgaacagagacttcattaaagtatatattcagacaacagatatgcacgtgaaaagatgcttagcatcggcgaagataacagtttattgtctccgattggcaaatacgaaaaaagattgacagtatcaagtggagggaacgcagcgggcgggctgcagtgttaatgggaggggtaactggggactcgagctcagtgatgacgcgactctcacgtgaccaggagtcgacgtgtgcagaagtccttatagtccagggcctgtttccctgtagcagctccttattgctggagaaggagaaaagtgcccaagatcctttcaggatatttggttttttgggcgcgacacaaatcgaggtgagggaagagagaggaaaatcccctgaatccctgcaggattaatttattcaaaaaggaaataaaaaatactcaatatgcaaaagtcttgtgaagaaaatgagggaaaaccacagaacatgccaaaggccgaggaagatcgccctttggaggatgtaccacaggaggcagaaggaaatcctcaaccttccgaagaaggcgtaagccaggaagcagaaggaaaccccagaggagggccgaatcagcctggccagggatttaaagaggacacacccgttaggcatttggaccctgaagaaatgataagaggagtagatgagcttgaaaggcttagggaagagataagaagagtaagaaacaagtttgtgatgatgcattggaagcaaagacattcacgcagccgtccttatcctgtgtgctttaggccttgaattcatttttgcctaatattaaaatctggccccagctttctttctgttagcattttctgatgtatctttgacctccattttacttttaatcatctgatgaaattttgttttaggtaatttccttggtaccagcatctcattggattttggattttgacccattttccaggtctatttttcaattggaaactttcacacatttgcatgggaatatgttcattccatgttgtaaagtaaaacataacaggttatggcaaagcagcatatttaatatcagctcacatatgtaggataaaattccaaactttgtgtgtgtgcgtgtgtgtatacatacatccatataacatatatcacaaacttaaccaagcttatttctgtgtggtgtgaaattttatttgttttcttctttttgttctttttgcttatatgtactttttaatgaacacgtgtctcacacacaaaaagaattaaggattttttttacaagtaagagtcaaataatttgcaaccagcttatgagggcaatgggggcacctaaactcttgatgaaagaactttaaaaagaaatgtaaacctcaaattacctctggatctcttagccagaggaataaactggcaattattacagatacacacgtttaagactcagtcttttcatggggaaaatatttgcttcacagggctgcagtggggaagaaatgaggcagtaacagctgtgct

SEQ ID NO: 466658 - DNA, 2112 bp, Homo sapiens
tcaaggttgagaaagatttagatttaaagggactggaacaaattttattcgtcagttaaaaacaattgaaagaaaataaaatctgaaaaactttgaataggtagtaaaagatgatgaattcttagagctttacctcagaatgtgtaattttcatgcttttcctttctagaaatctaggaaacctgacatgggacctttggtaaatacattattattcatacattttgatggaatataactaatatgtttattttctctaaaccatagtttcataagtacaagccagacctttgatttacctaccctatcttctttactgatgaagctgaaactactttgtgatgcctattgtcccagatctttctgttaattgcctaacaacaaaccagtttagaaacatcaactggaatcaatttgcatttgaaaattagatcagcacaaagacttgatattgtggaatgactagcaaacaagcaatgtcatctaacgaacaagaaaggctcttgtgttataatggggaagtccttgttttccagttgtctaaaggaaattttgcagataaagagcctacaaaaacacccatattacatgtcagaagaatggtatttgacagaggaacaaaagtatttgttcagaagtccactggattttttaccataaaggaagaaaactctcatttaaaaatcatgtgttgcaactgtgtgtcagatttcagaactggaattaacctcccttacattgtgatagaaaaaaataaaaagaataatgtttttgaatattttttactaatccttcacagtactaataaatttgaaatgcgtttgagttttaaactaggctatgagatgaaggatggcctaagggtccttaatggccctttaattttatggaggcatgtcaaagcattcttctttatctcttctcaaactggcaaagttgttagtgtgtcaggtaacttttcctctattcagtgggcaggggagattgaaaatttaggtatggttttattgggactaaaggaatgttgtttatctgaggaagaatgtactcaagagccttcaaaatcagattatgcaatttggaataccaaattttgtgtatattctcttgaaagtcaagaagtattaagtgatatatacattattcctcctgcttacagcagtgtggtgacttatgtacatatttgtgcaactgagatcatcaaaaaccagttaagaatatctctcattgcccttactcgaaagaatcagctgatttcatttcagaatggaactcctaaaaatgtgtgccagcttccatttggagatccttgtgcagttcaacttatggattcaggtggaggaaacctctttttcgttgtatcctttatatccaataatgcttgtgctgtatggaaagagagctttcagaaggaatgtcttgttcctctttgtggtgaagaagaaaattctgtccatatcttagatgaaaagttatcagacaattttcaagattcagaacagctagtagagaagatatggtatcgtgtaatagatgatagcttggttgttggagtgaaaactacatcttctttgaagctgtccctgaatgatgtgactttatcattgttaatggatcaagcccatgactccagatttcggcttctaaagtgtcaaaatagggtgattaagttgagtacaaatcctttcccagcaccatacttgatgccatgtgaaataggattggaagcaaaaagggtcacgttgacccctgatagcaagaaagaggaaagctttgtttgtgaacacccatctaagaaagagtgtgtacagataattactgctgtaacatctctttcaccacttttaacattcagtaaattttgttgcactgtactgctacaaattatggagagagaaagtggtaactgtcctaaagatcgttatgttgtgtgtggcagagtttttttaagtctagaagatctttcaactgggaagtacctactgacatttccaaagaagaaacctataggtaattttgttggcacttttagattatatatttaattgaattagaaaattttaagaattctgtttatctgataatgggcagagtttaatgatagagcttgtg

SEQ ID NO: 466659 - DNA, 735 bp, Homo sapiens
gaaaagatgataatacgtcaagtgcagaggagaaggaatgtcttgttcctctttgtggtgaagaagaaaattctgtccatatcttagatgaaaagttatcagacaattttcaagattcagaacagctagtagagaagatatggtatcgtgtaatagatgatagcttggttgttggagtgaaaactacatcttctttgaagctgtccctgaatgatgtgactttatcattgttaatggatcaagcccatgactccagatttcggcttctaaagtgtcaaaatagggtgattaagttgagtacaaatcctttcccagcaccatacttgatgccatgtgaaataggattggaagcaaaaagggtcacgttgacccctgatagcaagaaagaggaaagctttgtttgtgaacacccatctaagaaagagtgtgtacagataattactgctgtaacatctctttcaccacttttaacattcagtaaattttgttgcactgtactgctacaaattatggagagagaaagtggtaactgtcctaaagatcgttatgttgtgtgtggcagagtttttttaagtctagaagatctttcaactgggaagtacctactgacatttccaaagaagaaacctataggtaattttgttggcacttttagattatatatttaattgaattagaaaattttaagaattctgtttatctgataatgggcagagtttaatgatagagcttgtg

SEQ ID NO: 466660 - DNA, 608 bp, Homo sapiens
gctggtctgggtgcaaattaaggccagtgttggggtctgagtgctgtccagaaaggctgtgtgaccaaccctcactagttcctgaggtcagggtctccatgttagggaacagagcaagagacttggaacagctccctacagctgcacttctagaaggtcagcctgtccgattcttgtaacctggaggtccctccccatctgcagccccctgagctgcaggagcggccccatcagtgcacctgattggaacacactagatttcaggtcctggaaactgggcgctaggatccgtttccctggctgcagagagtgggaggtgtgatgtggaatatcccttctcccagcacaccccaattaatactgaagagtagggcaggaggaggtgctgggaaaaccgggtttcttggcacatgggggtgcaagcactgtggttgaaattggccatgtccaaggcacaccagacgatttcaggtcatttttagccctagactggaaaggggtcaggggacaggtgacctgggctcagcccccagcagctcccaactgcccctctcccaagcaactcctgatccctgcttttgaggaaataaacaaataaaaccccgcta

SEQ ID NO: 466661 - DNA, 968 bp, Homo sapiens
  misc_feature (968)..(968): n is a, c, g, or t
gctggtctgggtgcaaattaaggccagtgttggggtctgagtgctgtccagaaaggctgtgtgaccaaccctcactagttcctgaggtcagggtctccatgttagggaacagagcaagagacttggaacagctccctacagctgcacttctagaaggtcagcctgtccgattcttgtaacctggaggtccctccccatctgcagccccctgagctgcaggagcggccccatcagtgcacctgattggaacacactagatttcaggtcctggaaactgggcgctaggatccgtttccctggctgcagagagtgggaggtgtgatgtggaatatcccttctcccagcacaccccaattaatactgaagagtagggcaggaggaggtgctgggaaaaccgggtttcttggcacatgggggtgcaagcactgtggttgaaattggccatgtccaaggcacaccagacgatttcaggtcatttttagccctagactggaaaggggtcaggggacaggtgacctgggctcagcccccagcagctcccaactgcccctctcccaagcaactcctgatccctgcttttgaggaaataaacaaataaaaccccgctaaaaaaaaaaaaaaacctcgggttttggtttgtttttttttaaaaaggggttcaatcgggggttaacaccccgtgtaacaggtgtgttgtctccccaaggggagaggggacgaggctccctttgtggtatgacaaatctattcggcaaccacggggttgttcacccacacgaggggcccagggagatggcctgggacaaaacacaactttttgccccgcgggaaacgggcaacttcttaatccccgcgacaatgagtttctcaccacaagtgttggtgtgcaccaggaaaccgtgtctctgtgaccccgttagttcagactgtcgttaaaagacggcgtcccaattactggacttataacn

SEQ ID NO: 466662 - DNA, 464 bp, Homo sapiens
aatatgtcaagtgcggcggttaatcggaggggctgatctgtactgaggtccgcgcatctaagccactagctgcaggagcggccccatcagtgcacctgattggaacacactagatttcaggtcctggaaactgggcgctaggatccgtttccctggctgcagagagtgggaggtgtgatgtggaatatcccttctcccagcacaccccaattaatactgaagagtagggcaggaggaggtgctgggaaaaccgggtttcttggcacatgggggtgcaagcactgtggttgaaattggccatgtccaaggcacaccagacgatttcaggtcatttttagccctagactggaaaggggtcaggggacaggtgacctgggctcagcccccagcagctcccaactgcccctctcccaagcaactcctgatccctgcttttgaggaaataaacaaataaaaccccgcta

SEQ ID NO: 466663 - DNA, 3360 bp, Homo sapiens
gctggtctgggtgcaaattaaggccagtgttggggtctgagtgctgtccagaaaggctgtgtgaccaaccctcactagttcctgaggtcagggtctccatgttagggaacagagcaagagacttggaacagctccctacagctgcacttctagaaggtcagcctgtccgattcttgtaacctggaggtccctccccatctgcagccccctgagctgcaggagcggccccatcagtgcacctgattggaacacactagatttcaggtcctggaaactgggcgctaggatccgtttccctggctgcagagagtgggaggtgtgatgtggaatatcccttctcccagcacaccccaattaatactgaagagtagggcaggaggaggtgctgggaaaaccgggtttcttggcacatgggggtgcaagcactgtggttgaaattggccatgtccaaggcacaccagacgatttcaggtcatttttagccctagactggaaaggggtcaggggacaggtgacctgggctcagcccccagcagctcccaactgcccctctcccaagcaactcctgatccctgcttttgaggaaataaacaaataaaaccccgctactccgaagatttttctttaatgaaaaggattcgtttttccaaattctatttccaaagccgaggagattgccgggctggagcgcatcgttggtgacgcttgcccgtcggaccctggcagcggctggaggaggctcagcccatcggtccgtccggaggggcttgcgggaggggttggtttgtttgggatttaggggttggttgaggatttgttttgtttaggtagggagtattggggtgataagttagaacaactgcgaaacgagttagcgggcgcattcggccggcctcttctttcacccccgacttcatgcggcttgggctgagggcggaccacattcggccccgccgctgcgtgccggcttcgttccggccgaaatttgaaaggaggaaaaacgacgcgatcgactgaaggaccctgccggccgggactggtcacccgcagagaaggaagaaggacgaggatgcggatggcggcgctggtggcagggaccggcgtctctgtgcgcgcgggccgggaccgcgatcctcgcgctggggccagccagccgccgccccgagaggtctcgcccgcgctgagccctgtccctggggcccccgcccctgttgcgcccggagctcagccacagatgtccagccacaattctcggttggccgcagactcgtacaagaattgccgccagtccaggacagctcggagctgcgcgtcggaccacctagcaggcgctcagcagcggctgcccatccggcgcacgcggatcctgaccctgtgcggggatccccatcgcccctggcgtggctccttcgatcgcggcccggagtccgcagagtggcccgcgttgggtctcagcgccgccccaggtcgagggggaatctcctctgtctggcctggggaaccccgactcccctctccctgcccccagcctgggatctccgggaatccggaaggcaggagccccaggccgggtcgcgtttccgagcccggggtccgggctgctggattcgtgggtcccccgcccccgcccagccccgcgcacgcaccggctcgggcgctctccgctttcctgtggctgagtcgcggccggggcgcctgcggtggcggtggcggcggtggcccgggcggcggggagtgctggaatgcgccgccgggtcacctgcagcgcccgtggagccggactgggagccggcgggctgccgaggcgcaaggctgaacccgagcaggcgcctctggcggctcggggccggggcgggcttttagtgggccgctccaacaatacgggcctggcgcggagaaaggggctcggctgcaattggtactggatttgaataacgccacggggccatcaatggtcattgtgtcggcgggtaatgaatctccgctgtctctcgggctggccaggcagctgcaacctgcgctcaggcagctcttaaagacatagcgtgcccctccccgggggccgcctccccctctgcaccggccggacccctcgtcctcccacccccactcggcaccctcaactcccgatgccccgcctgctccctcggcctgacccctttgcccatcgccccctcccttctcctgggccaggcaccagcatcccggccctgctctcccgtggacctgactcaggccccggccttggctgagctctccaagagcacccagggcaccccagagtcttttacggcccaccccctgtctcccagctgcatggaaaccaaaggcctctggagccccctccctaggcccctgcccaggggcttccactggagggtgagggggaacagtctggaagtcagagggtcaccccctgagaagaccatgctgaaggataaaggagaagggggtacagtccccacccctgggctgaggatgccatccctggagaccacaccccacgcgggagctggagcctgccccctcccccgaccaaggaccagagcttgattcccaggctccagcaggctcctgggtacctcggggctagcagcaagggtggggggaggggagcaggtgggtgtgagaggggcgtggaatctgtgaatgcttgtcttgtcattgtctcttccattggacagtccacccatccaggagagcaggggctctgtccaaggtctaatgcgcccccagccccacccccagcctggtctggcagagacggttctcagtctattgggtaaatacatagccagcttctcacccccaaagcccagcctgtctttcccaatgaacctcacaccctaaagtgggagtgtgtggccatttttcccatacagcctgccttccattcaccccagagttctccaagcacccagaatacccctgcctctgtcctggcacaccaagctgccttgctctgaaatgctctcctgtcctcacaatctctgggtggccttgccacgtgcccggctgaattgtgaatatcggtttgtctgagtctcctccctaggacaggaaacgggtcctacggatctttgtgcctccagggcctagtacagtgccctccccccaaccaatcattaaatatctgtgggtggttgcacgcatgcccggtgactttaaaatgagccacatagacttcttggagtttcttataaaagttgaaagaatgttgcttgtgggaggtaattcttgcagcccgggttttacagggagggagtcctgctaaccagatcccaactcctgggaatgctccatttggtaataataacagcaaagagtgtattgtgtgccaagcactaagctctttgaagg

SEQ ID NO: 466664 - DNA, 1639 bp, Homo sapiens
tcacatgagcgaaccatgtggtctactatgctggttgactccaaaacgggaactggctgagtgcagatacagcctgccaggttcttctaccctggtgttgaagaaccggtctggctttgtgcgcatggcccttcagcatggggtgcctctaatacctgcctatgcctttggggagacggacctctatgatcagcacattttcactcctggtggctttgtcaaccgcttccagaagtggttccagagcatggtacacatctacccttgtgctttctatggacgtggcttcaccaagaactcctggggccttctgccctatagtcggcctgtaaccaccatcgtcggggagcctctaccaatgcccaagattgagaatccaagccaggagatcgtggctaaatatcacacactctatattgatgccctacgtaaactgtttgaccagcataagaccaagtttggtatctcagagacccaggagctggagataatttgacagacatccccagtagccttcaccctggctggaagctcttttctgccctttctttgcagctactggtgagatagtcccaagaaacagggaagagcctaggggagaggtgccctgacggcactttggtgccagcattgaggaaaacaatggacaaaataaaaagcccatcttctgataactgcgtgtgcaccaactactctgttttgaaggctctgggatgcatgtctctccttctctagctgtcaaacagccccatctcccggcattgagccccatcttctggcattgagtcctgcttcctacaggagtaggactggggccttgagagccagtgggctttgagtttaagctccaccaacttcaagccatgtgactttggggcaatcagtcacctctgagcctcctttcttcttctataaaatgagactaacaatctgtctcttgcttacctcaaaggccgttgggaagatcaaacaatattggatgtgattgaactttataaactggagagctacaccattttcttctccaaccattttacccatttcctgtccctgagcaaacaacgcccgaaataccctctgctacccactagccctcactcagtttctgcctcacaaagctgtaacagaatgggttgggctcaggcctaattttctctgtcattccctcagcaacttgcctatacttgtgtggccctataattctggcctttgtttgagagtcagccagcctgctcaggatgaaaatgaggcgcctggcttttagcagccataaagaactctccttctgaatggcaagtctctcagactcttggtctaatggctgttgcaatgacaggctacaaaatttggctcacatccctctcattccatccctcttgggtgggtgccatttggtccagtgatttacctgcattacgttggtcaatttggtctacaacatcctgcgtgtttactgcagtgtgagctgctgcctctatcctgggtgcctgcctcatgtgatgatttgtatacagtggccaaagacatgcttctgcttttctgctgtctttgttacttcttgtgccagagattacgttttccctgagcttccataaagtgtttttaaacagtctgtagctttcctgtgactggtttcctt

SEQ ID NO: 466665 - DNA, 931 bp, Homo sapiens
  misc_feature (11)..(13): n is a, c, g, or t
  misc_feature (15)..(15): n is a, c, g, or t
tcctccttttnnnanccctgtgcctcatccctgcctcttgtggcacctgatgcctccaaattctgagtctttcctagatcctccagtgcaaataggctcacatcttgtaggcatcccccttgcagcaaccactgtgattgctgtcaacctctacctggtggtgttcacaccatactggcctgtcactgtgcttattcttacctggctggcttttgactggaagacccctcagcgaggccaggaaacagcagggggtgagagcaccctggggcaggcccacagtgggaatggacaaagcttggctgcattgcctctgttttcaggcggccgccggtttacctgtgtgaggcactggcgcctgtggaaacactacagcgattatttccctctcaagcttctgaagactcatgacatctgccccagccgcaactacatcctcgtctgccaccctcatgggctctttgcccatggatggtttggccactttgccacagaggcctcaggcttctccaagatatttcctggcatcaccccttacatactcacactgggagcctttttctggatgcctttcctcagagaatatgtaatgtctacaggggcctgctctgtgagtcgatcctccattgactttctgctgactcataaaggcacaggcaacatggtcattgtggtgattggtggactggctgagtgcagatacagcctgccaggttcttctaccctggtgttgaagaaccggtctggctttgtgcgcatggcccttcagcatgggtaaggacagctccagtccaggctggcggaagggatccaaaagtgttgcagggaaagaagaagagggggttttgatgaaaggacatccacagagagaggaggaagtatacaatacattcttacgaactatggtcatcagaaagataagttttatttg

SEQ ID NO: 466666 - DNA, 2444 bp, Homo sapiens
  misc_feature (11)..(13): n is a, c, g, or t
  misc_feature (15)..(15): n is a, c, g, or t
tcctccttttnnnanccctgtgcctcatccctgcctcttgtggcacctgatgcctccaaattctgagtctttcctagatcctccagtgcaaataggctcacatcttgtaggcatcccccttgcagcaaccactgtgattgctgtcaacctctacctggtggtgttcacaccatactggcctgtcactgtgcttattcttacctggctggcttttgactggaagacccctcagcgaggccaggaaacagcagggggtgagagcaccctggggcaggcccacagtgggaatggacaaagcttggctgcattgcctctgttttcaggcggccgccggtttacctgtgtgaggcactggcgcctgtggaaacactacagcgattatttccctctcaagcttctgaagactcatgacatctgccccagccgcaactacatcctcgtctgccaccctcatgggctctttgcccatggatggtttggccactttgccacagaggcctcaggcttctccaagatatttcctggcatcaccccttacatactcacactgggagcctttttctggatgcctttcctcagagaatatgtaatgtctacaggggcctgctctgtgagtcgatcctccattgactttctgctgactcataaaggcacaggcaacatggtcattgtggtgattggtggactggctgagtgcagatacagcctgccaggttcttctaccctggtgttgaagaaccggtctggctttgtgcgcatggcccttcagcatgggcagccaggggtaggccatggagcccccacactcaacttggacctaggcacagctggactggggtctgagaagcctgtaggcagacccagggatcatgcgccgtcagcgtgtctggcattcgacaaggtccctacctttctgggcttcagaagatatgcttttgctctgcagggtgcctctaatacctgcctatgcctttggggagacggacctctatgatcagcacattttcactcctggtggctttgtcaaccgcttccagaagtggttccagagcatggtacacatctacccttgtgctttctatggacgtggcttcaccaagaactcctggggccttctgccctatagtcggcctgtaaccaccatcgtcggggagcctctaccaatgcccaagattgagaatccaagccaggagatcgtggctaaatatcacacactctatattgatgccctacgtaaactgtttgaccagcataagaccaagtttggtatctcagagacccaggagctggagataatttgacagacatccccagtagccttcaccctggctggaagctcttttctgccctttctttgcagctactggtgagatagtcccaagaaacagggaagagcctaggggagaggtgccctgacggcactttggtgccagcattgaggaaaacaatggacaaaataaaaagcccatcttctgataactgcgtgtgcaccaactactctgttttgaaggctctgggatgcatgtctctccttctctagctgtcaaacagccccatctcccggcattgagccccatcttctggcattgagtcctgcttcctacaggagtaggactggggccttgagagccagtgggctttgagtttaagctccaccaacttcaagccatgtgactttggggcaatcagtcacctctgagcctcctttcttcttctataaaatgagactaacaatctgtctcttgcttacctcaaaggccgttgggaagatcaaacaatattggatgtgattgaactttataaactggagagctacaccattttcttctccaaccattttacccatttcctgtccctgagcaaacaacgcccgaaataccctctgctacccactagccctcactcagtttctgcctcacaaagctgtaacagaatgggttgggctcaggcctaattttctctgtcattccctcagcaacttgcctatacttgtgtggccctataattctggcctttgtttgagagtcagccagcctgctcaggatgaaaatgaggcgcctggcttttagcagccataaagaactctccttctgaatggcaagtctctcagactcttggtctaatggctgttgcaatgacaggctacaaaatttggctcacatccctctcattccatccctcttgggtgggtgccatttggtccagtgatttacctgcattacgttggtcaatttggtctacaacatcctgcgtgtttactgcagtgtgagctgctgcctctatcctgggtgcctgcctcatgtgatgatttgtatacagtggccaaagacatgcttctgcttttctgctgtctttgttacttcttgtgccagagattacgttttccctgagcttccataaagtgtttttaaacagtctgtagctttcctgtgactggtttcctt

SEQ ID NO: 466667 - DNA, 1279 bp, Homo sapiens
  misc_feature (11)..(13): n is a, c, g, or t
  misc_feature (15)..(15): n is a, c, g, or t
tcctccttttnnnanccctgtgcctcatccctgcctcttgtggcacctgatgcctccaaattctgagtctttcctagatcctccagtgcaaataggctcacatcttgtaggcatcccccttgcagcaaccactgtgattgctgtcaacctctacctggtggtgttcacaccatactggcctgtcactgtgcttattcttacctggctggcttttgactggaagacccctcagcgaggccaggaaacagcagggggtgagagcaccctggggcaggcccacagtgggaatggacaaagcttggctgcattgcctctgttttcaggcggccgccggtttacctgtgtgaggcactggcgcctgtggaaacactacagcgattatttccctctcaagcttctgaagactcatgacatctgccccagccgcaactacatcctcgtctgccaccctcatgggctctttgcccatggatggtttggccactttgccacagaggcctcaggcttctccaagatatttcctggcatcaccccttacatactcacactgggagcctttttctggatgcctttcctcagagaatatgtaatgtctacaggggcctgctctgtgagtcgatcctccattgactttctgctgactcataaaggcacaggcaacatggtcattgtggtgattggtggactggctgagtgcagatacagcctgccaggttcttctaccctggtgttgaagaaccggtctggctttgtgcgcatggcccttcagcatggggtgcctctaatacctgcctatgcctttggggagacggacctctatgatcagcacattttcactcctggtggctttgtcaaccgcttccagaagtggttccagagcatggtacacatctacccttgtgctttctatggacgtggcttcaccaagaactcctggggccttctgccctatagtcggcctgtaaccaccatcgtcggggagcctctaccaatgcccaagattgagaatccaagccaggagatcgtggctaaatatcacacactctatattgatgccctacgtaaactgtttgaccagcataagaccaagtttggtatctcagagacccaggagctggagataatttgacagacatccccagtagccttcaccctggctggaagtcatcagctattgttagtgttagtgtattttatgtgtggcccaagacaattcttccaatgtggcccagggaagccaaaagactggacaccctgacctaaggtaatggggatgtgg

SEQ ID NO: 466668 - DNA, 1354 bp, Homo sapiens
ccaaacatggatcctcatgattttattttctagattggctgataggctgaataatctcctgtagggtaagaagtgtcaactgtatcaagcacatggaggtggactggctacaggagaaagtgtgacgtgggtgaaggagttcttattgagccatgggaggaagaaatagtacagaagagcaaagaataataatgagtcagctagacagaagacaggagtcatcagatttgtaccctagttactcgacccatcaactgactgtggtttttgggaacaggcccggcaccacctctgcgcacaaccccgcgggcctggctcaggcgggagtgcggggccagcaccatgagcgccccgggcagccccgaccaggcctatgacttcctgctcaagttcctgctggtgggcgacagggacgtaggcaagagtgagatcctggagagcctgcaggatggtgcagctgagtccccgtacagccatctcggggggatcgactacaagacgaccaccatcctgctggacggccagcgggtgaagctgaagctctgggatacgtcggggcagggaagattttgtaccatattccgctcctactctcgtggtgcacaaggagtgatcctggtctacgacattgcaaaccgctggtctttcgagggtatggatcgatggattaagaagattgaggaacatgcccctggtgtccctaaaatcctggtggggaatcgcctacatctggcattcaagaggcaggtgcccagggagcaggcccaggcctacgccgagcgcctgggtgtgaccttctttgaggtcagccctctgtgcaatttcaacatcatagagtctttcacggagctggccaggatagtgctgctgcggcacaggatgaattggctcgggaggccgagcaaggtactgagcttgcaagacctctgctgccgcaccatcgtgtcctgcacacctgtgcatctggtggacaagctcccgctccccagtaccttaagaagccacctcaagtccttctccatggctaagggcctgaatgccaggatgatgcgaggcctctcctactccctcaccaccagctccactcacaagagcagcctctgcaaagtggagatcgtctgcccaccccagagcccacccaaaaactgcaccagaaacagctgcaaaatttcttaaggaaggcaccaaaaggaaacaagctggaatcgctccaggaaaaactctggttacacctggaagatggaagtcgcattgtagattcaagaaattagttttcagtttctcacgggaaccatgctgcttgggaatgtgtgtgatgccttctgtcaataaaaacacattacacagtttgact

SEQ ID NO: 466669 - DNA, 1339 bp, Homo sapiens
aggagattcctttgacataatccaaaaggcatggttccataacgatcacatgaaagttttaagggaaatgtataggtttccatgatgaattaactgctgtgtcactactctgtgctgggtaagaaaaaggaaaacaatcgctgaatcagtttcctagggtttgtaaaagaaatccatcaaagccaccacctcatttcgctttatttcacagacttccccatctcattttttatgttctatgctaatttctcaagaagaacaggcccggcaccacctctgcgcacaaccccgcgggcctggctcaggcgggagtgcggggccagcaccatgagcgccccgggcagccccgaccaggcctatgacttcctgctcaagttcctgctggtgggcgacagggacgtaggcaagagtgagatcctggagagcctgcaggatggtgcagctgagtccccgtacagccatctcggggggatcgactacaagacgaccaccatcctgctggacggccagcgggtgaagctgaagctctgggatacgtcggggcagggaagattttgtaccatattccgctcctactctcgtggtgcacaaggagtgatcctggtctacgacattgcaaaccgctggtctttcgagggtatggatcgatggattaagaagattgaggaacatgcccctggtgtccctaaaatcctggtggggaatcgcctacatctggcattcaagaggcaggtgcccagggagcaggcccaggcctacgccgagcgcctgggtgtgaccttctttgaggtcagccctctgtgcaatttcaacatcatagagtctttcacggagctggccaggatagtgctgctgcggcacaggatgaattggctcgggaggccgagcaaggtactgagcttgcaagacctctgctgccgcaccatcgtgtcctgcacacctgtgcatctggtggacaagctcccgctccccagtaccttaagaagccacctcaagtccttctccatggctaagggcctgaatgccaggatgatgcgaggcctctcctactccctcaccaccagctccactcacaagagcagcctctgcaaagtggagatcgtctgcccaccccagagcccacccaaaaactgcaccagaaacagctgcaaaatttcttaaggaaggcaccaaaaggaaacaagctggaatcgctccaggaaaaactctggttacacctggaagatggaagtcgcattgtagattcaagaaattagttttcagtttctcacgggaaccatgctgcttgggaatgtgtgtgatgccttctgtcaataaaaacacattacacagtttgact

SEQ ID NO: 466670 - DNA, 268 bp, Homo sapiens
attggctgataggctgaataatctcctgtagggtaagaagtgtcaactgtatcaagcacatggaggtggactggctacaggagaaaggttttccaaatcaaattccaagtatttctttctctttttatattaccattaggagaaataactaatgtagatgacgggttgatgggtgcagcaaaccaccatggcacgtgtatacctatgtaacaaacctgtacattctccacatgtatcccagaacttaaaagtataataaaaaaattta

SEQ ID NO: 466671 - DNA, 820 bp, Homo sapiens
aggagattcctttgacataatccaaaaggcatggttccataacgatcacatgaaagttttaagggaaatgtataggtttccatgatgaattaactgctgtgtcactactctgtgctgggtaagaaaaaggaaaacaatcgctgaatcagtttcctagggtttgtaaaagaaatccatcaaagccaccacctcatttcgctttatttcacagacttccccatctcattttttatgttctatgctaatttctcaagaagaacaggcccggcaccacctctgcgcacaaccccgcgggcctggctcaggcgggagtgcggggccagcaccatgagcgccccgggcagccccgaccaggcctatgacttcctgctcaagttcctgctggtgggcgacagggacgtaggcaagagtgagatcctggagagcctgcaggatggtgcagctgagtccccgtacagccatctcggggggatcgactacaagacgaccaccatcctgctggacggccagatgatgcgaggcctctcctactccctcaccaccagctccactcacaagagcagcctctgcaaagtggagatcgtctgcccaccccagagcccacccaaaaactgcaccagaaacagctgcaaaatttcttaaggaaggcaccaaaaggaaacaagctggaatcgctccaggaaaaactctggttacacctggaagatggaagtcgcattgtagattcaagaaattagttttcagtttctcacgggaaccatgctgcttgggaatgtgtgtgatgccttctgtcaataaaaacacattacacagtttgact

SEQ ID NO: 466672 - DNA, 1491 bp, Homo sapiens
gccatatggaaagctgtatcttctgcaggttgcttggtgtatgaaggagatgggctttgaggatctgggtcgtgatggctgctgaagcttctacttcagatttgaagggcagcagtcctaaggagacccccaacacttccatccctggtgggatatgatgcctggctcaaattggctgataggctgaataatctcctgtagggtaagaagtgtcaactgtatcaagcacatggaggtggactggctacaggagaaagtgtgacgtgggtgaaggagttcttattgagccatgggaggaagaaatagtacagaagagcaaagaataataatgagtcagctagacagaagacaggagtcatcagatttgtaccctagttactcgacccatcaactgactgtggtttttgggaacaggcccggcaccacctctgcgcacaaccccgcgggcctggctcaggcgggagtgcggggccagcaccatgagcgccccgggcagccccgaccaggcctatgacttcctgctcaagttcctgctggtgggcgacagggacgtaggcaagagtgagatcctggagagcctgcaggatggtgcagctgagtccccgtacagccatctcggggggatcgactacaagacgaccaccatcctgctggacggccagcgggtgaagctgaagctctgggatacgtcggggcagggaagattttgtaccatattccgctcctactctcgtggtgcacaaggagtgatcctggtctacgacattgcaaaccgctggtctttcgagggtatggatcgatggattaagaagattgaggaacatgcccctggtgtccctaaaatcctggtggggaatcgcctacatctggcattcaagaggcaggtgcccagggagcaggcccaggcctacgccgagcgcctgggtgtgaccttctttgaggtcagccctctgtgcaatttcaacatcatagagtctttcacggagctggccaggatagtgctgctgcggcacaggatgaattggctcgggaggccgagcaaggtactgagcttgcaagacctctgctgccgcaccatcgtgtcctgcacacctgtgcatctggtggacaagctcccgctccccagtaccttaagaagccacctcaagtccttctccatggctaagggcctgaatgccaggatgatgcgaggcctctcctactccctcaccaccagctccactcacaagagcagcctctgcaaagtggagatcgtctgcccaccccagagcccacccaaaaactgcaccagaaacagctgcaaaatttcttaaggaaggcaccaaaaggaaacaagctggaatcgctccaggaaaaactctggttacacctggaagatggaagtcgcattgtagattcaagaaattagttttcagtttctcacgggaaccatgctgcttgggaatgtgtgtgatgccttctgtcaataaaaacacattacacagtttgact

SEQ ID NO: 466673 - DNA, 1739 bp, Homo sapiens
ccttcccaccaagccagcccagccatggaagaagggaagacaggcaagtgtctttctcgcgccaagacctccccccgggcccagctgtcctgcagcaaggcaggcggtgtggagagctgcttcctttcctgcccggctcacacactcttcgtgccagactcggaaaatagctacgtcctgagctgcggagttccagggccgcagggcaaggcgctgcagaaacgcaacggcaccagctctggcctcgggcccagctgctcagggaagaccttcctgctctcggccctgctccgtgtggcctggggtgctggcgatgagccaggcccaggacctagaagccagcaggctgcaggccgagttctagcccaggatgcccccaccacccccatcaaacagaaggcccgcttcaagatccgagatgccaagtgccacctccggccccacagccaggcacgagcaaaggagaccgccaggcagccgctgctggaccactgccatgtgactttcgtgaccctcaagtgtgactcctccaagaagaggcgccgtggccgcaagtccccatccaaggaggtgtcccacatcacagcagagtttgagatcgagacaaagatggaagaggcctcagacacatgcgaagcggactgcttgcggaagcgagcagaacagagcctgcaggccgccatcaagaccctgcgcaagtccatcggccggcagcagttctatgtccaggtctcaggcactgagtacgaggtagcccagaggccagccaaggcgctggaggggcagggggcatgtggcgcaggccaggtgctacaggacagcaaatgcggccagtgttctccaggcttcttctcggccgatggcttcaagccctgccaggcctgccccgtgggcacgtaccagcctgagcccgggcgcaccggctgcttcccctgtggagggggtttgctcaccaaacacgaaggcaccacctccttccaggactgcgaggctaaagacctcgagggcatgagaggtcctggggacagcaccccagtgctgccctttccctgcacccctccacacccaccacactgccttgtgtcccccggcagtgcactgctcccccggccaccactacaacaccaccacccaccgctgcatccgctgccccgtcggcacctaccagcccgagtttggccagaaccactgcatcacctgtccgggcaacaccagcacagacttcgatggctccaccaacgtcacacactgcaaaaaccagcactgcggcggcgagcttggtgactacaccggctacatcgagtcccccaactaccctggcgactacccagccaacgctgaatgcgtctggcacatcgcgcctcccccaaagcgcaggatcctcatcgtggtccctgagatcttcctgcccatcgaggatgagtgcggcgatgttctggtcatgaggaagagtgcctctcccacgtccatcaccacctatgagacctgccagacctacgagaggcccatcgccttcacctcccgctcccgcaagctctggatccagttcaaatccaatgaaggcaacagcggcaaaggcttccaagtgccctatgtcacctacgatgaggactaccagcaactcatagaggacatcgtgcgcgatgggcgcctgtacgcctcggagaaccaccaggaaattttgaaagacaagaagctgatcaaggccctcttcgacgtgctggcgcatccccagaact

SEQ ID NO: 466674 - DNA, 997 bp, Homo sapiens
aggccctgtgggtcctatatgtgccctgcaacttggggaaaatggaggtggggttgtggtctctatgctgtagcagccggaaagccaaaaacaagccgtacttctcgctcttgacaggatcccaaggttttcagtggtggtgtcactgctgccaagctggaccgaaaacggccatcggcatgctgcccaaccagcaccatgtccaaagacctgaaaattctatgtaaagaccctgctttggagctgagctgctaccgggaccatcagttcagtggccgtaaatttcagcaggaaaaattactgaaggaaagctccacattgaatatggggaatctttccttttatacaaccgaagagaaaatacatgaactctttagtagatctgatatcaggaatatctttatgggcctggataaaataaagaaaacagcatgtggtttttgctttgtagaatgccataacagagctgatgctgaaaatgccatgcggtttctaactgggacctgcctagatgaatggattatctgcactgattgggatgtcggttttagagagggtcaacagtatggtcgcggtaaatctgggggtcaggtaagggatgagtttcgtgaagattttcattctggtagaggaggctttggaagacagactcagatctagaacaatccatagagaaaaagttttaactctaaccccttgaaaagtgtgttatagaccaacctcaagtctgcaaatagccaattccaagtttaaattaccttacttgttgatgtatttttttctctgaaaatttgttaaatagcagaaacaaaaaaaatccatttgtttttgtctgaattttgaagatgcttttcagattaccagtttgactgttaggtggtccaaagtgaagtgttcttcgggaacaaattaggtatgtaagatcagagtcaaccaaagcacaacttcccttttaagaagatttctgttggattctatggccatgttcctgcagccc

SEQ ID NO: 466675 - DNA, 1998 bp, Homo sapiens
gggcacgtaagcacacaagcagttgaacgtggaaggcgttgggagccagataatacaagatgtggactcttgtggctggaacagctgggtggccttggctttgcagggtatgttcccggcccacagggggctctccatggatctgaggagactggcagggcaggatcggaatcggcaccctggagaagctgtcgttggagacggccttggcgagacagtgtgttgcagctccagctctgtccgctgggttcagccccctcaccttacctcagtcactaacctctgtgcgctcagcgttctcagctgttaagtggacgtaacacaggttgagcatcctttatccaaaatgcttgggaccagaagtgtttccagtgttggatgttttcacatttgggaacatttgcagatacataatgaagtagcttgtggatggacccaagtctaaagatggaacgcatttgttttatatactccttgtacacatacctgaaggcaattttacatggcatttcaataattttgtgcataaaacaaagtttgtgtgaagtacttatgtgtagaattctccacttgtggcatcatgtcaatgcccaaaaagctttgggttttggagcatttcagattctggattttcggatgaggaatgctcagcctatccctaaccctgtgccaggccctgtgctgggtactcgtgatactgaaaagaatgaagctcatgtctccccaacgggttacccacggggcaaagattattacatccccatttcacagccgagaaaacagacatcctgtgctgcaggggagcggaggctttgtcctcacactcagggcctgccagtaacagccgtggaaggtcaaaagaggagccaggagggtatgaactgcatgaacaaagaccatggctgtgcccacatctgccgggagacgcccaaaggtggggtggcctgcgactgcaggcccggctttgaccttgcccaaaaccagaaggactgcacactaacctgtaattatggaaacggaggctgccagcacagctgtgaggacacagacacaggccccacgtgtggttgccaccagaagtacgccctccactcagacggtcgcacgtgcatcgagaaggatgaggctgcaattgagcgctctcagttcaatgccacgtcagtagctgatgtggacaagcgggtgaaacggcggctactcatggagacgtgcgcagtcaataacggaggctgcgaccggacatgcaaggacacagccactggcgtgcgatgcagctgccccgttggattcacactgcagccggacgggaagacatgcaaagacatcaacgagtgcctggtcaacaacggaggctgcgaccacttctgccgcaacaccgtgggcagcttcgagtgcggctgccggaagggctacaagctgctcaccgacgagcgcacctgccaggacatcgacgagtgctccttcgagcggacctgtgaccacatctgcatcaactccccgggcagcttccagtgcctgtgtcaccgcggctacatcctctacgggacaacccactgcggagccgccagcctcccctctgcccttacgcccgctgtgcttccagatgtggacgagtgcagcatgagcaacgggagctgtgaccagggctgcgtcaacaccaagggcagctacgagtgcgtctgtcccccggggaggcggctccactggaacgggaaggattgcgtgggcatgctcgcagcactgggtgcccctaggctgagttctggacgggcccctgcgttccctggttccctgtacatgggaccctgtctgggtgctggggctgtgggcctgccctcctggaacctccacgccgggtccttgccccgccacactctgacatccccagggcagcctaagtgagccttttaaatcactcctcactcctcccttgctgtgagggtctgtgagtgaggcctgccccatcacccacccagagccgcagccttggccacttcc

SEQ ID NO: 466676 - DNA, 872 bp, Homo sapiens
aacttggcatttctgtaagacatgcgtagggaccctgggctcctgctgctgtgccacacggattcctctgacctccaagtggacatgcagcacctgggaagttcccaagtcctgattcgagatgccctgggcatgagtcatctgtttctgactgacttcgtctatgatgctgtgtgtggggggcagaaaagtctgtctgccatcctcagttgtccagacactttctgtaagatcctcgtcagtatcagcgaattctcttctgagggtcccctgcttttcttgatcaacagtgcctcttctaaggggcgtggaggcaccatctttggcatctgtctctataaggtcatggaaatcaccccttcttttgacttgtctctccaggagtgccggaatgtcatggctgagaaaagagatgttaacaggctgtatgatgttggccacagagtgcccccctaaagaggcctcagaagaatgaagggtaagaagctcctccatgaaatcagatggcacaaaattagaggaaaaagagtccttggcatgaggctgccaccaggagaattctgaagatgcagggcatgaatggtcaatgcctttcgttgttggggcagaggtggatgacccaccagagccacctagagataacatttccggaaaagtcttcaagacgtaaaccaggcattacccaagtcccacttcgctgtttggagcccttaacttggaccccaccaactacactgccttgaaagcctgaaatactgcctggaatatttgttgtacccaggcttttctactctcaggatcacatatgtcctcaaatccgtcttatctacagtatgtttttgccttacataaatgcagatataaaacttaaa

SEQ ID NO: 466677 - DNA, 1188 bp, Homo sapiens
tatctctcagttttttaaaatctatgccggacgagcatctctggcaggcatcagggcagtgcttacacctccagagtcagggagctcactacctcctgcaacagcttctaccttgcagaccggcactcctacccctgaacgttcattggccccatggcttcccctcactggggatgctgaagaccctgcagaagagccggcaccaccaggctggcaaattctcgctgtgcctggtgccctcccaaggacgccagagagctagttttcagaaattgtacactggctccgtggaggcagaactagacattgacgagtgtgagaatgactactacaatgggggctgtgtccacgagtgcatcaacatcccggggaactacaggtgtacctgctttgatggcttcatgctggcacacgatggacacaactgcctggagacagggtcttgctatattgcccaggcctctggaactcctgggctcaggtgatctgcccacctcgacctcccaaagtgctgggattacaggcttgacccgccaccttacctcaggcattacttcaggaatgcttcacaaaagtggaaccactggatcaaacgaccatttggttttttatggctttctaaaagggctcagcaaagcttctgttgtgccagctggtttgtgggtgtgtggtagaggatactgggtgtcctgagtgctctggaactttccctcttaatggggtgttagccttagacctgcctgcctgtttttgtccaacccatgttggatgtcagataagtttgttgtggaaaacatctgtgagcatgtaattacaccccgaataaatacccaagtagaggtccgagcatcaggttattgaagcccagagaggcctgtgaagagctacccatggatgcacccaccaagcttcagttcccctaactgtgaaatgggtcagtaatacttgtctcggaggtctccaccactccctattacttgcatccagctttggccatttaactacctgcttgaaattgtgctgcctggaaatgtttggaattctttgtgctgcctgacaaagcttcctgcacaaggttttgtccccagtgggcatttggtggctaatttgtcttgtttacctttctgtctttcttcttggaacctagtgcagtgtcagatatattgtaggcatttagtaaatatttgt

SEQ ID NO: 466678 - DNA, 1061 bp, Homo sapiens
tatctctcagttttttaaaatctatgccggacgagcatctctggcaggcatcagggcagtgcttacacctccagagtcagggagctcactacctcctgcaacagcttctaccttgcagaccggcactcctacccctgaacgttcattggccccatggcttcccctcactggggatgctgaagaccctgcagaagagccggcaccaccaggctggcaaattctcgctgtgcctggtgccctcccaaggacgccagagagctagttttcagaaattgtacactggctccgtggaggcagaactagacattgacgagtgtgagaatgactactacaatgggggctgtgtccacgagtgcatcaacatcccggggaactacaggtgtacctgctttgatggcttcatgctggcacacgatggacacaactgcctgggaatgcttcacaaaagtggaaccactggatcaaacgaccatttggttttttatggctttctaaaagggctcagcaaagcttctgttgtgccagctggtttgtgggtgtgtggtagaggatactgggtgtcctgagtgctctggaactttccctcttaatggggtgttagccttagacctgcctgcctgtttttgtccaacccatgttggatgtcagataagtttgttgtggaaaacatctgtgagcatgtaattacaccccgaataaatacccaagtagaggtccgagcatcaggttattgaagcccagagaggcctgtgaagagctacccatggatgcacccaccaagcttcagttcccctaactgtgaaatgggtcagtaatacttgtctcggaggtctccaccactccctattacttgcatccagctttggccatttaactacctgcttgaaattgtgctgcctggaaatgtttggaattctttgtgctgcctgacaaagcttcctgcacaaggttttgtccccagtgggcatttggtggctaatttgtcttgtttacctttctgtctttcttcttggaacctagtgcagtgtcagatatattgtaggcatttagtaaatatttgt

SEQ ID NO: 466679 - DNA, 3493 bp, Homo sapiens
actcagttgccttaggaagccatgctattcaaaccatggagaatatcctctgttttctaaacagctatactgagacagggcttagccctgactcaccttgtttggatggatattgaccacaactgcatctacttgagtgggttggggttgtttatgctgtactttttctatgtggtattgatgctgtgtttgtcaacccttgggaaaaataatgatatccaaaagcatcagggcagagccaggaggagaaagaaaggtgggacatataaagaccggaaaagtttccagagagaagccgaagaggaaaggaagttgctttctattctgaaaagctttggacctcctgcttcctgcagtcccctgggtcagcatcatgataccacccgctttcatcgactgttatgcccagaccccgtctgtcaggtgtgtaacagagcaactgctgatatccagcgactgctgtcttgggagtccctgaaagatgctgttccctttgtgtcccctttggcttcttcagcttctgcgactgagtcatcattcactctggcttccaccccctcagcaaccactccagaagacctaatattgtccccgcagcctaagccttctctactgccccacttaattctctcccctgacctgatcaccaccttagctgacttattttcaccctcaccactgagggaccctctgccaccacagcctgtttctcccttggattccaagttccccatagaccattccctaccccaacagcttccctctccccttttcccaccgcatcacattcagagagcggagcccagtctccaacctgaggccagtttgtctctgaacactgtctttttatttgactccaccctatcccaagatatgaaccccttatcaaatatttcccaggccatgaatgccactgattcatgtgcttggcatcacgaaccaccaaacccatctgctttaccactggaggactgccctgtaactcagtctaaagcaagtcccacagtattgaagccttttccggagatgttatctctaggtaccaatgctgtattggtcagaaagtctttcaaggtccatgttcccatctccatcattcctggagattttccactcagctctgaggtaaggaagaaactagagcaacacattcgaaagaggctcatccagcgcagatggggcctgccccgcagaatccatgagtctctgtcattgctacgtcctcagagcaaaatttcagagctatctgtgtcagacagcattcatggaccgttaaatatctctttggttgagggtcagaggtgcaatgttctaaagaagtccgcatcaagcttccctagaagcttccacgagaggagctcaaatatgctttccatggagaatgtggggaattatcagggatacagccaggagactgccccaaaagatcacctattgcatgatccagagacatcttcagacgaggatctgaggtctaactctgagagagacctagaaactcatatgatgcatctgtcagggaatgactcaggggtgagactaggtcagaaacaacttgaaaatgccctgacagtacgtttgagcaagaaatttgagaaaatcaatgagggtcgaatgcctgggactgtgcatagttcatggcactcagtcaagcagacaatgtctcttcctgagaaatcccaaagccaaattaaacatcaaaatctggtagcattggtgagtgaggaccactgcgttgatacttcccaggagatttccttccttagttccaacaaacaaaagatgttggaagcccatattaaaactttccgtatgaggatgctgtggggccttccctgcaaggtccttgaatccatagaaatcttcaaatcggaagaggatatttccaattccttttcccatttctaccttccctcctcagccagctttatttctcagggagattccaaagatggggtctctaagtcttgtagacgaagcacttttcaaggagaaaagttgggaacaacaagctcagtccctgtccttaatcatcctcagcctgtctcctcacctattggcaaagaagggcaggggaccctgagaagacaattttctgatattgaccatgaccttatagagacagatgccaaagatggtgcctccacgccccttagaagaggcactacatattttcaaggagaaaaattagaaacaacaagctcattctccatcttgggtcatcctcacctcgtcacctcacctgttgatcaagaaaagcaggggaccctcagaagagaattcgctgatactgacgaggatcttacagaaagtgtctggacaactgaggatggcagacagacttttctgccccccacatacagcatcatagacgaagtcagtcagaaacagactatacttgccagtagatgcagcgcagagctgcccatactgcaagctggagttggccgtgattcaagggataagagagagagtgccagtaataatgttaacaggcttcagggcagtggaaagacctttcctgtcaccaatgggtcgaaggagatgttcaaggaagaggagatctgtactcttcaatcacaaactaggaacaacttgacaaccagcaagtcaggaagctgcttagtgacaaacgtgaaaagaagcacttctcatgaaactgaaattttcccaccaagaatatcagttcctcaaactcctaaatcatcatatcttaaaaatcagatgttgagccagttaaagttggtccagaggaagcatagccaacctcagagccatttcactggcatgtctcttgccttagataacttgagttccaaggacttactgactcatgcccagggcatctcgaatcaggacttgggaacttcccaggtgctgcatgtccacttggaggtcagaggaatccgtgtggcacagcagcaggagcacagggtccctacgcatgtcttacagaaatgccaagttaagaatttttcaccagctgcaaagagagtgagccctttaagacccaatggaggagagcttggtggaggggatgcagggttggggacatcccaactcactagaaagagcctccctgttcataacaaggcatcaggagaggtgcctgggagcaaatcttccccaaccttgaaaacacagcctccttctgaaaaccttttcagaaaatggatgcagaccttattgcagtggtttaataaacctagcataatgtgtgaagaacaagaaagttcttgggaaaagggtagctccctgtcatcatctgtgcagaatagaagtcgagttacaagtagagctgcttttactggtgctactgaagctcagaaaattaggaaagacactggggagttcctagaagaaaagctggggcatagccatgggatagatatcacctgtccctaagaacccttttccttcccagtggagcttgggaaagctcagcacaacccagaagtgcaggtcagagcagagcccttccagggctatcccc

SEQ ID NO: 466680 - DNA, 1194 bp, Homo sapiens
tggggatgatgaaaacgttctggaatgagatcgtggtgatgctgccgctagggggcagagccgtctacaccaaaagccacaccgctccagcgtgcgcgtgcggggaggtgcgcgagcgcgtgtgcacgcacggcgggggctcgcttgacgctgagtccggcgaactaagctcgccacccccaccccatccccctgctgctgggagccccaggcagtccccggccaaggcgctccaaaaggtcccctctgttgaggactgggaagcagaccccgccccagtgccccccaaagcgcccgccctcccctggtgtggctggagagggccccgcaccctccacgccgtgtctccagcatcgaaattcacagcaaaatacacaactagtgaagaactgggctcggcctgttgcgcggcagccatttgccgcgacgggatgctgctgccgctggtgtgcagcaggccgccacgcgaggaaggggacagactgccctggagacccgcccaccacggagaaaaggccacggatctaaagacaccggagggcggctacgcgggccagatggacaaatgctagagtcagcacctgtctgtgggggcgcccttggcctgggcgctggacctaggccatcaggactggagagccttcttctcttctggccagagaaagagcaaagggtggcttcctgacaggtccggagctggcacagcacaacagagcctagaaaatcactagcagggctgagctcggggttccaccgctgcagccttcctgttggacccagtctgctcaaggactccctcacagcccagtgctttctgttcaccccggggcgctcccagcccagcctcctagcctcaagccgggcacgacagctgcgggcacagggagcaatcgcctggagccagagggggcaacgccagcccaagggcaaatgggcaaccctgtgcaaaaggctctggcaaccagatcatctactttagaagaaaggagaagaaaaagagcccccaggagaggaagtagcccctaacccgactgacaagcaatccgttcgcaaagacagaagggccttcagtgaattggtttcaaagtgcttgatttcttaaaaccagaacaattgatcattagagaactgattaagctacagccgctgttgaataaaaggtaaaaataaactccttcatttgaattccaaatt

SEQ ID NO: 466681 - DNA, 5640 bp, Homo sapiens
atatacactgggccacaggttaccctcggcaatgcccacagctgtcagcctgagcctccccaggagagcaaggctcacacgacaaaggctgcccgtggccagtgaggtggctgagcccagccaggacctttctcggactcccgggatgtggctctgctcgtgagctgcctggtcagctctctcggggtgagaggggcttgtcacacgggcgcctgcctgcagtgtgacccttctcagcttctctcagcagccctgcctgcggagtgtcaccgccaccatgatcatttccctgacactgcgagggtggggggacgtcctgggtagagacagggcccgtggcagcagcaggctcaggggagccctgcactggtggactggggacctggtggagaccacgccaagggctggacaaggggacgagcctccaccctggcctctccgcaggcctcagcagcccctcccacaggcagaagggttgacactgggttctgccctcactgcaagagctgcaagtgccacgtgctgttctgcccaatctggtgtctgcagcagccctggcctggacatgactgtgctcatgcagactgaggcctgccagtccatggacggctgcggcgtagggtggcaggcacaatctccaggggcagatgaaggtgcttcactgagctgcaccgaacagctcttggccccttgaaatctctgcagtctccttgtctccctctgctggaatattcttctctcacttcatctgatcattgccttcaaaactcagctcattttcttatttccttgccctttccatgtcccttgttttcctctgattaaattaatgttccaaactcaaaagaaaaacaactcagctcaggcatcacctttcctggaaggcttccctagtcctcctgcctcccgcagacttgtctggcaccctgtgcatttgggatttggcacactatgtctcgtctgcggcctccactggacgatgagacctgttcttggggaagatcccgactaagccattttccagtggcacctcttccaccatgagttcctgaggcagtccgatggggctactttattccagaacaatcacagtgagacctcttctcccgataaatgccccttttctctccttaatatattatcttgcttacaaaacactgcagacaaggggcctgacacatgaactctcatgagttactgaggagtttctcagtgctctgtctgcatcatctgctcgctctctccttcctaggtgctagcctgccaacctgctttgagaaattggaaatgaatcggggggtaatcagcctccccttgtacatgtagggaccgcatctccaatgccttgctttacacaataacgaatggtgttttgcttacctacttccacacaaactgctgatatggttaggatttgggaaaggggaagaagggaattttgggttttgaggagtagctggggcttgaacaaagaagaggcatgagccagtgtccagcccaaaatagtcttttgattttttttccccaaccatttaaaagttcaaaacattcttagtttttgggccgaaaaaaaacaagtgatgggtcagatttagccctggattgtggtttgttgacccctgtcatagaggaacaggaagcagagaggactggttatagggcctgggaaaccaagccagggagttagacttaaggtagtgtgaaagaggaaaccatttttgtaatgtaatgaaaaatttaaaggaaggatattttgtatttatatgtgttcctggaaaatctcagtttttattcaaacattttcactatggaaaatttcaaacatttacaaagtagagagaaaaatgtaatgaaataccaagtgatgtatttatcacctaccttcaacaattaccagtcctaggtcctttgcatttctgttttagaatcaacttgtcacattctacaaaaaagctggctggaatttctgtcgggattgttttgagtctgcagataatttcaggggaagaattgacttcttaataaaattgaattttccaaaccatgactatgttatatttctcaatttatttagtttttctttaatttttctcaacaatattttgtagttttgtgtacaaatctttccagttttttgaagggatgtggtcagatttactcctatttcatatattttgatactgtgaatttcagcttccagttattcattgctaatatataaaaatacacttggtttttgtatattaatcttgtatcctgagaccttaatgtaatttgttttcaaagcttttttgtggattccattggctattctgtcaatgttgtctgtgaataaagacagttgtacttttttcttcccactctgaatgccttttatttatttttgcttcctttactgcactggctagaacttctaagtacataatgaatagaagtgtaactgcccaatgagttcaccttgcccattgcctagacagagccgattcaccaagacgggaattgtaatagagaaagagtaattcaggcagagcctgctgggtgggagaccggagttttattattgctcaaatcagtctccctgagcatttgaggagcagagtttttaaggacagcttgtcataattttgcaaaggcagtttcagtcgtggtagaagtggatttccttgtctcatttttgatcctatggggaaaatgttcagtcttatgtcattaagtatgatattagctacagatatttcatatatgctgtttatcaagtttagtaggttctcctctatgtggagttttgtattttttaaataaggaatgaatgttgggttttgtttagtgtttttctgtgtgtattgagatgatcatatggcttttctgttttagtttacaatgttgaggacatgatctcattcctttttatggctgcatagtattccatggtgtatatgtaccacattttcttcatccagtctatcattgacaggcatttgggttggttccatgtctttgctattgtaaacagtgctgcaataaacatactgtgtgtgtatacatatgtaacaagcctgcatgttgtgcacgtgtaccctagaacttaaagtataataaaaatatatatgtatataaaataagcataccatatgcatgtgtctttacagtagaaggatttgtattcctttgagtatatacccactaatgggattgctgggttatttctggttctagatcgttgaggaatcaccatactgtcttccacaatggttgaagtaatctacatttccaccaacagtgtaaaaacattcctatttctccacagccttggcagcatctattgtttcttgactttttaatcatcgcaattgtgaatggcgtgagatggtatcatagtttcaggtttaaatctacatttaaatctttgagttgaattttgtatatgataacagtctagatttattcttctacatgtgggtgttgggcatttcctagcacagtttattgaagagattgttattccagagggtgtgttcttggtgcctaggttaaaaatgagttgactgtaaatgcgtgaatttatttctgagttctctattctgttttcatttgtttatgtctgcctgtcatttgtctgtctctctctcctgcccctttttttgacagtaccatgctgttttgatattatactatagatctgaagttactatggatttacagtatattttgtagaatattttgaaatcaggtagtgtgatgcctccagcttttctttttattcaagattcttttgtctctttgaggtgttttgcatttccatgtgaattttagaatctttttttctatttccatgaaaaatgtctttgtagtttaacatagattgcactgattctgtagatcacattgagtgatagagatattttaacaatattcttctagtgcatggacgtgggatatctttccatttacttgtgtctgctttaatatctttgatctatgttttatagttttcattgtaggatctttcttggttatgtttatccctaggtatcattattttggagggcgggagtgggtagctactgtaattaaacagctttcttgattttttttaatgtgtttcactgttggttcatgtgtgtgctactcatttttgtatattgatattgtatcttgcaactttactaaatttattatttctagtagttttttttgtagaatctttagggttctctctctaggtatatatgatcatgtcacttgcaaacagaagcaatttgactttttttcccccaaatttggatgggttttattgcattctgctgtctaattgctctagctaggacttccattaccacgatgaataaaagtggtaaaattagccacactttaacaagatcctagaggaagagcttttaatttttccccattgattacgatgttagctgtgggtttgtcatatatggcctttattgtgctatgtttcttttgtactcattttgaatttttatcatgaaagaatgttgaatttttttttcagcatctactgaaatgattaaatggtttttgttcttgattcgctgaatgtgatgtatgacatttatttgtgtttattgaatcattctcgtattcctccaatgaatctccaaatattttgttgaggatttttacatctatgttcatcagggatatttatttgcctgtggttttctttctgtgttgtgtcctgggaactttttttttctagcagggtaatgctgacctcatagaacaagtttggaagtactccttcctcttcatttttcggggaatattttgaataaaattggtattacctcttttaaaaatgtctggtagaattcagcagtaaaaccataattcttctgtttttctttgatgggagatttttattactgccttaattgcattactcattattagtctgttcaggtttttttattattctagcttgtgaaattgctatgcttccagacatttattcatttctcctggatttttcaatttgtttgtatataggtgtttttagtaatctcttacgatcctttgtgtttctgtgttatcaattgtaatgtctcctttttcatctatgattttactgcagttttctttctctttttcctagtctcattatagcttgtcaatttttttttcaaaaagcccccagctctttgttcctttgtctttttgtaattttttttttagtttctatttctaaaatttcttctctaatcttcatgacttatttctttctactaattttagcatgtgatttttcttgcttttctcattacttaaagtgtactgtcagattggctatttgagatctttctacttttctgattaggcatttatagctatgcacttcgcctcttaactgcttttgccgcatcccacaggttttgttatgttgtgtttctattcttatttctttcaattaatttttaatttcccttattcgtttcaatgaatttttaattttttcatttattggtggtttgtgggcatgttttaactttcatatatttgtacagtttttaaagttcctgctgttactgattgctagtagtattccactgtgctcagagaagatacttgatatgatttcagtttttaaaaatgtgccattacttgtttttc

SEQ ID NO: 466682 - DNA, 2093 bp, Homo sapiens
tgtcacctctggctccactcgaaaatggcgccgaaatcgaagaacttcttaaatttcattgcaagctttttgcaaaggtttctgggatttgcctgcgaagctgtttcgccgcgtccgagagcgagcgaacgtgcaagccagcgagggagacagggaggaaggaagggctggggaggcggagagacagaccgagcgagcgacacacggacagcgacggacagcgacagaagcggggcccgggacttgggagacggcgaggttgcggggcgcgaggtgctgggcacggagctacagggacggagagccgagagccggggtcgcagcgtggagggggcgctggctgctgccgaagctcggagagcggcgtggcggaggcggagcggagccgagcgaggggccagcacggaacgctcccttggaggcgagcggcgcagccggcggagaggctcccggagccgccctagaaaaagccggctcggggggcgtggccacgcgctgtggcgctccccgccccccggtggccccgctcggctccggggcccgggggcggaaggggggaggggaggagaggagctacgaatagcgagggctcggggagaaaaaacggaggatggcaaacggcaaagccaagggcacgaggtagcgcagcgcgcacccagaggctcctgggacggacaccaccccacgctcacgggtcctctggcggtgtcctttgagctgccgggacggcgcaaggtggctgagcgaagctttttgctcggtgcttacagggagtacctgagatggtttgggaaaggaaacagggggtctcagaccgcttgggtgcagcgctctccccatgcgtttgagtgcagatctgtcgagacgccccagccctcgccaccccaccaagctctcaggtagagaggccccgggacaggaaacctgtttatgcaccctcctgcaatcccaccacctgcccaggccaagtgagcccctctccgctactggtgtttcataatgctgggagctactttgatttcatgcattgcccttcagctgccatgttatgaggacacttggagaaagctacaggagaggaactgaggtctcctgccatcagccacttgagtgagcatgggagtggattctccaaactccagttaagacttgagatgtccacagtggcagccactagcttgactgcaacttacgagagaccctgagccagaggcactcagttaagtcatacacagtttcctgacccgtaaaacctgtgacacaatgaaggtttgttgttttgggggtaatccgttattcagcaatagataacgaatacagaaggcttgtaattgtataaccaacgtgagtttataagcggatatctgacctcatttgttttctcctgaaaaagttatagaaaaatcacaagactgcaagtcactctctctctttcttttgtggggaataaacaagtataattacaatttctaaacctattgttttattctcaaatataattacaatttaaacaggatattgtagagctccatcatagggattaacactaattagaattaaagaacgtttttgtgaaagtcagcttttttttttttaaataaacactcgtcccttgataatgtatttctttttcataaaattaaaaaaaaaatgtgggttgtagtaggtgtatatatttatgtggtacatgagatgttttgatacaggcatgacgtgtaataatcacatcatggaagatggcgtatccatcccctcaagcatttatcctttgtgttacaaacaatccagttacactctttttgttatttaaaaatgtacaattaaattattattggctatagtcaccctgttgtgctatcaaatattaggtcttattcattcatttaactatttttttgtacctatttatcatccccatccccggttccctcccaccacccaccccactacccttcccggcctctggtaaccatccttctactctctagctccatgagctccattgttttgatttttagctcccacaaataaatgagaacatgtaatgtttgcctttctgtgcctgacttatttcacttaacataatgacctct

SEQ ID NO: 466683 - DNA, 2776 bp, Homo sapiens
  misc_feature (2)..(3): n is a, c, g, or t
  misc_feature (5)..(6): n is a, c, g, or t
  misc_feature (8)..(8): n is a, c, g, or t
gnncnncncagcccgtgggccacctgctctcttccacgccttcctttctcctctgcttgtgcagcggaaggttctgccagcaggggagttagtgagcagccagtggagggtgtgcccagccttcctgctgcagacccgcccccaagtcaacacggacttccctccctgcgcgccagaactttgcgttgttcttagtggcatctggggtcgaggagggcgactgtcagccagttgggggatgttttcttcttggtctctcggcttctgcttccctgtgagctgggcagcctcagcccaggtcctatccggtactcagctggcctcggtgtgcacagcgcaggcttgagtgcagccgtgggggcgggcggggcagaagcagggcccctgggaacagctgagtctgaagggtcagaagccacggcccctgtggggggctctggggcagccaggggagctgctcgttagtcgtctctggggcagaaggaagggaccttcacctgggttgggactgggcctgggtccccagtctcacagggagctcgtcctgattgtacctgcccggctgtgacggctgagcccgggctcctggaggcaaggccacctcaggcctccagggccggagccgcaaggagctgctgggtttccacagggccacgggggctgcggccacacggagcgggagcacaggtggggacactgaagctgagctcacagccaggagagggacagcagagtgacggccgagaccatctgcactgcgagggaagcagcgcccaccttccttggtggtccgggaaggccggaccggccccttgggtccccactggcctcagccactgtgggctcgtccagcttcagctgccaggagaggccaggccgaggtcaggaggctcagcagctggttccatgacttcctcttcgctgaggaggtcaggacagaagcttctagatgacaggccgcccaacttggtataaaacagcaaatttctgtgcctgtgctgtcgggctgtgaatgacttctcgtctgtttcatgagatgcagcttcagcccagggagccatcagatgcagccgggcgagacgcggagccaagagctgtcctcgccccccatgtgagtgactggagagacgaaattctcaaagtcttgtcacttacggggatatttttaacccaggaccagggaagcacagctctcattggtggccgagtgctctggcgcttgggcagtgggcagcagccaggttatcgggacgtgctcaggcccaacaggacccccagagccgcacctgccccccacagagtagagccggcccgggagcggccttggtcacatctaatcccaccagccgccgacagtggagagctgtgcctggcccagagatgtgggcatcacatccaggctgcaaacacacggggaccacctggccccgccagggttcgctctatcctggcttggcctgcatggcctctcgccgtctgcatgtgaacagacccttcgcccccagatcccaggccctgtgcagcctgccttgcccctcccactgcaacccgaccccaagcagccactgatccttctgtgtttcctgtcaccacgggttcatccatgttttctagagtttctgtaagtggaatcacgcagtatctagcctttctcgtctggcttcttccactaagcgtagttagtttgagatttatccatgttgctgtggtatcaacagtttatccctttacagtcatacagatagaccacagtgtcttcatccatccagatgttgacgggcattccggtggcttccagcttggggctgttgcaaataaagtgtacagtgaacattcacatgcaagctttgcacggacatttatttcttttctcttggctaaatcggagtggaactgcttgattgtgtggtcggtgcatgcttaactttacaagaagttgccaagctgttttccaaagtgcctgcaccattttccattcctatcagcagtataggagacttgtagtttctccacacggtcaccagtacttgacatgatcagtctttttaatttcagtccttctaagaggtgactgatggcgtctcattgtggttttaatttgcattttcctcatgacgaatgacactgagcatctgtacctgtgccaacttgctggtcttcgctgaagtgcctgttcacatcttctgctaattatttatggggttctatgtttccttaatgagttttgagagttctttgtatactccagatgcaaatccttcatcaaatatgtacattgctggtgttctctccttatatatgacatgttttttcattctcttaacaatgtcttttgaagagcagacatttttaattttgattaagtctaacttacccgtcttttattttatagagtgtgcttttgctgtcgtatctaagaaatctttacctaacccaaggtcacaaagactgcctccattttttttcttctagaagttttatagttctaaattttacatttgtgttcatgatccattttgagtttttttttatatggtgcaaggtctggattgactctttttcattttttattgcatatgaacgtccagttactccagtatcaagatcattcttttttactgaatagccttttgcatctttgtcagcctgctaggattttaattggaattatgctgactctatagatcattttggggataattgacatcttaatgatatggaaacttctaatctatgaacagtttctctcagcaatgtgttctcattttcaatgtgc

SEQ ID NO: 466684 - DNA, 2317 bp, Homo sapiens
gagggtaagtggcgtccacaggaagatggcggccgagcgcggcgagcaggcagggtctggttgagggctggggtggtgacggcgtgattgtgcctggctaccgggttctcagccaggcagcacctgattcccaggagagatggaatcccagctcagaaaggggagactcatgcgagggcagaggcaaggcacccgcccagaaggattgggggtctccccatttcacaggtggggacactgaagctgagctcacagccaggagagggacagcagagtgacggccgagaccatctgcactgcgagggaagcagcgcccaccttccttggtggtccgggaaggccggaccggccccttgggtccccactggcctcagccactgtgggctcgtccagcttcagctgccaggagaggccaggccgaggtcaggaggctcagcagctggttccatgacttcctcttcgctgaggaggtcaggacagaagcttctagatgacaggccgcccaacttggtataaaacagcaaatttctgtgcctgtgctgtcgggctgtgaatgacttctcgtctgtttcatgagatgcagcttcagcccagggagccatcagatgcagccgggcgagacgcggagccaagagctgtcctcgccccccatgtgagtgactggagagacgaaattctcaaagtcttgtcacttacggggatatttttaacccaggaccagggaagcacagctctcattggtggccgagtgctctggcgcttgggcagtgggcagcagccaggttatcgggacgtgctcaggcccaacaggacccccagagccgcacctgccccccacagagtagagccggcccgggagcggccttggtcacatctaatcccaccagccgccgacagtggagagctgtgcctggcccagagatgtgggcatcacatccaggctgcaaacacacggggaccacctggccccgccagggttcgctctatcctggcttggcctgcatggcctctcgccgtctgcatgtgaacagacccttcgcccccagatcccaggccctgtgcagcctgccttgcccctcccactgcaacccgaccccaagcagccactgatccttctgtgtttcctgtcaccacgggttcatccatgttttctagagtttctgtaagtggaatcacgcagtatctagcctttctcgtctggcttcttccactaagcgtagttagtttgagatttatccatgttgctgtggtatcaacagtttatccctttacagtcatacagatagaccacagtgtcttcatccatccagatgttgacgggcattccggtggcttccagcttggggctgttgcaaataaagtgtacagtgaacattcacatgcaagctttgcacggacatttatttcttttctcttggctaaatcggagtggaactgcttgattgtgtggtcggtgcatgcttaactttacaagaagttgccaagctgttttccaaagtgcctgcaccattttccattcctatcagcagtataggagacttgtagtttctccacacggtcaccagtacttgacatgatcagtctttttaatttcagtccttctaagaggtgactgatggcgtctcattgtggttttaatttgcattttcctcatgacgaatgacactgagcatctgtacctgtgccaacttgctggtcttcgctgaagtgcctgttcacatcttctgctaattatttatggggttctatgtttccttaatgagttttgagagttctttgtatactccagatgcaaatccttcatcaaatatgtacattgctggtgttctctccttatatatgacatgttttttcattctcttaacaatgtcttttgaagagcagacatttttaattttgattaagtctaacttacccgtcttttattttatagagtgtgcttttgctgtcgtatctaagaaatctttacctaacccaaggtcacaaagactgcctccattttttttcttctagaagttttatagttctaaattttacatttgtgttcatgatccattttgagtttttttttatatggtgcaaggtctggattgactctttttcattttttattgcatatgaacgtccagttactccagtatcaagatcattcttttttactgaatagccttttgcatctttgtcagcctgctaggattttaattggaattatgctgactctatagatcattttggggataattgacatcttaatgatatggaaacttctaatctatgaacagtttctctcagcaatgtgttctcattttcaatgtgc

SEQ ID NO: 466685 - DNA, 923 bp, Homo sapiens
gctccctcacctcattgagcaggactgttgcggtaaactgaggaacggagagaccagtatgagaaacaggaggattgtttattttaggtagagagctttcctctgaaacaccttgagctgtttttgcttttagacatggcttacaacggtttccatcttcctgttttgttgtggttcccaggcggtgccttcgagactggctcagcctccatcttcgatgggtcctccctggctgcctatgaggacatgctggttgtgatcgtccagtaccggctgggaatatttggcttcttcaccacatgggatcagcacgctcccgggaactgggccttcaaggaccaggtggctgctctatcctgggtccagaagaacatcgagttcttcggtggggaccccagctctgtgaccatctttgatgctgtctcccatggccgaaggcttattccacaaagccgtcatggagagtggggtggccatcatcctttacctgaaggcccatgattatgagaagagtgaggacgtacgaatactgttaacaccttgccagcttcctctcctcagttaggggagaatgtgttcaggcaccttctcaccatgtgccatctatcccacgatatttgtcatctgtctcttaattatctactacagagtgaggccctagagaccaggatctctctgtccttcaggcccccagcataataagtggtatatatcaggcagctataaatgttctggatgaatgagctaatgaatgagctgtttcattcaatgcatattaattaagcactgggctgtggagccatctcttgagtattaatgattttagtggtaaattttcttaaacattttatagaaagtaacagtatataaccaagagcagaaacatagagttatgaaattgtaaaaaaaaataccctcaatac

SEQ ID NO: 466686 - DNA, 3819 bp, Homo sapiens
cctccaggagagtatgacaccaggacatcaaggcgtccacccttgtcaggcctgggatggtgccgcactgttggggatgggtttcattctctgcctccagcacaccagcctttctccgtttctgccatgctcagagttccttttgagcttgggccttggctcatgtcgttccccagcaaaggctgctcttccctgcccctgccacatcctaccttcaaatgtcgctgactctgggagtcttccctggtgacccacccaccccagcacacttatcctgtcagtccccttgaatgccccccaaggtgaggctgccgagccaatggctcagcgagggctggggagccctgacctgaccctctcctccctccacccagcctctgcgatctgtatgcaccactttgctaagacctcccaaacctctacaccctcgcaggctgacagggctgcaggtgccagcactgacctccctctgccctctgctcctgtccctccccttccgcaggcaccgcccccaccacaactccgccacctccagccgggctctggggtcctcctgggccacctgcttactgtgtgtccctggacacggcgtctcccctcgctgagttactttcctcatttgtaaaacggggatatgacccgtctcttagagtgactgggaagatcggtggtatcaacgcaaactacagcccggcagcttccaggcaaactcacttctcaggacgcctgtcctgctgtcttctcaaagaggtggatgaagccaccaccacccggtttacagatgaggaaactgaggctcagggagatctggaaaccattcccggcagctgggctccgaacccaggcctgcgagcacaaggctggctcccgcccccggctgtggtccctcctcctccggggcagggtccggtcgtgccagacgctcgatgacagcccccgcgggggaggccaggctgggagaggagagggcagggggcgggggcgcctgaccgcgtggggtcggccgcgggtcgatacgacggcgggatgaatgggagaggggagcgcgggcgagagggtgagggaggaggggaggaggggagaacgggagaacgggaggaggagggagaggcccgagcagggggcccgcccccgccgcccccctggtccccgccccgccgagcgtgcccggccgggtctgcagccgtcagcgccaagcgcggccccgcggctccgccgagagatcgataactaatttcaccgcggtagccgccccagtttttccccgataattgcgcgccggcagctgtgagcgaggcccccagcgcggcgcgaagcccctcccgcgccgatcaattgacaccgccaccgggcggcaggaaaactcatttttctttctctccccggctccgggtgggcgcgagctgagctctgccaagggccgggggctgcttggggccggggcggggagggagggcaggtcccggggagggggcgcggacgcgggtttgggaaagaggcttgcgaggaatccgaggaggcggggtgcctcagtttctccactctaccacaggggcgtggccgaaggcctcagggacctggggtgcgggtggggcagtcctgtcccctcttagctgttgggatggcggactggctggtgggaggaagggctaagtcaggcgccgcggcctggacgcgtgggttctactctggactcacaccagggaccactttgtgacgttgcatccgttccttcccttcgtctcttcctctccgagcctcagtttccccatcttccgaaaggggcctggcatatcctgggcaggcagatggtggatcagaggtagtgaggtgcctacaaggaaatgctcccaacagggtggcttggaggaatcctccttcctcagcactcatgggccgggcactgttctaggccgtgggggtggggatcgagcagtggccacactgacaaagcccctacccttgtggaagtgacattctactgaggccatggacacgtacagtacccaatctcccaccctccacctgccagaatgacagaggctcccccatggagattcctggcatgcccagccccacgtctgggttgagagtagtgactcagaagaaaatgaaggctactgctagcaaccaaatgaggtcaccgtcaagattcccggataaaagtcattcatgagacacaccagtgtagccttgttggcttggagctcctcagaggacggcgggaacagagtgaccgagggggtggccttgggctgacctgtgtggacagaggagggggtgagagatggcagagggagtgtggggtgttgtggagcgcctctctctgtctaaagtctctgggagggttcatggtgtggccgtctggtccacccagggcctctccttccctcctcattccctcctttccactggagccctctgcagagcagacagccctgtgccttcctaggagcccttcccaagtcacctttcccaggtgtcctggcccagccctttcctctgcagcctcggtttccccgtgtgcacccagggcaggctgtgctccctccttcctggtttctggagtctgagtttggaatctaggggtctccctcacagcacacaaaactgtactggcaggatgtggggagacccaagcctggcatggcctggagcttcccatcccctggggcaccaggctgtgccccagcctggcccactcagctctcctggtgaagcgtgggctccacccagacacaccctggggctctgccgtcgcccctgtccccaccagcccgaccacaggacccttcacagcagctgggttcttggggctgctcccccagactttggggcaccgcagcccccatgcccaccccagcagcctctgatgcccctggacttcacctggcagccatggagttctctgcactcccaggtgcacgtgtccgctcgatcagcttagaggatgggacaggggagagctagaggggatagcttgggccttagaatctgtgcccatgagctgagtgactcggacgggtcacctcacctctccgggctctatccccgtctgcacaaaggggatcacagcaggacctgcctatggggccaccgagagggaggttctgcccctgaaatgattatcgcctgtggacccccacatcccctggaatctctcaccccttacctgccccaccggctcctcaggctggaccggctgcttcctccaggggctccagggcccagggccctgctctgcgatgcagctgttgggcgcagcaggccatgggttaccacggccagacccagcagcagcaggggccagcgctgcctgagtgtgggctccctagagagtggtgccctggtccctctcgctggcagcagctgtcccattgcaccccagtccatgtggccccatcctcatcctctggtccctgcccccagccaggccccttccagagtccatgaccaggcggggctggaaatgctgctggctctgctcacactccagggctgggttgagttggctggatttactcatgggaagccttatcagaccaaaattcgaagggagagagaagccttctccatcatccaggcagagggacccatccctgaggaccaggaccagggacggggcctgactgccttccctggggcacagagaagggagggagtggtgaaggcctcaggcctaggacaggcagctgaccaccaccctcccctccccaccatccaggccagggacaatctgagaaccaactagcaatccagcaatgggacacattcagcagaaccctggaaggtgccccaggaaccaggcccaaggcctct

SEQ ID NO: 466687 - DNA, 723 bp, Homo sapiens
tggcgtccggatggcggggttgggtgcaggaaaaaggttaaaacatgcaagttctcccctcccgcccactttgccttcttccacctgggattctaccagaaagaattctggtattgaaaggaaactcctggggctggaagcctgagctctctgggcttggtctctgctctgctggggctctgggaaagaaagatggtgacctctctgagctccagcttctcagcaaggaggatcttgtttactggagaagtctggtgactgctaatctcatgatatatgagagtgaacggtgtcatgtcataagaatgtacagctcgaaagaaacaggctttactcaaagtcacagaacctcaaccgtctcctgccttcacagccctcctgcatatctggttagtgtcccatccagtaaccgtaacagcccacatctcatcataagcagcataggctgtggttgagagaggaagagataatctgaaacaacagtatatgactcaaactctcctcttctcctcctcccataagcacaattccctgaaaggcttcttctaagcctggtatcctgggagtggcagtgttttcagcgtggcagacagagcagtcaggaagctgggagcccaaacagcgtgagacaaagccacaaaacagaggccgcgcatcagtcggtaagtcatttctgtcttacatctcaccttgataatgaaaggaaataaatgtcttggtcac

SEQ ID NO: 466688 - DNA, 1355 bp, Homo sapiens
ctcctcctcctccttctccttctccttcttcctctgaataacgagaagtttaacttgatgaggttcatagaagaaagttacggttatcaggaaaggatctggacttactctggctctagaggtcaacattctgatggcagcatcctgaaccccaaacttcccttaaggagaatcgttcctggacccataagtttggcattgggccccagatgcctagattatggctcacatgatgagatcctggaagcagtacttagaacactggctttctgtctccctaacagccccactgttgcagagtttctcttggcgagtcagttctgggatgctcttctagagacattccaaatcatttcttacctagaacttatttcttcagccagacaaaagaatgaaccagatgctgcagagttcagccgggatgagagttgttggggtcacaggggagatcgagttgtggttatcttatttcttgtgggcttttccaatttccggttccagaccctcaggggactcttctgggctctgctcccttggcttctgcatacattctgggctgaagataaccagaaagccagcaacctgatgggaggaacattcattgcacaagctgagagtgaaatgagcttctacatcagtgccttcagagacacatggccctgccgacaccttgagtttggatttttggcctccagaactgggtacaagctggaaaaggggaaaatgaatcatgctacaggccaagtgtccatcactgattcccagagatgccctttgtgtggtaggcacttccatgtggactcgctacagaggtcataagaccctaattccagagggccctaccctataaccagaaggaagaactattgcacagagaatctaagaagaatctagacagacagccctcgctggatttctccactctgttagcattcgatcatttgccttttgtccagtcatatttctgcatggctgtccatactttgttgaacctaagcacaaaatggaaagttttccctgtatctttgggtcgtcattctgaaggctcccatgttatgtaaaactatgatcaaataaatatgcatgccttttctcctataagtctgccttttgtcagtgattttcagtgaaccttcagagagtgaaggggaagttttcccttggcccctatatcagtttcctcaatacctgccatgcagaaaatctaaactaagatgtgccaaacaacaaggtatccagttggtagaagagctcttactgagtgacactagggagttgttgggtaaagatctatttcagactttcaattaattatctgaaagcaggattcaggagtgtgaagggagacttgtggc

SEQ ID NO: 466689 - DNA, 1702 bp, Homo sapiens
gaccccgtgggtgctgactggcagctgcaggcagggtagcaggtgggcagtggtgagaatgccttctccctacaggttccaggccccgattcccttatcctgggggacgacagcatccatagcctggactttgcctcaagccggcagggcggggactacgtggccctgcagcccctgtgctccgagggtgggcctcccatgccccaccgtagcatctttgcccccccatgcactgcccaaccacaatcgcagcctgtcctacaataatgtgctcaaccctggctcgcctggtggccacgcctgcctcgcccatccagcagttggcgtggccggataccactcaccctacctgcaccctggggcaacgggcgacccaccatggcccctgccccacagcttcagtcccgtgctgggcccccggccccaggagccctcgcctgtgctctacgacatcctgtccaggaccatcatggcatccatccaggagcgcaaggacagggaggagcgtgagtgcctgctgcgctcccaggccgactcactcttcggcgactcaggcgtctatgatgctcccagctcctacagcctgcagcaggccagtgtgctgtctgagggcttccgaggtcctacgctgtgctacagctctacagatgaccttgtggccaggcccggcttcggcggcgcctgcaaccctgtcctgcagacatcattgtcctcgctttccagctccgtgagccgtgcactgcggacgtcgtcctcctccctgcaggctgatcagaaccccttccgagaccctgctcagctggcccagcccctgcccctgtgttacctgagaatctccagctggatgtcctccatctggtccagcacgccccagatgtccttcttgaggttctgggggccagaggagcccttcagggtttctcgctctctgctcctcgctggacagaaaagatcctggcagcctcgccctccaccctggatcccctccccactaccccctgcccctgggactgggagccgcctctttaagctcctcctggaggtgggctgccgtcctctgcccctcgtccccacggaagaggccacgctgttacccatgggaccggttttgggcggccgaagagcactcatggggccggattcacgccccgggcccgttccctcctgctctctggtgctcctcacgccattggccccactgcctctcactgcccgccgccggccttctccccggaagcctgcagggtcccctctgatccctgcacctctggggggtcacaccaactgcgggtgtttcctcaccacgctgggcgcttggtgagcacgttctgccttgagacctggcatttctttgataacatttcttctcgtttcctgctcattctggaactcctgtcagtcagatgttgggccttttggatagattctgtgagtccttctttctacctttgcttgtagataagattttccttgaatccaaacacacacactctctctgctttttaaaaaattagttttggggctggatgtagtggcttacacctgtagtcccaggcactttgggaggccgaggcaggcagatcacttgaggtcaggagttccagaccagcctggccaacatggtgaaaccccgtctctactaaaaatacaaaaagtagctgaatgtggtggtgtgcacctgtaatcccagctactcaggagg

SEQ ID NO: 466690 - DNA, 1113 bp, Homo sapiens
cgactactactactaaattcgcggccgcgtcgacgaggttttaaaacattcttttctagctatctattgaacatttactttatgccagatccagtacatgccattgttatcctctgtttacaggtggggaagctgaggcaggaagccctttagtcacttgccgaaggccacgctgttacccatgggaccggttttgggcggccgaagagcactcatggggccggattcacgccccgggcccgttccctcctgctctctggtgctcctcacgccattggccccactgcctctcactgcccgtgagtccctgtgcccgtgtcctccttcttgaacccctcagccctcagttaaccctcagaaagctggctcggagaagtccttgtgtggtatctgggaggcagagtttgccgtgagccgagattgtgccactgcacgcactccagcctgggcgacagagcgagaccccatctcaaaaaaaaaaaaaaaaaggcctcacgggactagaagcgtcttaccctgacctcacacctgctggacatcaggctggggagagaatcggggaagagggcattttccaacaggactggaaggccagtcgtggtccttggtggtgagagctagccaggccgccggccttctccccggaagcctgcagggtcccctctgatccctgcacctctggggggtcacaccaactgcgggtgtttcctcaccacgctgggcgcttggtgagcacgttctgccttgagacctggcatttctttgataacatttcttctcgtttcctgctcattctggaactcctgtcagtcagatgttgggccttttggatagattctgtgagtccttctttctacctttgcttgtagataagattttccttgaatccaaacacacacactctctctgctttttaaaaaattagttttggggctggatgtagtggcttacacctgtagtcccaggcactttgggaggccgaggcaggcagatcacttgaggtcaggagttccagaccagcctggccaacatggtgaaaccccgtctctactaaaaatacaaaaagtagctgaatgtggtggtgtgcacctgtaatcccagctactcaggagg

SEQ ID NO: 466691 - DNA, 1032 bp, Homo sapiens
cgactactactactaaattcgcggccgcgtcgacgagtacaggtggggaagctgaggcaggaagccctttagtcacttgccgaaggccacgctgttacccatgggaccggttttgggcggccgaagagcactcatggggccggattcacgccccgggcccgttccctcctgctctctggtgctcctcacgccattggccccactgcctctcactgcccgtgagtccctgtgcccgtgtcctccttcttgaacccctcagccctcagttaaccctcagaaagctggctcggagaagtccttgtgtggtatctgggaggcagagtttgccgtgagccgagattgtgccactgcacgcactccagcctgggcgacagagcgagaccccatctcaaaaaaaaaaaaaaaaaggcctcacgggactagaagcgtcttaccctgacctcacacctgctggacatcaggctggggagagaatcggggaagagggcattttccaacaggactggaaggccagtcgtggtccttggtggtgagagctagccaggccgccggccttctccccggaagcctgcagggtcccctctgatccctgcacctctggggggtcacaccaactgcgggtgtttcctcaccacgctgggcgcttggtgagcacgttctgccttgagacctggcatttctttgataacatttcttctcgtttcctgctcattctggaactcctgtcagtcagatgttgggccttttggatagattctgtgagtccttctttctacctttgcttgtagataagattttccttgaatccaaacacacacactctctctgctttttaaaaaattagttttggggctggatgtagtggcttacacctgtagtcccaggcactttgggaggccgaggcaggcagatcacttgaggtcaggagttccagaccagcctggccaacatggtgaaaccccgtctctactaaaaatacaaaaagtagctgaatgtggtggtgtgcacctgtaatcccagctactcaggagg

SEQ ID NO: 466692 - DNA, 355 bp, Homo sapiens
agcctttcccacttctatctcctgtccctgcagccaggagccgcctctttaagctcctcctggaggtgggctgccgtcctctgcccctcgtccccacggaagaggtcattctgtagcccagcttttattttcgcctaatgtatctctgaggttttaaaacattcttttctagctatctattgaacatttactttatgccagatccagtacatgccattgttatcctctgtttacaggtggggaagctgaggcaggaagccctttagtcacttgccgaaggccacgctgttacccatgggaccggttttgggcggccgaagagcactcatggggccggattcacgccccgggcccg

SEQ ID NO: 466693 - DNA, 1770 bp, Homo sapiens
gaccccgtgggtgctgactggcagctgcaggcagggtagcaggtgggcagtggtgagaatgccttctccctacaggttccaggccccgattcccttatcctgggggacgacagcatccatagcctggactttgcctcaagccggcagggcggggactacgtggccctgcagcccctgtgctccgagggtgggcctcccatgccccaccgtagcatctttgcccccccatgcactgcccaaccacaatcgcagcctgtcctacaataatgtgctcaaccctggctcgcctggtggccacgcctgcctcgcccatccagcagttggcgtggccggataccactcaccctacctgcaccctggggcaacgggcgacccaccatggcccctgccccacagcttcagtcccgtgctgggcccccggccccaggagccctcgcctgtgctctacgacatcctgtccaggaccatcatggcatccatccaggagcgcaaggacagggaggagcgtgagtgcctgctgcgctcccaggccgactcactcttcggcgactcaggcgtctatgatgctcccagctcctacagcctgcagcaggccagtgtgctgtctgagggcttccgaggtcctacgctgtgctacagctctacagatgaccttgtggccaggcccggcttcggcggcgcctgcaaccctgtcctgcagacatcattgtcctcgctttccagctccgtgagccgtgcactgcggacgtcgtcctcctccctgcaggctgatcagtacaggtggggaagctgaggcaggaagccctttagtcacttgccgaaggccacgctgttacccatgggaccggttttgggcggccgaagagcactcatggggccggattcacgccccgggcccgttccctcctgctctctggtgctcctcacgccattggccccactgcctctcactgcccgtgagtccctgtgcccgtgtcctccttcttgaacccctcagccctcagttaaccctcagaaagctggctcggagaagtccttgtgtggtatctgggaggcagagtttgccgtgagccgagattgtgccactgcacgcactccagcctgggcgacagagcgagaccccatctcaaaaaaaaaaaaaaaaaggcctcacgggactagaagcgtcttaccctgacctcacacctgctggacatcaggctggggagagaatcggggaagagggcattttccaacaggactggaaggccagtcgtggtccttggtggtgagagctagccaggccgccggccttctccccggaagcctgcagggtcccctctgatccctgcacctctggggggtcacaccaactgcgggtgtttcctcaccacgctgggcgcttggtgagcacgttctgccttgagacctggcatttctttgataacatttcttctcgtttcctgctcattctggaactcctgtcagtcagatgttgggccttttggatagattctgtgagtccttctttctacctttgcttgtagataagattttccttgaatccaaacacacacactctctctgctttttaaaaaattagttttggggctggatgtagtggcttacacctgtagtcccaggcactttgggaggccgaggcaggcagatcacttgaggtcaggagttccagaccagcctggccaacatggtgaaaccccgtctctactaaaaatacaaaaagtagctgaatgtggtggtgtgcacctgtaatcccagctactcaggagg

SEQ ID NO: 466694 - DNA, 1809 bp, Homo sapiens
aggcgcaggcgcaggcgcagaggccgacaccaccgggcggctggtatgtgtccaccggcccctaggcgcctcgagccccgcccctgggagacgcaggctcctccccgcggagcgagagcccgcggagctgctccgaaacccgcgggagggcacctccggtcacccgagccgcaaatccccgccgtccgaagaaggtgtcgccccgggctggcggcccagcgtggcttaggccaggtacaaccggcagcgcccgccaagccctgggctagggacgcctgcgggagttcacggggaggcgccggtgtctgaggtctgagaagacagcggccaccggaaaaggtgctaatgtttgcagaccccgatccatcgacaccccaaggaaatgctgtgcacaaaattccaagagggccttttcgaatagacgcatgaacggtgtttgtgtctggatcgtccagcctcccgggatcgattgggaatctagcttctgcttgcctttccagcgcgacgcacagtaggagcctaataaatgtttgttgaatgaatgctgaatatcgaactcagctctggaggccagaagcctaagatccaggtgtctgcaggaccctgttccctcctctgcaggctctgggggaggctccttcttgcctcttccagttcccgggggatctgggtgtcccctggcttgtggcggcaccactgtattctctgtgaatccacgtggccttctcctctgtgtttgtgacttctttccttcttataaggacacctgtcattggatttagggccctaatccaagaggatctcatctcgagatccttaacttaattacatctgcacagatgctttttccaaataaggccttttacttcctcttcgtggttcttcttcatgaagagcagctcctccttgagggcctcgatctctgtctccagctgcagccgagtgacattggtgtcatcaatgaccttgcaaagcccatggatgttgttctccacagactggcacatggccagctctgtctcatacttgactctaaagtcatcagcagcaagacaggcactgtcgatctgcagaacggtgcgggcattgtccacagtatttgcagagatctgagccctcaggtcctcgatggtcttgaagtaatggctccagtctctgacctgggatcccttcttctccagatgctcccggattttgctctccagcttctggttctcagtctccaggctcctcactctgcccaggaagagatgcggcccctggatgtcgccgagctgtcagaaccggaggaagtggaggtgctggagctggaggggggttttgagcagtttctgctcccggtcatccatgagatgccagaggacatcgcgtcgctgacaagcactggcgggcgtacctgtggaagcggagcacgctgtgggagatggacaatatgctcttccagatcaaaacccaggtggaggcttcggaggagcatcctcaaccgcctccacaacccgggcgacgcagtggagggcagggtgaccaagaggtgccagaaggccgaggagaaggccaaggaaatggtgaagatggcagagatgctggtggagctggcccagaggatagagacgaacgagtcgagagcacggtcggtggtttacagccaatggattctgaagatgactccatacagcaactactgaagaaaggaccagacttcagctgggaatgtggatgggccgacctggctgggacccatgaatctggagaagagctggagaatggagagtattatctgtatttgaggactttaatttctgtgtaaga

SEQ ID NO: 466695 - DNA, 967 bp, Homo sapiens
aaaatactaatggattttaaatggagctgcttcttcagctggcaaaagccaagttgccttcaggttgtaacagaagatagagaggaaggccttacagttatggacttacttctgacagcaacttattccatcattcccaatttacagatgagtaaactgaagcacaggaaatttaaatcactttctagaagatttggctgccatcatctctgtaataccttgtcgctcccgctgaactgtgagttccttgaggacagagaagggactctgtatctctttcccatctctacatcctcaggtcacagagcctggcacaacgtggaatttcttctcaccaggacagtgcatgctgcggcactccatgatggtacctcatccctgcctctgatgcccagtgccaatcacccttctgccggcacagttacaacctcgactgcgtagttgacacaatgcaaccctccaagttccagaatgatgcttcttttctaggagctcccagagagccaaagccttgagtgtcccacacagaacagattccctctccccagcctggcatccctcttggtcatcccagcaccaagaggactgtctgagcaccaatgtctcaagaagacttttgatgacaacagtggaaaccatttcttcagcttctctttacattgtttctttctctagaatctgcatgcaggattttccctctggattaaatgaccaatctctgagacagacacccattttcttctcccaaccttcctccccatcattcatgcactgattgtgtttcttccaccaaaggctttaagtaagttgacttgtgaaaacttcatcccagagtgtctaccttactagtcctttataactgcctattgcaggcatttttttcaggtcaaatgtgggatgtctgctacataccaaaaaggaaactgggactcagaaaggttaggaaatgtgcctgaaaacatataat

SEQ ID NO: 466696 - DNA, 1102 bp, Homo sapiens
  misc_feature (1)..(1): n is a, c, g, or t
  misc_feature (6)..(8): n is a, c, g, or t
  misc_feature (10)..(10): n is a, c, g, or t
  misc_feature (12)..(15): n is a, c, g, or t
  misc_feature (17)..(17): n is a, c, g, or t
naattnnncncnnnncnttccattggctgtcgggctcaggggctctcttttcagcctggggcgcgcagcgcctcggatgcggattggccgaaggcggggctgggaggcgggttaaagagcgcgttgctggctgggccacgcgtgcttgagaaggttcaatggcgtggcagggactagcggccgagttcctgcaggtgccggcggtgacgcgggcttacaccgcagcctgtgtcctcaccaccgccgcggtgcagctggagctcctcagcccctttcaactctacttcaacccgcaccttgtgttccggaagttccaggtctggaggctcgtcaccaacttcctcttcttcgggcccctgggattcagcttcttcttcaacatgctcttcgtgttccgctactgccgcatgctggaagagggctccttccgcggccgcacggccgacttcgtcttcatgtttctcttcgggggcgtccttatgaccctgctgggactcctgggcagcctgttcttcctgggccaggccctcatggccatgctggtgtacgtgtggagccgccgcagccctcgggtgagggtcaacttcttcggcctgctcactttccaggcaccgttcctgccttgggcgctcatgggcttctcgctgctgctgggcaactccatcctcgtggacctgctggggattgcggtgggccatatctactacttcctggaggacgtcttccccaaccagcctggaggcaagaggctcctgcagacccctggcttcctgtgagtgttgagagccctccctccctctccccaccctcagaaggatccccaccgatggggacctgtgctggcctgtgctcaacacgggcccctccccacagaaagctgctcctggatgcccctgcagaagaccccaattacctgcccctccctgaggaacagccaggaccccatctgccacccccgcagcagtgacccccacccagggccaggcctaagaggcttctggcagcttccatcctacccatgacccctacttggggcagaaaaaacccatcctaaaggctgggcccatgcaagggcccacctgaataaacagaatgagctgca

SEQ ID NO: 466697 - DNA, 1250 bp, Homo sapiens
  misc_feature (1)..(1): n is a, c, g, or t
  misc_feature (6)..(8): n is a, c, g, or t
  misc_feature (10)..(10): n is a, c, g, or t
  misc_feature (12)..(15): n is a, c, g, or t
  misc_feature (17)..(17): n is a, c, g, or t
naattnnncncnnnncnttccattggctgtcgggctcaggggctctcttttcagcctggggcgcgcagcgcctcggatgcggattggccgaaggcggggctgggaggcgggttaaagagcgcgttgctggctgggccacgcgtgcttgagaaggttcaatggcgtggcagggactagcggccgagttcctgcaggtgccggcggtgacgcgggcttacaccgcagcctgtgtcctcaccaccgccgcggtggtaagcggccgggcggaccggacgtcgccttggttacagcctctggcgggaggggtgagggtcgccatggttacggcgtggctcccgggcagcaaaaaacccatcctaaacggctgggcccatgcaagcgcgcccaccctgacataacccagactgagcctgcaaacacaaaacaacaaaccacaccaacacacccacacaaagagagaggcacaaacacccaagacacccaccccacaagagccacaagaaaagaggagcaggggcgcgcgcggcgcccgcccccccggcgcaggacacggcgccgcccgcgcgtgcggacactaccgccgcgcgaagcggcgagcgcgaccgcccgcacctaatctcgcgcgcctaccgcgcagcagcagcgcggcgcgggacgggcaggcgcgcgccctcgccccccaccgcacccccaccccgccccggcgccgcaccctcccacacggcgcgagagccgcgcgatcgtcgcgagagcgagcagtgcggcacggcaggcgcaggggggcgagagggagagcgcgcgccggacgagcgcgggcgggcgcgcactacggggccaccacgcctcacccacccagcatacggcccgcgaccctcccactcggcgaacaccacccacacaacaaaacaatattcacaccagcccccaacacccccccacacgacacacccaccaaatacccacacactactcacacccatacatcaccacactacaaaccatcacacgcatctcaaccatcgacaatcattaccccactcacacctccacacccaaacacacagcccgagcaacctaacgacaacacccaccaacccaaaactaataatcttacaacgtaacccacaaccaccacaccctccctacacaatcttaacaccgctactggtcctttgtattaccatatcttcaccacctcaacatcttccactatacgcaccaccacacccatcccctcacactccaccact

SEQ ID NO: 466698 - DNA, 416 bp, Homo sapiens
tgtggagcacctacccttaataatgagaaaaaaaagagcaaatgacggtacaactatatataagaaagactgggaagataaaaaataaaaagagggaaaatagaatggacctctccccaccctcagaaggatccccaccgatggggacctgtgctggcctgtgctcaacacgggcccctccccacagaaagctgctcctggatgcccctgcagaagaccccaattacctgcccctccctgaggaacagccaggaccccatctgccacccccgcagcagtgacccccacccagggccaggcctaagaggcttctggcagcttccatcctacccatgacccctacttggggcagaaaaaacccatcctaaaggctgggcccatgcaagggcccacctgaataaacagaatgagctgca

SEQ ID NO: 466699 - DNA, 110 bp, Homo sapiens
tcaagcttctaacgatgtacggggccatgacccctacttggggcagaaaaaacccatcctaaaggctgggcccatgcaagggcccacctgaataaacagaatgagctgca

SEQ ID NO: 466700 - DNA, 1119 bp, Homo sapiens
  misc_feature (1)..(1): n is a, c, g, or t
  misc_feature (6)..(8): n is a, c, g, or t
  misc_feature (10)..(10): n is a, c, g, or t
  misc_feature (12)..(15): n is a, c, g, or t
  misc_feature (17)..(17): n is a, c, g, or t
naattnnncncnnnncnttccattggctgtcgggctcaggggctctcttttcagcctggggcgcgcagcgcctcggatgcggattggccgaaggcggggctgggaggcgggttaaagagcgcgttgctggctgggccacgcgtgcttgagaaggttcaatggcgtggcagggactagcggccgagttcctgcaggtgccggcggtgacgcgggcttacaccgcagcctgtgtcctcaccaccgccgcggtggtaagcggccgggcggaccggacgtcgccttggttacagcctctggcgggaggggtgagggtcgccatggttacggcgtggctcccgggcagctcttgactggcccctggttccacagcagctggagctcctcagcccctttcaactctacttcaacccgcaccttgtgttccggaagttccaggtctggaggctcgtcaccaacttcctcttcttcgggcccctgggattcagcttcttcttcaacatgctcttcgtgttccgctactgccgcatgctggaagagggctccttccgcggccgcacggccgacttcgtcttcatgtttctcttcgggggcgtccttatgaccctgctgggactcctgggcagcctgttcttcctgggccaggccctcatggccatgctggtgtacgtgtggagccgccgcagccctcgggtgagggtcaacttcttcggcctgctcactttccaggcaccgttcctgccttgggcgctcatgggcttctcgctgctgctgggcaactccatcctcgtggacctgctggggattgcggtgggccatatctactacttcctggaggacgtcttccccaaccagcctggaggcaagaggctcctgcagacccctggcttcctaaagctgctcctggatgcccctgcagaagaccccaattacctgcccctccctgaggaacagccaggaccccatctgccacccccgcagcagtgacccccacccagggccaggcctaagaggcttctggcagcttccatcctacccatgacccctacttggggcagaaaaaacccatcctaaaggctgggcccatgcaagggcccacctgaataaacagaatgagctgca

SEQ ID NO: 466701 - DNA, 1321 bp, Homo sapiens
  misc_feature (1)..(1): n is a, c, g, or t
  misc_feature (6)..(8): n is a, c, g, or t
  misc_feature (10)..(10): n is a, c, g, or t
  misc_feature (12)..(15): n is a, c, g, or t
  misc_feature (17)..(17): n is a, c, g, or t
naattnnncncnnnncnttccattggctgtcgggctcaggggctctcttttcagcctggggcgcgcagcgcctcggatgcggattggccgaaggcggggctgggaggcgggttaaagagcgcgttgctggctgggccacgcgtgcttgagaaggttcaatggcgtggcagggactagcggccgagttcctgcaggtgccggcggtgacgcgggcttacaccgcagcctgtgtcctcaccaccgccgcggtggtaagcggccgggcggaccggacgtcgccttggttacagcctctggcgggaggggtgagggtcgccatggttacggcgtggctcccgggcagctcttgactggcccctggttccacagcagctggagctcctcagcccctttcaactctacttcaacccgcaccttgtgttccggaagttccaggtctggaggctcgtcaccaacttcctcttcttcgggcccctgggattcagcttcttcttcaacatgctcttcgtgttccgctactgccgcatgctggaagagggctccttccgcggccgcacggccgacttcgtcttcatgtttctcttcgggggcgtccttatgaccctgctgggactcctgggcagcctgttcttcctgggccaggccctcatggccatgctggtgtacgtgtggagccgccgcagccctcgggtgagggtcaacttcttcggcctgctcactttccaggcaccgttcctgccttgggcgctcatgggcttctcgctgctgctgggcaactccatcctcgtggacctgctggggattgcggtgggccatatctactacttcctggaggacgtcttccccaaccagcctggaggcaagaggctcctgcagacccctggcttcctgggacttcagagcagcaaggccccagctggcagtagcctgaccatctggacacagcagagccagggcggcccagggacggcaggagagctcgcggcaccttcctgaggccaagcaaggggagcagggttagggctgttcctgaaaggcagagagcctctgccctgagcctcacagctactcttctcagctctctgggtctggaaggagaacaggctgaggggagctgagaggagctgaggtgctacccggagccccattcacccccacctgcccacttgggaatctgaggcagaggagggtgaggcctgtgtgccaaccttgttcacataccaccttcgtccccccaggccccggccccactcctggctctcattatttttatgttaaaactttgaagaaattgaacatgacctgttgaagaaattgaaca

SEQ ID NO: 466702 - DNA, 1210 bp, Homo sapiens
  misc_feature (1)..(1): n is a, c, g, or t
  misc_feature (6)..(8): n is a, c, g, or t
  misc_feature (10)..(10): n is a, c, g, or t
  misc_feature (12)..(15): n is a, c, g, or t
  misc_feature (17)..(17): n is a, c, g, or t
naattnnncncnnnncnttccattggctgtcgggctcaggggctctcttttcagcctggggcgcgcagcgcctcggatgcggattggccgaaggcggggctgggaggcgggttaaagagcgcgttgctggctgggccacgcgtgcttgagaaggttcaatggcgtggcagggactagcggccgagttcctgcaggtgccggcggtgacgcgggcttacaccgcagcctgtgtcctcaccaccgccgcggtggtaagcggccgggcggaccggacgtcgccttggttacagcctctggcgggaggggtgagggtcgccatggttacggcgtggctcccgggcagctcttgactggcccctggttccacagcagctggagctcctcagcccctttcaactctacttcaacccgcaccttgtgttccggaagttccaggtctggaggctcgtcaccaacttcctcttcttcgggcccctgggattcagcttcttcttcaacatgctcttcgtgttccgctactgccgcatgctggaagagggctccttccgcggccgcacggccgacttcgtcttcatgtttctcttcgggggcgtccttatgaccgtatccttcccgcaggctctggaacctcgggctagggcgcctcggcgtccagcctgtgttggtcctggggccaacacagccatgccagagagggacacagtcgctgtctccagcttagtatgtgttgagggcccactctgtgctcagctgcaggggtcagggctagatcttcagtgctgtatgcaaaatacaaagccatgcacaaaagagccaggcaccgttcctgccttgggcgctcatgggcttctcgctgctgctgggcaactccatcctcgtggacctgctggggattgcggtgggccatatctactacttcctggaggacgtcttccccaaccagcctggaggcaagaggctcctgcagacccctggcttcctaaagctgctcctggatgcccctgcagaagaccccaattacctgcccctccctgaggaacagccaggaccccatctgccacccccgcagcagtgacccccacccagggccaggcctaagaggcttctggcagcttccatcctacccatgacccctacttggggcagaaaaaacccatcctaaaggctgggcccatgcaagggcccacctgaataaacagaatgagctgca

SEQ ID NO: 466703 - DNA, 1765 bp, Homo sapiens
  misc_feature (1)..(1): n is a, c, g, or t
  misc_feature (6)..(8): n is a, c, g, or t
  misc_feature (10)..(10): n is a, c, g, or t
  misc_feature (12)..(15): n is a, c, g, or t
  misc_feature (17)..(17): n is a, c, g, or t
naattnnncncnnnncnttccattggctgtcgggctcaggggctctcttttcagcctggggcgcgcagcgcctcggatgcggattggccgaaggcggggctgggaggcgggttaaagagcgcgttgctggctgggccacgcgtgcttgagaaggttcaatggcgtggcagggactagcggccgagttcctgcaggtgccggcggtgacgcgggcttacaccgcagcctgtgtcctcaccaccgccgcggtggtaagcggccgggcggaccggacgtcgccttggttacagcctctggcgggaggggtgagggtcgccatggttacggcgtggctcccgggcagctcttgactggcccctggttccacagcagctggagctcctcagcccctttcaactctacttcaacccgcaccttgtgttccggaagttccaggtctggaggctcgtcaccaacttcctcttcttcgggcccctgggattcagcttcttcttcaacatgctcttcgtgttccgctactgccgcatgctggaagagggctccttccgcggccgcacggccgacttcgtcttcatgtttctcttcgggggcgtccttatgaccgtatccttcccgcaggctctggaacctcgggctagggcgcctcggcgtccagcctgtgttggtcctggggccaacacagccatgccagagagggacacagtcgctgtctccagcttagtatgtgttgagggcccactctgtgctcagctgcaggggtcagggctagatcttcagtgctgtatgcaaaatacaaagccatgcacaaaagagccaggtgggttgtcagggccactagctgagccctgaatgcgagtagccgggagaaactggggcagggacaggcagtggttgggccctgggatgaggctgtaggtgtgcagggcagatttcgtgggacctgaagcccgtggagtgtgtcgcctttattggactggctcatcttgatgagggaatagcacataggggagatgaggggaagaattccagggtcttgggaagtcagaggggccctgggcttgggctgaggcctgcaccggagcaccttgactctggcccagctgctgggactcctgggcagcctgttcttcctgggccaggccctcatggccatgctggtgtacgtgtggagccgccgcagccctcgggtgagggtcaacttcttcggcctgctcactttccaggcaccgttcctgccttgggcgctcatgggcttctcgctgctgctgggcaactccatcctcgtggacctgctgggactctgggctgtggagggtgaccccacagtccgtggctgtctcacagggattgcggtgggccatatctactacttcctggaggacgtcttccccaaccagcctggaggcaagaggctcctgcagacccctggcttcctgtgagtgttgagagccctccctccctctccccaccctcagaaggatccccaccgatggggacctgtgctggcctgtgctcaacacgggcccctccccacagaaagctgctcctggatgcccctgcagaagaccccaattacctgcccctccctgaggaacagccaggaccccatctgccacccccgcagcagtgacccccacccagggccaggcctaagaggcttctggcagcttccatcctacccatgacccctacttggggcagaaaaaacccatcctaaaggctgggcccatgcaagggcccacctgaataaacagaatgagctgca

SEQ ID NO: 466704 - DNA, 888 bp, Homo sapiens
ccgacgccgtaggttccgctactgccgcatgctggaagagggctccttccgcggccgcacggccgacttcgtcttcatgtttctcttcgggggcgtccttatgaccgtatccttcccgcaggctctggaacctcgggctagggcgcctcggcgtccagcctgtgttggtcctggggccaacacagccatgccagagagggacacagtcgctgtctccagcttactgctgggactcctgggcagcctgttcttcctgggccaggccctcatggccatgctggtgtacgtgtggagccgccgcagccctcgggtgagggtcaacttcttcggcctgctcactttccaggcaccgttcctgccttgggcgctcatgggcttctcgctgctgctgggcaactccatcctcgtggacctgctgggactctgggctgtggagggtgaccccacagtccgtggctgtctcacagggattgcggtgggccatatctactacttcctggaggacgtcttccccaaccagcctggaggcaagaggctcctgcagacccctggcttcctgtgagtgttgagagccctccctccctctccccaccctcagaaggatccccaccgatggggacctgtgctggcctgtgctcaacacgggcccctccccacagaaagctgctcctggatgcccctgcagaagaccccaattacctgcccctccctgaggaacagccaggaccccatctgccacccccgcagcagtgacccccacccagggccaggcctaagaggcttctggcagcttccatcctacccatgacccctacttggggcagaaaaaacccatcctaaaggctgggcccatgcaagggcccacctgaataaacagaatgagctgca

SEQ ID NO: 466705 - DNA, 467 bp, Homo sapiens
cttggttacagcctctggcgggaggggtgagggtcgccatggttacggcgtggctcccgggcagctcttgactggcccctggttccacagcagctggagctcctcagcccctttcaactctacttcaacccgcaccttgtgttccggaagttccaggtgaggccgccccgcgccgcgcacctgtgggcccgacccacccaccccgcacctgaccgcccgtcccccgtaggtctggaggctcgtcaccaacttcctcttcttcgggcccctgggattcagcttcttcttcaacatgctcttcgtgtatcctgcgccctgcggacacgggctgggtggagggcaggccggccgggctgggagagaggccgggacggggaaactgaggccccgcctggtggcacttcctataccgacgccgtaggttccgctactgccgcatgctggaagagggctccttccgcggccgc

SEQ ID NO: 466706 - DNA, 1229 bp, Homo sapiens
cctcatggacagaacaaacacctcagcaatgaaacctgttcatgtctaagagcagctgggctgggaatcttcccctttgttcaaggccttccagtaaggcccagctgtccccttgctgtgcatggggctctggggagttccactctttgatggagggcagaggccctgagtgcaaactccctgggaagagtcccatgctaacatgtgctcaaaggagccctcctctcacatctcagcgaccaagaaccccaatccctaatcagagctctgcctctgccccacatggggccctaccccacttccagggagcacagcagcctctgaccctagccctgccctggcagcatgggacctgccaacagctgagggtggcagcagtctgtgctgggatctgtgcccggatctgtgcccattctcttcagtaaggctggagctgcgagccagtttgctgccctcccagatcctgtgtccattctgaagaatggggacacctccctattacagatgagaacagaggggacatgaactccttggaggcagggctgggaagggaccctgggctgtgtctcctccctgtaccgtgtcaactccaagagctggcaccaggccgggagggctattcccatattcctcacagctggcttgtaaggcaggagctggcccaggccacagcacctgctggggtgggaaagggccccagctgacctggctatgggtgccactggagctagaacagccctcctgcacccaggctggcgacagcccagcagtgcccacacaggactgggccctccgcaggggacttcagagcagcaaggccccagctggcagtagcctgaccatctggacacagcagagccagggcggcccagggacggcaggagagctcgcggcaccttcctgaggccaagcaaggggagcagggttagggctgttcctgaaaggcagagagcctctgccctgagcctcacagctactcttctcagctctctgggtctggaaggagaacaggctgaggggagctgagaggagctgaggtgctacccggagccccattcacccccacctgcccacttgggaatctgaggcagaggagggtgaggcctgtgtgccaaccttgttcacataccaccttcgtccccccaggccccggccccactcctggctctcattatttttatgttaaaactttgaagaaattgaacatgacctgttgaagaaattgaaca

SEQ ID NO: 466707 - DNA, 1001 bp, Homo sapiens
  misc_feature (1)..(1): n is a, c, g, or t
  misc_feature (6)..(8): n is a, c, g, or t
  misc_feature (10)..(10): n is a, c, g, or t
  misc_feature (12)..(15): n is a, c, g, or t
  misc_feature (17)..(17): n is a, c, g, or t
naattnnncncnnnncnttccattggctgtcgggctcaggggctctcttttcagcctggggcgcgcagcgcctcggatgcggattggccgaaggcggggctgggaggcgggttaaagagcgcgttgctggctgggccacgcgtgcttgagaaggttcaatggcgtggcagggactagcggccgagttcctgcaggtgccggcggtgacgcgggcttacaccgcagcctgtgtcctcaccaccgccgcggtgcagctggagctcctcagcccctttcaactctacttcaacccgcaccttgtgttccggaagttccaggtctggaggctcgtcaccaacttcctcttcttcgggcccctgggattcagcttcttcttcaacatgctcttcgtgttccgctactgccgcatgctggaagagggctccttccgcggccgcacggccgacttcgtcttcatgtttctcttcgggggcgtccttatgaccctgctgggactcctgggcagcctgttcttcctgggccaggccctcatggccatgctggtgtacgtgtggagccgccgcagccctcgggtgagggtcaacttcttcggcctgctcactttccaggcaccgttcctgccttgggcgctcatgggcttctcgctgctgctgggcaactccatcctcgtggacctgctggggattgcggtgggccatatctactacttcctggaggacgtcttccccaaccagcctggaggcaagaggctcctgcagacccctggcttcctaaagctgctcctggatgcccctgcagaagaccccaattacctgcccctccctgaggaacagccaggaccccatctgccacccccgcagcagtgacccccacccagggccaggcctaagaggcttctggcagcttccatcctacccatgacccctacttggggcagaaaaaacccatcctaaaggctgggcccatgcaagggcccacctgaataaacagaatgagctgca

SEQ ID NO: 466708 - DNA, 1616 bp, Homo sapiens
  misc_feature (1)..(1): n is a, c, g, or t
  misc_feature (6)..(8): n is a, c, g, or t
  misc_feature (10)..(10): n is a, c, g, or t
  misc_feature (12)..(15): n is a, c, g, or t
  misc_feature (17)..(17): n is a, c, g, or t
naattnnncncnnnncnttccattggctgtcgggctcaggggctctcttttcagcctggggcgcgcagcgcctcggatgcggattggccgaaggcggggctgggaggcgggttaaagagcgcgttgctggctgggccacgcgtgcttgagaaggttcaatggcgtggcagggactagcggccgagttcctgcaggtgccggcggtgacgcgggcttacaccgcagcctgtgtcctcaccaccgccgcggtggtaagcggccgggcggaccggacgtcgccttggttacagcctctggcgggaggggtgagggtcgccatggttacggcgtggctcccgggcagctcttgactggcccctggttccacagcagctggagctcctcagcccctttcaactctacttcaacccgcaccttgtgttccggaagttccaggtctggaggctcgtcaccaacttcctcttcttcgggcccctgggattcagcttcttcttcaacatgctcttcgtgttccgctactgccgcatgctggaagagggctccttccgcggccgcacggccgacttcgtcttcatgtttctcttcgggggcgtccttatgaccgtatccttcccgcaggctctggaacctcgggctagggcgcctcggcgtccagcctgtgttggtcctggggccaacacagccatgccagagagggacacagtcgctgtctccagcttagtatgtgttgagggcccactctgtgctcagctgcaggggtcagggctagatcttcagtgctgtatgcaaaatacaaagccatgcacaaaagagccaggtgggttgtcagggccactagctgagccctgaatgcgagtagccgggagaaactggggcagggacaggcagtggttgggccctgggatgaggctgtaggtgtgcagggcagatttcgtgggacctgaagcccgtggagtgtgtcgcctttattggactggctcatcttgatgagggaatagcacataggggagatgaggggaagaattccagggtcttgggaagtcagaggggccctgggcttgggctgaggcctgcaccggagcaccttgactctggcccagctgctgggactcctgggcagcctgttcttcctgggccaggccctcatggccatgctggtgtacgtgtggagccgccgcagccctcgggtgagggtcaacttcttcggcctgctcactttccaggcaccgttcctgccttgggcgctcatgggcttctcgctgctgctgggcaactccatcctcgtggacctgctggggattgcggtgggccatatctactacttcctggaggacgtcttccccaaccagcctggaggcaagaggctcctgcagacccctggcttcctaaagctgctcctggatgcccctgcagaagaccccaattacctgcccctccctgaggaacagccaggaccccatctgccacccccgcagcagtgacccccacccagggccaggcctaagaggcttctggcagcttccatcctacccatgacccctacttggggcagaaaaaacccatcctaaaggctgggcccatgcaagggcccacctgaataaacagaatgagctgca

SEQ ID NO: 466709 - DNA, 987 bp, Homo sapiens
  misc_feature (1)..(1): n is a, c, g, or t
  misc_feature (6)..(8): n is a, c, g, or t
  misc_feature (10)..(10): n is a, c, g, or t
  misc_feature (12)..(15): n is a, c, g, or t
  misc_feature (17)..(17): n is a, c, g, or t
naattnnncncnnnncnttccattggctgtcgggctcaggggctctcttttcagcctggggcgcgcagcgcctcggatgcggattggccgaaggcggggctgggaggcgggttaaagagcgcgttgctggctgggccacgcgtgcttgagaaggttcaatggcgtggcagggactagcggccgagttcctgcaggtgccggcggtgacgcgggcttacaccgcagcctgtgtcctcaccaccgccgcggtggtaagcggccgggcggaccggacgtcgccttggttacagcctctggcgggaggggtgagggtcgccatggttacggcgtggctcccgggcagctcttgactggcccctggttccacagcagctggagctcctcagcccctttcaactctacttcaacccgcaccttgtgttccggaagttccaggtctggaggctcgtcaccaacttcctcttcttcgggcccctgggattcagcttcttcttcaacatgctcttcgtgttccgctactgccgcatgctggaagagggctccttccgcggccgcacggccgacttcgtcttcatgtttctcttcgggggcgtccttatgaccctgctgggactcctgggcagcctgttcttcctgggccaggccctcatggccatgctgctgctggggattgcggtgggccatatctactacttcctggaggacgtcttccccaaccagcctggaggcaagaggctcctgcagacccctggcttcctaaagctgctcctggatgcccctgcagaagaccccaattacctgcccctccctgaggaacagccaggaccccatctgccacccccgcagcagtgacccccacccagggccaggcctaagaggcttctggcagcttccatcctacccatgacccctacttggggcagaaaaaacccatcctaaaggctgggcccatgcaagggcccacctgaataaacagaatgagctgca

SEQ ID NO: 466710 - DNA, 1158 bp, Homo sapiens
actgtaatggtacgaccgcgctcagctgaattactgtccccttgctgtgcatggggctctggggagttccactctttgatggagggcagaggccctgagtgcaaactccctgggaagagtcccatgctaacatgtgctcaaaggagccctcctctcacatctcagcgaccaagaaccccaatccctaatcagagctctgcctctgccccacatggggccctaccccacttccagggagcacagcagcctctgaccctagccctgccctggcagcatgggacctgccaacagctgagggtggcagcagtctgtgctgggatctgtgcccggatctgtgcccattctcttcagtaaggctggagctgcgagccagtttgctgccctcccagatcctgtgtccattctgaagaatggggacacctccctattacagatgagaacagaggggacatgaactccttggaggcagggctgggaagggaccctgggctgtgtctcctccctgtaccgtgtcaactccaagagctggcaccaggccgggagggctattcccatattcctcacagctggcttgtaaggcaggagctggcccaggccacagcacctgctggggtgggaaagggccccagctgacctggctatgggtgccactggagctagaacagccctcctgcacccaggctggcgacagcccagcagtgcccacacaggactgggccctccgcaggggacttcagagcagcaaggccccagctggcagtagcctgaccatctggacacagcagagccagggcggcccagggacggcaggagagctcgcggcaccttcctgaggccaagcaaggggagcagggttagggctgttcctgaaaggcagagagcctctgccctgagcctcacagctactcttctcagctctctgggtctggaaggagaacaggctgaggggagctgagaggagctgaggtgctacccggagccccattcacccccacctgcccacttgggaatctgaggcagaggagggtgaggcctgtgtgccaaccttgttcacataccaccttcgtccccccaggccccggccccactcctggctctcattatttttatgttaaaactttgaagaaattgaacatgacctgttgaagaaattgaaca

SEQ ID NO: 466711 - DNA, 696 bp, Homo sapiens
ataacagaaagaagtcccgttgaagatgggagagaaaggaagctacctccatagagtcatgtgcctagcatcaaatgtgaagggtaaaggtgggaacccagttacctctgagtccctcttgtgccaggatgtcaccagtgcatacaacctccctgccacagagagaaagtgtgtgcagaatgtatttgcatttcgtttgatgcaggtgagtgcctttcaggaatacagtcccaaagaggcggtgggttttaaagaggggacaaaaccctccaactctaacttgactcaccgtatgatgctggaccaggaactcagccgagcgtcccagttttcctggtctggaaaatggggaacgaagaaaacagcatgcatgggaaaggagctctattcccacccaataatagagctcctggaagttggtgctgggagcgttgcagggaagaaagggttaatattatctgagtgtgtgtgactggcaaaaaaggcccagagtggagactaggggaggaatcccaacaattaatgaacatgtactttgtgtcaagttctgtgctaggtagctattagaattcctgtttgacacatgatggacatggaggaaaatggatccacagagaagtaataaaactgagcctagctctacccagtggagttaggatgctaacttcagtttcattccagtgtcttgagttttaa

SEQ ID NO: 466712 - DNA, 2543 bp, Homo sapiens
atcctgctccacgtcctgggcaacacgcattaacaatgccggccctggagccagcaccaccactgctggcggacctggggcctgctctggagccagagtcacctgcagccctgggtccaccaggatatctacattcagcaccagggccagcaccagcaccaggggaagggccccctccagggacagtgctggagccacagtcagccccagagtcctcctgtccctgtcgtgggtctgtaaagaaccaacccagtgaggagctgcctgacatgacgaccttccctcccaggctgctggcagagcagctgaccctcatggatgcggagctgttcaagaaggtggtgctccacgaatgcttgggctgcatctggggccaaggacatctgaaggggaatgagcacatggcacccacagttcgtgccaccatcgcacacttcaacaggctcaccaactgcatcaccacctcctgcctcggggaccacagcatgagggcccgggacagggccagggtggtggagcactggatcaaggtggccagggagtgcctaagcctcaacaacttctcctcggtgcacgtcatcgtctctgctctgtgcagcaacccaataggtcagctacacaagacgtgggcaggagtgtccagcaaaagcatgaaagagctaaaagaactctgcaaaaaagacactgcagtgaagagggacctactgatcaaggaagccaggcctctgctgctgctgctgctgctgctgctgctgctgctgctgtctgcagcacacctccatgggcagggggccttggcctgcactgggggagagggggaacaacaacagaggaagctcatgtggcagggagtccagtaactgcccagctttggagggatgacggtgagaacaacggcaacagctacaggaaactgagccctcagaggccctgtgaggtagctgtggtttgcatcactctttacagaagaggaaacagtctcagggaggcccggctgcaagactgggtgacacacacagggagtgtggatctgggccagtggtatgagcacggtgccaggtggctcccgccactccctggggatccaagtgcggggtggctggggtgtaactgggggagaggaggagagcctcactgtccctgtcgctgacacctggcaggcggggagctttaaggtggccacccaggagaggaacccccagagagcccagatgaggctgcggaggcagaagaagggtgtggtccccttcctgggggattttctgactgagttacagaggctggattcggccatcccggacgacctggatggcaacaccaacaagaggagcaaggtgagcagctggggcactcacgttggatgagggtggggatgtggacgtcacagtccaccctgggcaggacactccctggctccatcctctacatcttaggcttactgggagtgtttgacacacacaggaggaggggacctatcccaggagaaaatgggaaaagcactggaatcaaagaccaattcctgcaggaggggctgtttatatccaactctgagaacaggctgggggcgctgcatgggaccccttcagaaaactgccccagggaccagccccttctccctgcctgccaaaggcccccacagcaacttccacccaggccctgtcagcatcctgtcctctgtctctaggaggtccgagttctgcaggaaatgcagctgctccaagtggctgccatgaattacaggcttcggcctcttgagaaatttgtcacctatttcacaagaatggagcagctcagtgacaaagagaggctgcactgcagtgtcaccatctctgttcactgcaacgtctgccttctgggctcaagtccttcctcagcctcccaagcagctgggactaccgctgtacaccaccatgtccggttgttctgctgttgttgttctgctacaagctgtcctgccagctggagcccgaaaacccgtaggctggcaacatcctgcagtggctgggaacccaccgggatgctggccagaacaccggctctgcaccatccctcacccagaccgtagacaccagggaaccacatctaggaggctggcagctcagctgcatcttgccctggatcctcatcaccaactgctcctgctggccaggatcaggccatgggacttttgtgagtcaggcgggagaccattttatgtttattttctttagtgtataagtaagggttttttcttaactttcgttaaaataaaattttaaaaaactaaaaatgttctgtagttgttggaatgagaaaagtaactccagtgcggtaaccatataccagtctttaggattcatagcctagcatgtcaaattgaggctatggctgaacaagttatggaatagcattcacattacacatgccaagcatttaatgttttccttctttattcaaattattgttaactctgcttaagaaaacaaacagaacaaaacaaaaccccttaaaagccatagtatgtcacccaatctatgtcacccatagtatgtcacatttgttct

SEQ ID NO: 466713 - DNA, 1940 bp, Homo sapiens
atcctgctccacgtcctgggcaacacgcattaacaatgccggccctggagccagcaccaccactgctggcggacctggggcctgctctggagccagagtcacctgcagccctgggtccaccaggatatctacattcagcaccagggccagcaccagcaccaggggaagggccccctccagggacagtgctggagccacagtcagccccagagtcctcctgtccctgtcgtgggtctgtaaagaaccaacccagtgaggagctgcctgacatgacgaccttccctcccaggctgctggcagagcagctgaccctcatggatgcggagctgttcaagaaggtggtgctccacgaatgcttgggctgcatctggggccaaggacatctgaaggggaatgagcacatggcacccacagttcgtgccaccatcgcacacttcaacaggctcaccaactgcatcaccacctcctgcctcggggaccacagcatgagggcccgggacagggccagggtggtggagcactggatcaaggtggccagggagtgcctaagcctcaacaacttctcctcggtgcacgtcatcgtctctgctctgtgcagcaacccaataggtcagctacacaagacgtgggcaggagtgtccagcaaaagcatgaaagagctaaaagaactctgcaaaaaagacactgcagtgaagagggacctactgatcaaggaagccaggcctctgctgctgctgctgctgctgctgctgctgctgctgctgtctgcagcacacctccatgggcagggggccttggcctgcactgggggagagggggaacaacaacagaggaagctcatgtggcagggagtccagtaactgcccagctttggagggatgacggtgagaacaacggcaacagctacaggaaactgagccctcagaggccctgtgaggtagctgtggtttgcatcactctttacagaagaggaaacagtctcagggaggcccggctgcaagactgggtgacacacacagggagtgtggatctgggccagtggcggggagctttaaggtggccacccaggagaggaacccccagagagcccagatgaggctgcggaggcagaagaagggtgtggtccccttcctgggggattttctgactgagttacagaggctggattcggccatcccggacgacctggatggcaacaccaacaagaggagcaaggaggtccgagttctgcaggaaatgcagctgctccaagtggctgccatgaattacaggcttcggcctcttgagaaatttgtcacctatttcacaagaatggagcagctcagtgacaaagagagctacaagctgtcctgccagctggagcccgaaaacccgtaggctggcaacatcctgcagtggctgggaacccaccgggatgctggccagaacaccggctctgcaccatccctcacccagaccgtagacaccagggaaccacatctaggaggctggcagctcagctgcatcttgccctggatcctcatcaccaactgctcctgctggccaggatcaggccatgggacttttgtgagtcaggcgggagaccattttatgtttattttctttagtgtataagtaagggttttttcttaactttcgttaaaataaaattttaaaaaactaaaaatgttctgtagttgttggaatgagaaaagtaactccagtgcggtaaccatataccagtctttaggattcatagcctagcatgtcaaattgaggctatggctgaacaagttatggaatagcattcacattacacatgccaagcatttaatgttttccttctttattcaaattattgttaactctgcttaagaaaacaaacagaacaaaacaaaaccccttaaaagccatagtatgtcacccaatctatgtcacccatagtatgtcacatttgttct

SEQ ID NO: 466714 - DNA, 2193 bp, Homo sapiens
atcctgctccacgtcctgggcaacacgcattaacaatgccggccctggagccagcaccaccactgctggcggacctggggcctgctctggagccagagtcacctgcagccctgggtccaccaggatatctacattcagcaccagggccagcaccagcaccaggggaagggccccctccagggacagtgctggagccacagtcagccccagagtcctcctgtccctgtcgtgggtctgtaaagaaccaacccagtgaggagctgcctgacatgacgaccttccctcccaggctgctggcagagcagctgaccctcatggatgcggagctgttcaagaaggtggtgctccacgaatgcttgggctgcatctggggccaaggacatctgaaggggaatgagcacatggcacccacagttcgtgccaccatcgcacacttcaacaggctcaccaactgcatcaccacctcctgcctcggggaccacagcatgagggcccgggacagggccagggtggtggagcactggatcaaggtggccagggagtgcctaagcctcaacaacttctcctcggtgcacgtcatcgtctctgctctgtgcagcaacccaataggtcagctacacaagacgtgggcaggagtgtccagcaaaagcatgaaagagctaaaagaactctgcaaaaaagacactgcagtgaagagggacctactgatcaaggaagccaggcctctgctgctgctgctgctgctgctgctgctgctgctgctgtctgcagcacacctccatgggcagggggccttggcctgcactgggggagagggggaacaacaacagaggaagctcatgtggcagggagtccagtaactgcccagctttggagggatgacggtgagaacaacggcaacagctacaggaaactgagccctcagaggccctgtgaggtagctgtggtttgcatcactctttacagaagaggaaacagtctcagggaggcccggctgcaagactgggtgacacacacagggagtgtggatctgggccagtggtatgagcacggtgccaggtggctcccgccactccctggggatccaagtgcggggtggctggggtgtaactgggggagaggaggagagcctcactgtccctgtcgctgacacctggcaggcggggagctttaaggtggccacccaggagaggaacccccagagagcccagatgaggctgcggaggcagaagaagggtgtggtccccttcctgggggattttctgactgagttacagaggctggattcggccatcccggacgacctggatggcaacaccaacaagaggagcaaggaggtccgagttctgcaggaaatgcagctgctccaagtggctgccatgaattacaggcttcggcctcttgagaaatttgtcacctatttcacaagaatggagcagctcagtgacaaagagaggctgcactgcagtgtcaccatctctgttcactgcaacgtctgccttctgggctcaagtccttcctcagcctcccaagcagctgggactaccgctgtacaccaccatgtccggttgttctgctgttgttgttctgctacaagctgtcctgccagctggagcccgaaaacccgtaggctggcaacatcctgcagtggctgggaacccaccgggatgctggccagaacaccggctctgcaccatccctcacccagaccgtagacaccagggaaccacatctaggaggctggcagctcagctgcatcttgccctggatcctcatcaccaactgctcctgctggccaggatcaggccatgggacttttgtgagtcaggcgggagaccattttatgtttattttctttagtgtataagtaagggttttttcttaactttcgttaaaataaaattttaaaaaactaaaaatgttctgtagttgttggaatgagaaaagtaactccagtgcggtaaccatataccagtctttaggattcatagcctagcatgtcaaattgaggctatggctgaacaagttatggaatagcattcacattacacatgccaagcatttaatgttttccttctttattcaaattattgttaactctgcttaagaaaacaaacagaacaaaacaaaaccccttaaaagccatagtatgtcacccaatctatgtcacccatagtatgtcacatttgttct

SEQ ID NO: 466715 - DNA, 2059 bp, Homo sapiens
atcctgctccacgtcctgggcaacacgcattaacaatgccggccctggagccagcaccaccactgctggcggacctggggcctgctctggagccagagtcacctgcagccctgggtccaccaggatatctacattcagcaccagggccagcaccagcaccaggggaagggccccctccagggacagtgctggagccacagtcagccccagagtcctcctgtccctgtcgtgggtctgtaaagaaccaacccagtgaggagctgcctgacatgacgaccttccctcccaggctgctggcagagcagctgaccctcatggatgcggagctgttcaagaaggtggtgctccacgaatgcttgggctgcatctggggccaaggacatctgaaggggaatgagcacatggcacccacagttcgtgccaccatcgcacacttcaacaggctcaccaactgcatcaccacctcctgcctcggggaccacagcatgagggcccgggacagggccagggtggtggagcactggatcaaggtggccagggagtgcctaagcctcaacaacttctcctcggtgcacgtcatcgtctctgctctgtgcagcaacccaataggtcagctacacaagacgtgggcaggagtgtccagcaaaagcatgaaagagctaaaagaactctgcaaaaaagacactgcagtgaagagggacctactgatcaaggaagccaggcctctgctgctgctgctgctgctgctgctgctgctgctgctgtctgcagcacacctccatgggcagggggccttggcctgcactgggggagagggggaacaacaacagaggaagctcatgtggcagggagtccagtaactgcccagctttggagggatgacggtgagaacaacggcaacagctacaggaaactgagccctcagaggccctgtgaggtagctgtggtttgcatcactctttacagaagaggaaacagtctcagggaggcccggctgcaagactgggtgacacacacagggagtgtggatctgggccagtggtatgagcacggtgccaggtggctcccgccactccctggggatccaagtgcggggtggctggggtgtaactgggggagaggaggagagcctcactgtccctgtcgctgacacctggcaggcggggagctttaaggtggccacccaggagaggaacccccagagagcccagatgaggctgcggaggcagaagaagggtgtggtccccttcctgggggattttctgactgagttacagaggctggattcggccatcccggacgacctggatggcaacaccaacaagaggagcaaggaggtccgagttctgcaggaaatgcagctgctccaagtggctgccatgaattacaggcttcggcctcttgagaaatttgtcacctatttcacaagaatggagcagctcagtgacaaagagagctacaagctgtcctgccagctggagcccgaaaacccgtaggctggcaacatcctgcagtggctgggaacccaccgggatgctggccagaacaccggctctgcaccatccctcacccagaccgtagacaccagggaaccacatctaggaggctggcagctcagctgcatcttgccctggatcctcatcaccaactgctcctgctggccaggatcaggccatgggacttttgtgagtcaggcgggagaccattttatgtttattttctttagtgtataagtaagggttttttcttaactttcgttaaaataaaattttaaaaaactaaaaatgttctgtagttgttggaatgagaaaagtaactccagtgcggtaaccatataccagtctttaggattcatagcctagcatgtcaaattgaggctatggctgaacaagttatggaatagcattcacattacacatgccaagcatttaatgttttccttctttattcaaattattgttaactctgcttaagaaaacaaacagaacaaaacaaaaccccttaaaagccatagtatgtcacccaatctatgtcacccatagtatgtcacatttgttct

SEQ ID NO: 466716 - DNA, 1010 bp, Homo sapiens
gccagggccagcagccttcagtcggtagctggccgtagaaggaggaggagctccgactacattctgtccttgtgcctcttggacttttttgtgtgtttaggtgcccaatggggagcaaactgacttgctgcctgggccccagcgggggcctcaactgtgactgctgcaggccagatgtgggaccctgccatgagtgtgagattcctgagactgtggcagccacagcaccagcatccaccactgcaaagcctgccaaattggatttgaaagctaagaaggcccaactcatgcagtacctcagcctcccgaagacgccgaagatgctgaagatgtccaaaggtttggacgcccgctccaagcgctggttaaaaataatatggagacggcacgggatttggcctctagaaaatataggtcccactgaagatgtgcaggcgtctgcacacggcggtgtggaggagaatatgacatcagatattgaaatacctgaggccaagcacgaccaccgtcccactgaagatgtgcaggtgtctgcacacggcggtgtggaggagaatataacgtcagatattgaaatatctgaggccaagcacgaccaccgtacgtatttttttttaaacagctttatttacgtgtagttgacatgcaaaacattcacccatttaacgtaagtgattcagcgtttttactatattcacagggttgtgcaaccattgttacaatctaatcttagaacctctttattccccctcaaagaaaccccactagtagtcactcctctgtctttcccaactcccacacccctggatctaggcagccacgaatgtacttcctgtttctatagtacagtgcttttctgtattaactggttcttaaggtgactatttcacattgatgaagttgctctagctagaaagccaaggctctttcatttctttctgcccttctcctttgccttccttcagcaccaaggagaatggtccagcagcagctcagtccatgcctgtcaa

SEQ ID NO: 466717 - DNA, 1775 bp, Homo sapiens
agtggcaactctcttgtatatgtgggttaaagaccctcagcctcaagccaagcctcctccatgaggagccatctcactattgaccggctagtgccggctccccatgaggacaccgtacacgacatcactaacgaggacgccacacacgacatcgctaacgaggatactgtacacgacatcgctaacgaggccgccgacaagggcatcgccaacgaggacgccgcccacggcatcgccaacgaggacgccgcccacggcatcgccagcgaggacgccgcccacggaatcgccagcgaggacgccgcccacggcatcgccagcgaggacgccgcccagggcatcgccaacgaggacgccgcccagggcatcgccaaggaggacgccgtccacggcatcgccaacgaggacgccgcccagggcatcgccaacgaggacgccgcccagggcatcgccaaggaggacgccgcccagggcatcgccaacgaggacgccgcccagggcatcgccaaagaggacgccgcccagggcatcgccaaggaggacgccgcccagggcatcgccaacgagggcgccgcccagggcatcgccaaagaggacgccgcccatggcatcgccaacgaggacgccgcccagggcatcgccaacgaggacgccgcccacggaatcgccagcgaggacgccgcccacggcatcgccagcgaggacgccgtccagggcatcgccaaggaggatgccgcccagggcatcgccaacgaggacgccgcccagggcatcgccaacgaggacgccgcccagggcatcgccaaagaggacgccgcccacggcatcgccaacgagctgtatacgacatcgctaacgaggacaccctacaagccgcacgctaacgaggatgctgtacacgacatcactaatgaggacagtgtacaagccatcactaatgaggacactgtatatggcatcgctaacgaggacactgacgctgtagacgacattgcttataaggacaccgtacaagacatcgctaacgaggacgctgtatacgacatcgctaatgaggacgttgtatatgacatcgctaatgaggatgctttacaagacatagcgaatgaggttgctgtatatgacatcgctaatgaggacattgtatatgacatcgctaatgaggacgctctatacgacatcactaatgaggacgctgtatacaacatcgctaatgaggacgctgtatatggcatcgctaatgaggatgctgtatacgaattcgctaataaggacgctgtatatgacattgctaatgaggacactgtacaagacatctgtaaaaaagaagatgctgccaatgagccattgacactggagaatgatacgtaccctgaaataactcacttcctgaggaaaaagcgccatctctaggatttgattgtggagagcatatctgatgatggggatttgtaggactttaaaaagcactcatgtttccatcctcactgttgactcctggcttaaagggatctcccggggtgagtgaggaggcgggatcggaccctggcagtctgacggcagcacctgtgttcctctgcactgggccgtggatgacattacacaccttgccactcccacggtcctgtgtgttccggatattttaaaataatggctataaggttgagcacttcaggatacgctgttttgctgtgtgcagatggaggcagtggctggagtgaatgaacggcaacacttgctggcaaccggcagaagctgagagacagggaacaggc

SEQ ID NO: 466718 - DNA, 2039 bp, Homo sapiens
agtggcaactctcttgtatatgtgggttaaagaccctcagcctcaagccaagcctcctccatgaggagccatctcactattgaccggctagtgccggctccccatgaggacaccgtacacgacatcactaacgaggacgccacacacgacatcgctaacgaggatactgtacacgacatcgctaacgaggccgccgacaagggcatcgccaacgaggacgccgcccacggcatcgccaacgaggacgccgcccacggcatcgccagcgaggacgccgcccacggaatcgccagcgaggacgccgcccacggcatcgccagcgaggacgccgcccagggcatcgccaacgaggacgccgcccagggcatcgccaaggaggacgccgtccacggcatcgccaacgaggacgccgcccagggcatcgccaacgaggacgccgcccagggcatcgccaaggaggacgccgcccagggcatcgccaacgaggacgccgcccagggcatcgccaaagaggacgccgcccagggcatcgccaaggaggacgccgcccagggcatcgccaacgagggcgccgcccagggcatcgccaaagaggacgccgcccatggcatcgccaacgaggacgccgcccagggcatcgccaacgaggacgccgcccacggaatcgccagcgaggacgccgcccacggcatcgccagcgaggacgccgtccagggcatcgccaaggaggatgccgcccagggcatcgccaacgaggacgccgcccagggcatcgccaacgaggacgccgcccagggcatcgccaaagaggacgccgcccacggcatcgccaacgagctgtatacgacatcgctaacgaggacaccctacaagccgcacgctaacgaggatgctgtacacgacatcactaatgaggacagtgtacaagccatcactaatgaggacactgtatatggcatcgctaacgaggacactgacgctgtagacgacattgcttataaggacaccgtacaagacatcgctaacgaggacgctgtatacgacatcgctaatgaggacgttgtatatgacatcgctaatgaggatgctttacaagacatagcgaatgaggttgctgtatatgacatcgctaatgaggacattgtatatgacatcgctaatgaggacgctctatacgacatcactaatgaggacgctgtatacaacatcgctaatgaggacgctgtatatggcatcgctaatgaggatgctgtatacgaattcgctaataaggacgctgtatatgacattgctaatgaggacactgtacaagacatctgtaaaaaagaagatgctgccaatgagccattgacactggagaatgatacgtaccctgaaataactcacttcctgaggaaaaagcgccatctctaggatttgattgtggagagcatatctgatgatggggatttgtaggactttaaaaagcactcatgtttccatcctcactgttgactcctggcttaaagggatctcccggggtgagtgaggaggcgggatcggaccctggcagtctgacggcagcacctgtgttcctctgcactgggccgtggatgacattacacaccttggtgagaatcaggaattgaggctaaccacatctgaaattgagatgggccttgagtcatataaatagtttggaaaagatgcattttactacgctattgaaagaaaccatttatttctcactccagcaggataaatggttttcagtatccatttaactgctcattgactcttactgtagatgaggaggtggccagcagcccctgccctcccccagttggtaggcccaagtttacttcatcaagccagcaaagtggatatgtgtcccagtctcctacgacgcagtcctaaataatgtggtgaagggaagtcgtaatcaatgtcatcaatggactcagataaatcacatcatttttgctgtgttctctgggttagaagaaagtcacaggtcccattcacatggaagaggaagggatttcacaaaagcatggaca

SEQ ID NO: 466719 - DNA, 1379 bp, Homo sapiens
cagaaagttgacgctgaagaaggccggcgccagtaaaatgagaaattggtcatgcctagctgggggtggcattgtgtggtgacagggctcaaggagggtgttaggtccccactgtaccccagccagtgagcctggggtgtccttctcgcactctttgcctccatttccacatctgcaaactggagaggcagctgagcattcaatcaggaagccaaggggagcgccctcccaaggatgcctggtggcaggtccccttccctcaccattctgccatcaccctgggccttgtgggagaggagcctgcagattctgttgacccagtttccttctctgtaaaatggggaaattggtcatttaatttaattcgatttatggaatggaaaatattttcacagacatcaaaattcaaaacctgggcaacaagagtgaaactctgtctcaaaagaaaaaaaaagaaaagaaaagaagaagaagaaggttcatcttcagactcctagtccagagctctcagcaatcctcatcttgtaatgctgtctacagactccaagatctcccaacgtgaattagcaaccgatgcatcaaaggtggcacctcggccgggcacggtggctcacgcctgtaatctcagcactttgggaggccgaggtgttggagcgggccggagagaagtagagtgggctgcgaggagaaggaaacaggcctttcggaggctcctcatccctcggaggtcatcccttactccaggtgatctgaacctgaagtccgaggccccaagagttctaagtaacccaggggtggaggtggggtgggggatcccagctctttccgatctgggagatcagaaagatgctcatctgggagagtgggacctcccctttcagtccgcccacccccgaggaccgcacttggagggccgcacttggaggaccgcgcctccaaggcgggcgcggctgacgcccggggcccaggccatgtggggcgtgcgtgccgggagaagtgtcccagcgcctcaccccgcaagcatgagaaccacgaaacccccggggccgggaaaccggggcggggcggggcggggcggggccgggaagcggcgcggggctgggccggtgacgtcgcggccccgcccccggccggctccctcctcccggagcgctccccagcggagtcctcacctgcaggcacaggtgtgcgcacttcgcatctcgaaggccggccagcaagcttcagagaacgggaagtgctggggagagaaggacggggatgagctcttgggaaaacccccagaatgaagacatctctgagtctgggccaggtggacacgaaccactaggcagtggacaacagcatgtccttccaatggcaaggcagggaggctccct

SEQ ID NO: 466720 - DNA, 406 bp, Homo sapiens
cagaaagttgacgctgaagaaggccggcgccagtaaaatgagaaattggtcatgcctagctgggggtggcattgtgtggtgacagggctcaaggagggtgttaggtccccactgtaccccagccagtgagcctggggtgtccttctcgcactctttgcctccatttccacatctgcaaactggagaggcagctgagcattcaatcaggaagccaaggggagcgccctcccaaggatgcctggtggcaggtccccttccctcaccattctgccatcaccctgggccttgtgggagaggagcctgcagattctgttgacccagtttccttctctgtaaaatggggaaattggtcatttaatttaattcgatttatggaatggaaaataaaaaaaaaccggcgcggccg

SEQ ID NO: 466721 - DNA, 2342 bp, Homo sapiens
  misc_feature (1)..(1): n is a, c, g, or t
  misc_feature (7)..(8): n is a, c, g, or t
ntgaagnngcagaagagtgtgtgacccatgtacgtgctccatgcatggccacttgggctattattgccaatcctggcaacggggctgtgagggcttctgaagtgggtggtgatatcactgccagatgcagccatcgacggtatagctgccccccaccacagcagtctctacagtaccaggaggtaggcggttttaaccacttgacacagaagctggtgggcacacagggagggggagatgtggacctgtcggagaaccagctgggagtggcaggagcccaggccctctgtgccgccctcacagtgaaccaggccatgcggaagatgcagctgtcagggaatggcctggaggagcaggcggcccagcaccttgccgaactcctgctggcccacacagacctgaagtccctggacctgagctacaaccagctgaatgaccaagcagagccattaagtgggtgtggagtccgatcaatgtttctggggcctgctgctgctctgcacacgcccctcccagtctctctgagggccattcacgtctacaccggtcctttcctgttgtgctctgggccactgggctctgttgaccaccatcatccaagctgcagccaccagggggtctgcatggcactttcctgacccttccttggagcctctccccttctgccctttatctcttatctttgcacctcagggctcctggtctctgaggctgtggcaccctggcttgctccactgtcagatggggtcccatgacttcactctttggtattctaggcaaacatcttccttaaagttctagacatctcatacaatggctttggggatcctggagcctctgcggtgggtgaggctctgaaggccaacaacgtgttggaggaactcaacatgagagacagtctcctgctggccttgaactcttgggctgaagcagtcttcctgcctcagcctcccaaagtgctggaattacagtcatggggagttcatcgttgttacatagagacctgtgattcctatagcacaggcggatggctgcgaattgcacacggtgtataaagcatctccggcagagcctggtgcatgtaacaaccgcatctctgcgatgggagccctgagcctgggcctgggcctccgggtcaaccagacgctgaggattcttgtacctcaccagagcattctgtctgactatctgatggagacaccttctgagccgaaacagtgtggccatagtggctgtgtcctcagagatgaggagcccctccttccctttcacattgctctctggccttcccggacctggcttctcgcagctttgtgtgcgtgtttctcaggtgtccaggaatcccatgcgaagtgaaggctgctttggtctcctcaagtctgtccaggacaatccagcctctgccctggaactgctggatttctcagatatccaggtgaacgcagagtttgatggccttgctagctcagtgaggggaattcttccagaactctgcataaagactggcgcttgcagagtggagtataaaaaggagttgctgccagtcttcagatcagccctgccagcgtctgtccctaagtgaccttggagtgtggcttcctcatctccaatcagctgctttgacctccagggtatatacttgaaagaaatgaagacatatgtccccacaagaactcgtgcatgaatatccatagcaacattatttataatattctaagagtgaaaatgcccaccagtggataaatgcaatgtggtatatccatacagtggaatattatttggcaataaaaaggaatttgaggtgataccaatgttctaaaatgtattgtggtgatggctacgtaactgtgcatattctaaaggcaattgaattacagatgctttacatgaatgaaccgtatggtatgtgaacggcatctcaataaaactgtttcgaaaagaaggaaaaggacggacacatgctgaaaacgggtgaaactagaaaacatggcgctaagtgaaagaagccagccacaagatcacgtgtcgcatgaccgcatttatgtgaaacatccggagtatgcaaatctatacagacagaaagtagattatacattgcctaggtgcagagaaatggaagtattggaggttgacggctaaaggatgtggatttctttggggggtgataaaagtgttctaaaattgattgtggtgatgtgcgactctatgaatacgctaaaaaccgctcgattgtacattttaaatgggtgatttatgcggtatgtgaaatacatctcaagaaagctgctgcaaaaaatatcatacgggttgagcctagtggtattaaaaaagtataaatatgg

SEQ ID NO: 466722 - DNA, 1136 bp, Homo sapiens
ccacggtgactccagcatcatggccaggcctgagtcctcctgtctctgcagagggacaacatggaggctgtgccagggatttctgtccctgcatcagacagccactgtcgtgaccttggagtgaacaatgaccatggaggccgtgccagggatgtccctgcatcagacagccaatgtcttgaccttgaagtgaacagtaagccagctgatgaaggggagagggtgaaggaagaagttgtcatcagttctgcctatctgttggagcccccagattttggtggtggctttcattgggtcagcccagctcctggaaatcgtccttctcattctgttgacagagtggttcggctgagatttgtggatgccagtatctttccctacattgaattgagtgaacatagactatggagtcaaccagatctagaggacttcggctatgtttcccccaccccagtctccctggatttttctggatgtcctttgggatgtgctgagaataaatatgccgatattcttccattctgttcattgcaagagcgtacaacactcccttcagcagtcctggatttatccagcaatgctgggcttacctactgcagacacctgtccactgagaggacccacttgtcatccctggtcaattacatgatcatgtctctggacttgccctgtgatgctggacaggagctgacagccgggatctgggagcaataccttcaggatagcacagcaaggaaattgaaggcgtgtgggagagcatatggaacattccttcaaatgcatttggtcatagaagcctttactggaaaatacctcccatggctagtaaaaagcaaaaatgactgagaagcactggtttatctctgccaagaacaaaatctaggaggaggtacctgtttcctccacactgggtaaatctagtggcccaatctgctgtgcaccttcccacccaggtgcgttctggggagggttgagctggttgagtgtatcaagagttgattcctttggatggctgagtgctattccataagatggatgtagcacagtttaactgttcacctgctgatggatggctgagttatttctagatttttggctattgctattaaagctgtaatgaacattcacgtacggtt

SEQ ID NO: 466723 - DNA, 710 bp, Homo sapiens
tttgatgctgaacacttaggggatgactttccctgatccatcccccaacccccatccttcctgccccaccgtgcacagggatgaggctgctcacccaggtctctgtgactctgttcatgtcattacttgtgatggaacaacagctctcttcccaccgtgctcatgggcaaactccttttccttctgcagaaaaaccactccttcttctatgccctggggtcactggggagagctctccactaacttgagctctgcttggacaaaccaaaagaaagccggggccagaaagaaactcagacatcatctggcttacattttaatcttgcaactgagaaaaggtagactctcagcagctcctggcaataaacaactcaggcgcaacgggatgtttcttacaaggagcagccgtgcagtgattgctccactctgagggtctgactcagcccttcctcagcttctgggcttattttagccccacgtttctggaggaggaaacgagaacatgatcaaggatgccgtgggaagagcctggggccctccagttctctcggggagcctcgggaagctcctcgcagtttcagctactgtagaaattcacagccaagggctcctacagaattgggctgtcagcctggccagcctgggcgggtgggccccgctgtaagaaagcctgccatttggaaatgagaattagagcaaaaggatacatt

SEQ ID NO: 466724 - DNA, 1053 bp, Homo sapiens
ggcaggagtaagtccttacttatcaataataacattgagtgtcagtagactaaacttttcaatcaaaagatagagtggatgaatggatgaaagaacaagacccatccaggcatgagcctgggtcctcagccttgaagatcttatagaaaaaagcaactactgtgttatagaataacaaactttaaatagaaacaaagacattttaatacaatcttaattactctgtgaacatgtagattaacctttaaatataggcttttttttttcctcaaaacaggataagagttatcttctcatttttaatttccaagttgaaactacagatgactatgtttactgaatcacatttcaggatcttaaatcttcggacaattatcaaccaagccgctggaacccctccgccgggttccgaggccctcgctgttctcaggccagcgcagaattggtcccagggctggactcctccaggtggggcgcccggagcactcccgaccacctgctccaaggacactgcctcctggaagcgtccctggtttcccttcggaggtgaactcgttcagggcacttctcggagaaggagaggctccagaggccctggactcgggggacaaccctcgcttcatcacctcctgagggtccaccgcagccagccctgggccttctgcccctttcactccaagatctctgggctgaccttcatcagccccttccacccgcctcaggaggtagggacaaggctgggggtggcctttgcagaccctgagaatgaatattgtcctgcatacacagcccagtggccacgagaggccgacgaagatactgaagacctccgggcaggaaaagaaggtagaggggatattcactgagcccccgcctcgagcctgggcccgacctggggtgtttgccttactggccgctccagccagtgtgagaggctgcactatcatgcaccccactgacaggaaaggaactggttgtgtggttccctgtaagctctggagatggggcgggcagtagggggaggagcacagcagtgtggatgtattaatactt

SEQ ID NO: 466725 - DNA, 1077 bp, Homo sapiens
tgaaccaccacgcccagctaattttttgtatttttagtagagatggggtttcactgtgtcggccaggctggtcttgaactcctgacctcaagtgatctgcccgccttggcctcccaaagtgctgggattacaggcatgagcctgggtcctcagccttgaagatcttatagaaaaaagcaactactgtgttatagaataacaaactttaaatagaaacaaagacattttaatacaatcttaattactctgtgaacatgtagattaacctttaaatataggcttttttttttcctcaaaacaggataagagttatcttctcatttttaatttccaagttgaaactacagatgactatgtttactgaatcacatttcaggatcttaaatcttcggacaattatcaaccaagccgctggaacccctccgccgggttccgaggccctcgctgttctcaggccagcgcagaattggtcccagggctggactcctccaggtggggcgcccggagcactcccgaccacctgctccaaggacactgcctcctggaagcgtccctggtttcccttcggaggtgaactcgttcagggcacttctcggagaaggagaggctccagaggccctggactcgggggacaaccctcgcttcatcacctcctgagggtccaccgcagccagccctgggccttctgcccctttcactccaagatctctgggctgaccttcatcagccccttccacccgcctcaggaggtagggacaaggctgggggtggcctttgcagaccctgagaatgaatattgtcctgcatacacagcccagtggccacgagaggccgacgaagatactgaagacctccgggcaggaaaagaaggtagaggggatattcactgagcccccgcctcgagcctgggcccgacctggggtgtttgccttactggccgctccagccagtgtgagaggctgcactatcatgcaccccactgacaggaaaggaactggttgtgtggttccctgtaagctctggagatggggcgggcagtagggggaggagcacagcagtgtggatgtattaatactt

SEQ ID NO: 466726 - DNA, 1523 bp, Homo sapiens
ccctcaggactgagatgttcatccttttggcagcactcattgagaacctactgtgtgccaggcactgccctagtgctaagaattcaccagcaaacatgacagacacacctgctgtgatctccaagcttgcttccgcagaggggagttggagagtaagcaacttcttgcaagattctatttattccttagctgtcattgtgctgtgtgcacaaaggttagtgtttctgaagcatcctctgcctgccctcagcaccccactcctggcgctgctgccctcatacctgtggactgacaaggaggagaagcggggcccctgcaacgctcagtggtcccaggatgccagctatgttggtgacaaggatcctccagtccaggaagcacctggggttccccctagccctggccttcagtgtcagcccctggagggcaagcatggctgtctcctctctgcagttgaaaaaaccttttggtccagaagatccaaggccttctgggggctccagcctcccagaagccccccacaggcatcaccccttgcacctgggaatgaagccattctcaggtcgcaggctcactcgttgttcagcctgactggacataagaagctctacgtggagttattttaatctttcctcacaaatcaataactgcttaccttgaagcagttttaattagttaaggcctgctgagtgctctgctgataaactagcctgctattaatgctaagtatctgctgtgtagttgctatttttattattgttgttcttatgaaatcctcatttcctgagccacacagctgggactattatttaaaaatcaccttaggcttgagcctccttccctgaaacctggggaaagggccctttcctcacagctcagctcaccccttcccacgcctaccacgtgcaatacccttaacacaccattatattaatagaaagatgcttccttcaacaacagaaaacaacctccacaacttttgatatctgacttctgtagcaacagagccccctaagctctatgagccccaagatgctgttctgagtaactgtcttgtttcattttatttatttacagcaacactctgtggcattcccattttacatttgggaatctttgtatcatccccatttcacagatggtaaaacctaaggctgaaagatgtgaggaaaccgaaactctgagaggtcgcctaagtgggggggatgaaaaccagcgctctgaccacatcctggccttcgtcaccatgggattccgagggacaagcccaggggagttgcagcatcctctgtctaccctatgtacgtgacccccctttgcggtttttaaaccccactgcttgctgacagatttgtcacctgttataagggcagaatccattattattatcaatagtagtgatggatacttaaataataaatgcactaatctcattaagccacttatttaattaatctattttaattcatgtaattagttaatatgataatgcttcctttcatccaaagacagcctgcaggctc

SEQ ID NO: 466727 - DNA, 2788 bp, Homo sapiens
aagtagcccactccacctgggcaggaacaaacccacagccacccgaggaagagagaatgctggcaggataagggagatggggctgggagacatggtggagtggccaggccgggagtggctgcagggtttgagcctgggcccagcaggtctggcaggtcaccccaggggtctcctgcttgctcctgagccagtgtctgtgagagctgggtggcaaggccagcgggaggctgagggacccagggcccgggcatgtgggaagcgagggcggcctctccttggttcctcggcagcctggaccctcaccccctgcaaggtcctggtggccaccgcttgcagggccgtccctctggcagtgggcaggggggctgggggacactgggaagaccttcacccctccgaaggcaaggcctggtcacgttcatcctccatccctttcccgcctggactcctcctgtgtgctgggagcacttggccgtgtgagaacagggcagcatggtggacgggccagcatggcacggcgagttgagataagaggaaggcatctgtctcctgctcatccctgggcaatggaatgtcttggtgtaaagcctgattgtatatgccatctactgagataggagaaaactgccttagggctggaggtgggacatgctggcggcaatactgctctttaaggcattgagatgtttatgtatatgcacatcaaaagcacagcacttttttctttaccttgtttatgatgcagagacatttgttcacatgttttcctgctggccctctccccactattaccctattgtcctgccacatccccctctccgagatgtctctcgttccacctgaggagaaatgcccacagctgtggaggcgcaggccactccatctggtgcccaacgtggatgcttttctctagggtgaagggactctcgagtgtggtcattgaggacaagtcaacgagagattcccgagtacgtctacagtgagccttgtggggcacgatgcactgcggaaagccacagggacctctgcccgagaaagcctgggtattgtccaaggcttccccccactgagacagcctgagatacggcctcgtgggaagggaaagacctgaccgtcccccagcccgacacccgtaaagggtctgtgctgaggaggattagtaaaaggggaaggcctcttgcagttgagataagaggaaggcctccgtctcctgcatgtccttgggaatggaatgtcttggtgtaaaacccgatagtacattccttctattctgagagaagaaaaccaccctgtggctggagggtgaaggtactctacagtgtggtcattgaggacaagttgacgagagagtcccaagtacgtccacggtcagccttgcgacatttaaagttctacaatgaactcactggagatgcaaagaaaagtgtggagatggagacaccccaatcgactcgccagtctacaggtgtatccagcagctccaaagagacagcaaccagcaagaatgggccatagtgacgatggtggttttgtcaaaaagaaaagggggggatatgtaaggaaaagagagatcagactttcactgtgtctatgtagaaaaggaagacataagaaactccattttgatctgtactaagaaaaattgttttgccttgagatgctgttaatctgtaactttagccccaaccctgtgctcacggaaacatgtgctgtaaggtttaagggatctagggctgtgcaggatgtaccttgttaacaatatgtttgcaggcagtatgtttggtaaaagtcatcgccattctccattctcgattaaccaggggctcaatgcactgtggaaagccacaggaacctctgcccaagaaagcctggctgttgtgggaagtcagggaccccgaatggagggaccagctggtgctgcatcaggaaacataaattgtgaagatttcttggacatttatcagtttccaaaattaatacttttataatttcttacacctgtcttactttaatctcttaatcctgttatctttgtaagctgaggatatacgtcacctcaggaccactattgtacaaattgattgtaaaacatgttcacatgtgtttgaacaatatgaaatcagtgcaccttgaaaatgaacagaataacagtgattttagggaacaaaggaagacaaccataaggtctgactgcctgaggggtcgggcaaaaagccatatttttcttcttgcagagagcctataaatggacgtgcaagtaggagagatattgctaaattcttttcctagcaaggaatataatactaagaccctagggaaagaattgcattcctggggggaggtctataaacggccgctctgggagtgtctgtcctatgtggttgagataaggactgagatacgccctggtctcctgcagtaccctcaggcttactaggattgggaaaccccagtcctggtaaatttgaggtcaggccggttctttgctctgaaccctgttttctgttaagatgtttatcaagacaatacatgcaccgctgaacatagacccttatcaggagtttctgattttgctctggtcctgtttcttcagaagcatgtcatctttgctctgccttctgccctttgaagcatgtgatctttgtgacctactccctgttcatacacccctccccttttaaaatccctaataaaaacttgctggttttgtggctcaggggggcatcatggacctaccaatacgtgatgtcacccccggtggcccagctgtaaaattcctttctttata

SEQ ID NO: 466728 - DNA, 1739 bp, Homo sapiens
aagtagcccactccacctgggcaggaacaaacccacagccacccgaggaagagagaatgctggcaggataagggagatggggctgggagacatggtggagtggccaggccgggagtggctgcagggtttgagcctgggcccagcaggtctggcaggtcaccccaggggtctcctgcttgctcctgagccagtgtctgtgagagctgggtggcaaggccagcgggaggctgagggacccagggcccgggcatgtgggaagcgagggcggcctctccttggttcctcggcagcctggaccctcaccccctgcaaggtcctggtggccaccgcttgcagggccgtccctctggcagtgggcaggggggctgggggacactgggaagaccttcacccctccgaaggcaaggcctggtcacgttcatcctccatccctttcccgcctggactcctcctgtgtgctgggagcacttggccgtgtgagaacagggcagcatggtggacgggccagcatggcacggcgagttgagataagaggaaggcatctgtctcctgctcatccctgggcaatggaatgtcttggtgtaaagcctgattgtatatgccatctactgagataggagaaaactgccttagggctggaggtgggacatgctggcggcaatactgctctttaaggcattgagatgtttatgtatatgcacatcaaaagcacagcacttttttctttaccttgtttatgatgcagagacatttgttcacatgttttcctgctggccctctccccactattaccctattgtcctgccacatccccctctccgagatgtctctcgttccacctgaggagaaatgcccacagctgtggaggcgcaggccactccatctggtgcccaacgtggatgcttttctctagggtgaagggactctcgagtgtggtcattgaggacaagtcaacgagagattcccgagtacgtctacagtgagccttgtggggcacgatgcactgcggaaagccacagggacctctgcccgagaaagcctgggtattgtccaaggcttccccccactgagacagcctgagatacggcctcgtgggaagggaaagacctgaccgtcccccagcccgacacccgtaaagggtctgtgctgaggaggattagtaaaaggggaaggcctcttgcagttgagataagaggaaggcctccgtctcctgcatgtccttgggaatggaatgtcttggtgtaaaacccgatagtacattccttctattctgagagaagaaaaccaccctgtggctggagggtgaaggtactctacagtgtggtcattgaggacaagttgacgagagagtcccaagtacgtccacggtcagccttgcggtaagcttgtgtgcttagaggaacccagggtaacgatggggcaaactgaaagtaaatatgcctcttatctcagctttattaaaattcttttaagaagagggggagttagagcttctacagaaaatctaattacgctatttcaaacaatagaacaattctgcccatggtttccagaacagggaactttagatctaaaagattgggaaaaaattggcaaagaattaaaacaagcaaatagggaaggtaaaatcatcccacttacagtatggaatgattgggccattattaaagcaactttagaaccatttcaaacaggagaagatattgtttcagtttctgatgcccctaaaagctgtgtaa

SEQ ID NO: 466729 - DNA, 3953 bp, Homo sapiens
  misc_feature (593)..(593): n is a, c, g, or t
  misc_feature (821)..(821): n is a, c, g, or t
tacacatacaataggaattctctataattcccaaggacaggccataattgaaagaactaatagaacactcaaagctcaattggttaaacaaaaaaaaggaaaagacaggagtataacactccccagatgcaacttaatctagcactctatactttaaatgttttaaacatttatagaaatcagaccactacctctgcagaacaacatcttactggtaaaaggaacagcccacatgaaggaaaactgatttggtggaaagataataaaaataaaacatgggaaatggggaaggtgataacgtgggggagaggttttgcttgtgtttcaccaggagaaaatcagcttcctgtttggatacccactagacatttaaagttctacaatgaactcactggagatgcaaagaaaagtgtggagatggagacaccccaatcgactcgccaggtaaacaaaatggtgatatcagaagaacagaaaaagttgccttccatcaaggaagcagagttgccaatataggcacaattaaagaagctgacacagttagctaaaaaaaaaagcctagagaatacaaaggtgacaccaactccagagantatgctgcttgcagctctgatgattgtatcaacggtggtaagtcttcccaagtctgcaggagcagctgcagctaattatacttactgggcctatgtgcctttcccacccttaattcgggcagttacatagatggataatcctattgaagtagatgttaataatagtgcatgggtgcctggccccacagatgactgttgccctgcccaacctgaagaaggaatgatgangaatatttccattgggtatccttatcctcctgtttgcctagggaaggcaccaggatgcttaatgcctacaacccaaaattggttggtagaagtacctacagtcagtgctaccagtagatttacttatcacatggtaagtggaatgtcacagataaataatttacaggacccttcttatcaaagatcattacaatgtaggcctaaggggaaggcttgccccaaggaaattcccaaagaatcaaaaagcccagaagtcttagtctgcggagaatgtgtggctgatactgcagtgtagtacaaaacaatgaattttgaactatgatagactgggtcccttgaggccaattatatcataactgtacaggccagactcattcatgttcacaggccccatccatctggcccattaatccagcctatgacggtgatgtaactgaaaggctggaccaggtttatagaaggttagaatcactctgtccaaggaaatggggtgaaaagggaatttcatcaccttgaccaaagttagtcctgttactggtcctgaacatccagaattaggaagcttactgtggcctcacaccacattagaatttgttctggaaatcaagctataggaacaagagatcgtaagtcatattatactatcaacctaaattccagtctgacaattcctttgcaaaattgtgtaaaactcccttatattgctagttgtaggaaaaacatagttattaaacctgattcccaaaccataatctgtgaaaattgtggaatgtttacttgcattgatttgacttttaattggcagcaccgtattctactaggaagagcaagagagggtgtgtggatccttgtgtccatggaccgaccatgggaggcttcgctatccatccatattttaacggaagtattaaaaggaattctaactagatccaaaagattcatttttactttgatggcagtgattatgggcctcattgcagtcacagctactgctgcggctgctggaattgctttacactcctctgttcaaactgcagaatacgtaaatgattggcaaaagaattcctcaaaattgtggaattctcagatccaaatagatcaaaaattggcaaaccaaattaatgatcttagacaaactgtcatttggatgggagaggctcatgagcttggaatatctttttcagttacgatgtgactggaatacatcagatttttgtgttacaccacaagcctataatgagtctgagcatcactgggacatggttagatgccatctgcaaggaggagaagataatcttactttagacatttcaaaattaaaagaattttttttttctttgagacagagtctcgctctgtcgcccaggctggagtgcagtggcgtgatctcagctcactgcaagttccgcctcctgggtttacaccattctcctgcctcagcctcccaagtagttgggactacaggagcccaccaccatgcctggctaattttttttgggtttttaatagagatggagtttcaccgtgttagccaggatggtctcgatctcctgaccttgtgatctgcccaccttggcctcccaaagtgctgggattacagtcgtgagccaccgtgcccagccaagaaaaaatttttgaggcatcaaaagcccatttaaatttggtgccaggaacggagacaatcgtgaaagctgctgatagcctcacaaatcttaagccagtcacttgggttaaaagcatcagaagtttcactattgtaaatttcatattaatccttgtatgcctgttctgtctgttgttagtctacaggtgtatccagcagctccaaagagacagcaaccagcaagaatgggccatagtgacgatggtggttttgtcaaaaagaaaagggggggatatgtaaggaaaagagagatcagactttcactgtgtctatgtagaaaaggaagacataagaaactccattttgatctgtactaagaaaaattgttttgccttgagatgctgttaatctgtaactttagccccaaccctgtgctcacggaaacatgtgctgtaaggtttaagggatctagggctgtgcaggatgtaccttgttaacaatatgtttgcaggcagtatgtttggtaaaagtcatcgccattctccattctcgattaaccaggggctcaatgcactgtggaaagccacaggaacctctgcccaagaaagcctggctgttgtgggaagtcagggaccccgaatggagggaccagctggtgctgcatcaggaaacataaattgtgaagatttcttggacatttatcagtttccaaaattaatacttttataatttcttacacctgtcttactttaatctcttaatcctgttatctttgtaagctgaggatatacgtcacctcaggaccactattgtacaaattgattgtaaaacatgttcacatgtgtttgaacaatatgaaatcagtgcaccttgaaaatgaacagaataacagtgattttagggaacaaaggaagacaaccataaggtctgactgcctgaggggtcgggcaaaaagccatatttttcttcttgcagagagcctataaatggacgtgcaagtaggagagatattgctaaattcttttcctagcaaggaatataatactaagaccctagggaaagaattgcattcctggggggaggtctataaacggccgctctgggagtgtctgtcctatgtggttgagataaggactgagatacgccctggtctcctgcagtaccctcaggcttactaggattgggaaaccccagtcctggtaaatttgaggtcaggccggttctttgctctgaaccctgttttctgttaagatgtttatcaagacaatacatgcaccgctgaacatagacccttatcaggagtttctgattttgctctggtcctgtttcttcagaagcatgtcatctttgctctgccttctgccctttgaagcatgtgatctttgtgacctactccctgttcatacacccctccccttttaaaatccctaataaaaacttgctggttttgtggctcaggggggcatcatggacctaccaatacgtgatgtcacccccggtggcccagctgtaaaattcctttctttata

SEQ ID NO: 466730 - DNA, 1348 bp, Homo sapiens
ggacactgctgtctggaaccctacacagtgcctggcgcaagcgctggtttgtcctccggcgaggccgcatgagcggcaaccccgatgtcttggagtactacaggaacaagcactccagcaagcccatccgggtgatagacctcagcgagtgtgcagtgtggaagcatgtgggccccagctttgttcggaaggaatttcagaataatttcgtgttcattgtcaagactacttcccgtacattctacctggtggccaaaactgagcaagaaatgcaggtgtgggtgcacagcatcagtcaggtctgcaaccttggccacctggaggatggtgcagattccatggagagcctctcttacacgccctcctccctgcagccatcctctgccagctcccttcttaccgcccatgctgccagctcctctttgccaagagatgacccaaacactaatgccgtagccactgaggaaaccagaagtgagtcagagcttctcttccttccagattatctggttttgtccaactgcgagactggaagactgcaccataccagtctacccaccagatgtgatagctggtcaaactcagaccgttcattggaacaggcttcatttgatgatgtttttgttgactgcctgcagccgctcccctccagtcatttggtccacccctcatgccatggcagtggagctcaggaggtgccatcctcgaggcctcaggctgccctgatctggagtagagaaatcaatgggccacccagggaccacttgtcttcttcaccattgctggaaagttccttaagttccaccattcaggtagataaaaatcaaggttccttaccctgtggagcaaaagaactagacattatgtccaacactccacctccccgcccccctaagccaagccatctgtctgaacggcgccaagaggagtggagtacacacagtggtagcaagaagccagaatgcactctggttccaagaagaatctccctctctggtttagacaacatgagaacctggaaagctgatgtagaaggccaatccttaagacaccgagacaagcggcttagtttgaatttgccatgcaggttctccccgatgtaccccacagcttcagccagtatcgaagacagctatgtgcccatgagcccccaggctggtgcctctggtcttggaccccactgcagccctgatgactacattccaatgaactcaggaagcatctcaagcccgttgcctgagctgcctgcaaacctggaacctcccccagtgaatagagatctcaagcctcagaggaaatgtaagcacttgaccaggcctgctgtacaggggtaggggagcaaggttcc

SEQ ID NO: 466731 - DNA, 578 bp, Homo sapiens
atacagcaagaaggtctccttattttctaagcccaggacaaactgcatttctgtctgtcaggaccatttgttgcacagtccaagatcatccctgcatggaccctttccagaaatgactgaggactcagagttgtagcctctcaggatgttaaatatgaagaaacctgtctctgccctttgtaaacattagaagggaaaattatggggaagaattatttgccctttataagggaagcggggtagagcatcaaagggaactaacatttaaaaagcatttgctgtaatgtgggataaagcaaatgagtaattgtatgatattctaattctgtcattcccagtgttgctgaaaacccatactctcagcatggaagaagataaattcagatgttaaactagaagagatgaagttaaaatcctatagtcctgattttgaattgcttatgaattgatgatgaaatgtatgttttagaacatacagtttcctgaagaacaggagggatagctggagaggggataggagggaagctggaaggggttacaaagaggcccaaataaacttttgggggtgacagatatgt

SEQ ID NO: 466732 - DNA, 1951 bp, Homo sapiens
gtacccagtgttcagctcccacttataaatggatttttaaaaagataacaacaataataatactgtgaatttttttttccaagcatttctgttcaggtagagaattagagaagtttctctcttcttcttctccaagagccatctggctggatagcttttggtggatatttcatgagaggtaccagccaaacaaggagctccagaataatctgtttgaccggatagcccagcactatgccttacttttgtttcgtgtacccaagtcccactctgaagaggcgctcttaaaaaggctgccatcacttctcagcaaagccgtgtacaccagcttctgttgctgctttccacagtcctggttcgacacgcacgaattcaagtctgacatctgtaacacaatgagcctgtggatttcaggcacctatcctagcccacagagctatgacagctgggactactcggaactagacccagagcgattccgcagagaagaattaatgttgtacagaagaagactgacaaaggggagagagttttctttgtttgctggtaagagagccttctcccagaagccagcccagagcaggaaattctaccaccctcagcaccacccagggaaggtcttcactgagaaatcacaagcagtcagcaggaaggcccgtgccttcccaccaccaagacagcctgcccccctctgcaccctcgccatctgccatctctgtgcctatggagaggtcctgctcccctcccagctccctgtcctgtcagtctactctttcccaagcccccttccttactgtatctacatattctccctgggtggcctcatttggtctggtagcttcaaataccgcccatacgccagtgacccaccttcgccctggcctctcccggaactcgtacttgtctatccaccagccttctcagccacaccaggaggatttgaggaacctcaatccagctaccctggaagagtctccgtgttagcttcagaggccatgctgccaagaatgatggccaaaccatactgcctctgccaaggtgtgctactgtgtgccagtgtgactgaggactggatgttaaaagttctactctactccttgaaaaaccagttgctcctgtcaacagtctctccaaaaactggagtccgcatacttcccatttcctccccattgctcatttccatcttgaaatctcaggcaggggtggtgcatctgcagtcgtgtgctgcctgcaaaagccctgagctgacttcaaacctcttcaacatttatgggaagagccctctgattgtgtactttctccagaactatgccagtctgcagcagcacggcaagaatgtgttgatattccacagtacggggatttccttgacagcggaagccactgactgcaccccaacgtatactgatgtcatcagcgagaccctgtgcagcatgaagaagcggaaagacaacctcaatcagttgtaccagcatcattggactgaatggaattattttgacaagcatctaaaggagctgcaagacaacttctccaggaaccacactttcctatttctggatcttttgtctgttgctgcttctggacctgaaaatgccttctcctccctcctctttgttaactgccaacatcactaattcctgctcttcctccaggaccccgcttagacgtccctcatcttgggagccttccctaatataccaggagcaagtgttgctgaaaacccatactctcagcatggaagaagataaattcagatgttaaactagaagagatgaagttaaaatcctatagtcctgattttgaattgcttatgaattgatgatgaaatgtatgttttagaacatacagtttcctgaagaacaggagggatagctggagaggggataggagggaagctggaaggggttacaaagaggcccaaataaacttttgggggtgacagatatgt

SEQ ID NO: 466733 - DNA, 1077 bp, Homo sapiens
ctggtgcagggcccacagtccatgatccaagccatcaacagtgaacagacagccgactggccccacaaggcccggcagcagcccacggaccggttacctctcagccaaggtgaagtccccatccttcaaggcccggcaccttcctcagggggttcacctgggcaaaggcatcgctgtgctgctggcctgcaggaaagatcagagagttatagccctgcctcctccactgaattgtgctccagctgcatctctgtatgccagccagaccagcaaacgctggagctcaggctgaaaggccgtgtgttgccaagccacgaactcatccacacgggcacgtgcgtgcgggtctggcgggcaccagtgcgatggtgcgctgtacttgcggcacaggtagtaaaggatggccgcgctgcagaaggggccggtcaggggcactgcccttgccttcctgagtgccactacgtcaaccaccccggcattccttgacttgtagacttgttttaaaatgtacccgggattttggctttattcaggggagtgtcttggtttattggtttatattcataaagaggtactgaaggaagcagggactttccctccctgtgtgtgccaggttgctccccttcattagttcaaagtcccccattagatgacccccacaatctgtctagtcatttccactgtgcagtagtgccaatatttatgtttcatatttgatttatttgttattggcattcagaagtcccctttcgtacccgattgcaccatgggcatggatcacagtgagcacatatctcaagtctgtataaacagtcaaggccttgtcctttcttcatgccagggctctggttaaggctattatctgagtctttggggctgaagtttgggcagggaagcttttggcctctatggttttccatagggagagaaccacatatcctgcccttctttcgctcttccgtgaagctatggccatctacaaaccctatgtcttcctttcctttttcaaccacatctctgctacagagaaccttgaaggtcatttctactaaatgcaagcggttaatattaggaact

SEQ ID NO: 466734 - DNA, 5668 bp, Homo sapiens
acctgctgaaactcagcctgctgggacgagtcttctttcccccttcttgtttctgccatggaagtgtgtggacagccccattcatgatgacatgtgacactactggcttttcccggcagtcacaccccctgacccagggcctgccagcttggttcctaacccccatgaatccacaaccataaccatggccacgcgggtcgaggtgggctccataacgcccttgacggccgtgccaggcctgggtgagatgggcaaggaggagaccctgacgaggacctacttcctccaggccggcgaagcctctggggctcccccagcccggatcttggaagcgaagagccccctgcggagcccggcccggttactccctctgccaaggctcgcccccaaacccttctcgaaggagcaggacgtgaaatctcctgtcccgtctctgcggcccagttcgactggaccttccccctctggggggctctctgaggagccagcagcaaaggatctggacaacaggatgcccggcttggtggggcaggaggtgggcagtggggagggcccgaggacgagctcgcccctcttcaacaaggctgtgttcctgcggcccagctccagcaccatgattctcttcgaaaccaccaaaagcggccccgctctggggaaggcggttagtgagggggcggaggaggccaagctaggtgtgtccggctcccggcctgaggtggctgccaagcccgccctgcccacccagaagcctgcggggacccttccccggtcagctcccctgtctcaggacacaaaaccacctgtaccccaagaggaggcaggccaagaccatcctccctcaaaggccagcagtgtggaggacacggcacgcccccttgtggagcccaggcctcgcctgaagagaaggcccgtgtctgccattttcacggagtccattcagcctcagaagccaggccccggcgcagcggccacagtgggcaaagtgccacccacccctcccgagaagacgtgggtgaggaagcccaggcccttgtccatggacctcacggcccggtttgagaacaaagaggccttgctgaggaaggtggccgatgaaggaagtggacccacagcaggggatatggctgggctagagaggcccagagcagcgtccaagctggacagggactgtttggtcaaggcggaggctcctcttcatgatcctgatttggacttcctggaggtggccaagaaaatccgtgaacggaaggagaagatgctttcgaagccggagatgggcagccccagagccctggtggggggctcatctggggtcacccccagcaatgaccagagtccctgggaagaaaaggccaagctggacccagagccagagaaggctgctgagtccccctcacccaggctgggaaggggcctagaacttgctgaggttaagagcagagtggcggatggggaggccgcggcagggggagagtgggcctccaggaggagtgtcaggaagtgcatcagcctgtttcgggaggacagcaccttggccttggcagtggggtctgaatctcccctggccacccctgcgtccccatcggcggcaccagagccggagaaaggggttgtgagcgttcaggaacggatcagaggctggactgccgagagctcagaggctaagcccgaggtcaggaggaggacgttccaggctcggccgctgtcggcggatttgaccaaattctttgaactaaacacgtgctacatcttcagcaacgaagtcaaatatgagaagagtgctgagctgagcggcgagtttcctaaggaaccgagagaaaagcaaaaggaggggcacagtttggatggagcatgcatcccgagaagcccctggaagcctgggacactccgggataagtccaggcagacggagcagaaggttagctctaaccaagaccccgacagctgtcgcggtggaagctcagtggaggccccgtgcccttctgacgtcactccagaggatgaccggagcttccagactgtgtgggccacagtatttgagcaccacgtggagagacacacagtggctgaccagtcgggacgttgtctctccaccacaccccctggtgacatggcccatgcccgtgtctcagaacccaggccgaggcctgagatgggctcttggctgggcagggacccaccagacatgacaaaactgaagaaagagaactccagagggtttgacaatcccgagacggagaaattgggaccaaccacccttttgaatggtgaactgagaccgtatcacacgcctctccgggacaaataccctttgtctgaaaaccacaataataacaccttcctcaaacacttggaaaatcctcccacatcgcagagaattgagcccagatatgacattgtgcatgcagtgggagagcgtgtgcacagcgaggccatctcaccggcaccggaggagaaagcggtcacgctccgcagcctcaggtcttggctctcactgaaggacaggcagctgtcccaggaggtcacccctgctgacctggagtgtggtttggaaggtcaggcggggtccgtccaaagggccagtttgatttgggaagctcgaggcatgcctgaggctagtggaccgaagtttgggggcaattgcccgtttcccaaatggacaggcggggcagtggtgagctcgcacaaagccaccgtggcagtcagcgaagagcactgtgctcccggggccacctccgtcagggctatcaaggctgccatctgggaaagccagcatgaggggccagagggggccagaagcaagccaggagtgggagcaaggggcccaccccagggatgccccctcgatcctctttccagggctacgaatgggccttctgactcccaagcacgaacacatccagatgcatttgctgtgcagaaagggcccttcattgtagccgccagggagggtgatccagggccggcccaggtgccacagcctgcagtcagaatgcggaaagccggcgccatggaccagagaatggacagatggcggcggcggactttaccccccaacgtgaaatttgatacattcagttctcttgtcccagaggactctccacatgtggggcacagacgaacagattatgtgagccccacagccagtgccttaagaaaacctcaactatcccactacagggtggagacccaggaggtgaacccaggtgcttcacgggaccagacttccccagcagtgaagcaagggtcacctgtggaacccaaggcgacattttttgcagtcacctatcagattcccaatactcaaaaggcaaagggtgtggttctgtcaggagctgaaagcttgctggaacattctagaaaaatcactccaccctcgtctcctcattctttaacatccactttggtttctcttggtcatgaagaggcattggagatggcaggcagtaaaaactggatgaagggacgagagcatgaaaatgcaagcattttaaaaactctgaagccaacagaccgtccatcatctcttggggcctggagtctggaccctttcaatggaagaatcattgatgtggatgccttatggagtcatcggggatcagaagatggccctcgtcctcaaagcaattggaaggaaagtgcgaacaagatgtcccccagcggcggagctccccaaaccaccccgactctgaggagtcgtccaaaagatcttcctgtgagaaggaagactgatgtgatcagtgacacgttcccaggtaaaatcagagatggctacagatccagcgttcttgacattgacgccctgatggcagagtaccaggagctgtcgctgaaagtccctggggaggctcaggagaggaggagtcccaccgtggagcccagcaagcagctggcagagaccttggagacagccatgggcaccaaatctagccctcccttctgggctctgccaccctcggctccttctgaaaggtatccagggggctctcctatacctgcggatcccaggaaaaaaacggggtttgctgaggatgacagaaaggcctttgccagtaaacatcatgttgcaaagtgtcagaattacctggctgagtcaaagccctctggtcgggaggatccaggcagtggggtcagggtgtcacccaaatcgccccccactgaccagaagaaagggaccccaaggaaatccaccgggcggggagaggaggacagtgtggcccagtggggtgaccacccacgtgactgtggacgggtgccgctggatatcaagagggcctactcagagaaggggccccctgccaacatccgagagggcctgtccatcatgcatgaagccagagagaggaggcgagagcagcccaaagggaggcccagccttactggagagaatttggaggccaaaatgggaccctgttggtgggagtcagggactggagacagtcacaaggtgctgccacgggacctggagaaggaggatgccccccaggagaaggagcgaccgctccagcaggtgtcccctgtggcctcggttccctggagaagccacagcttctgcaaagacaggaggagtgggccctttgtgccaaggggtgtcagaaaggccctggcgggcccctgtgtttatggcaacagtcattcagtagggcagccgcgagcgctgcatgccccacttctattaatccctcagttagcggggcctaaccccagacttgacactcatcagccagtcagccaggacacgcagcgccaggggtacagccaggcagctggcatcatccctccagcggtgccgccagtgcagaggaaccagcccttttgctgcacttttgtcggtcagcaggacccagtgctctggctatgctgtcagctggggctgtcctctgactggtactgtcagctgctgggttcagaaggatccacccctggacccgccccactggacgagaagccagagatgccccgggcggggctcataggaccgagtggtggcttctcagttccccaggcagccgtggccattagtggagccgactggctggtcccctggccaggaaagctggaaaccgtactgtgctcaccacataacctctgggtgctggaaatggagtattactactgccccagcctgctgaagctcttgcgctacctctgggaagagctgagactcctgaacaggaatgaagatcctggatccgatgtgggctttcctccagtcctcaagaaaacaggaagaacgagaaccacttcaacttaccgaatgcctccagtgtgccagggacagggggcaatagcagagactaagacatagaagatttctgttcttataagccttccttagagggacagtaataaataaacaattagggaaataccaagtaattgtaattattaaagtttttcttctctgcacagtggggatgcttgttttgttcccatgagttggtcagagcatatgttaccaccactggtaagaagggtaccgtttttctccccttttaaaggcagagaagggtctgattgcccccagaaccaccgggtggcccagggagataagtcaggcaggggaattaggtgggggcctgccgcctgcctttttccattttagagaaggccagggtttgcagccttgtaagaggcctggctcttggaagaggggctgtaattacag

SEQ ID NO: 466735 - DNA, 553 bp, Homo sapiens
cacagtcattcaaaaggacagccacgttggagctctgccgtgtttggtgatgaaagtatgggcaagggctttacagatgtaatcaaattaagatggggccatactggagtattaggcctaatttaatgactggtgtccttataagaagagggaaatttgtacacacacagaaggagaacaccatgtgaagctggaggcagagattggagtgacacgcctacaaactgaggggcaccaaagaccaccagcaaccaccagaagctggaagaggcatggcacagatgaccacaagagcctccagaaggaaccaaccatgctgacgccttgattttggacttccagcctctcaaattgtgagcaaataaatttttgttgttttaagctacccagttgtggtacactgttatggtagcctgatatagtttggctgtgtccccatgcaaatctcatcttgaattgtagctcccataattcccacatgttatgagagggatccggtgggaggtaattgaagcatggagaaaggtctttcccatgctgttctcatgatagc

SEQ ID NO: 466736 - DNA, 364 bp, Homo sapiens
gcaaactccgcctcctgggttcaagtgattcttctgcctcagcctcctgagtagctgggattacagggacaggaatcagatgggcatagggcatctggtccatgatcatcctttgttcgtgctgatctctgatgaaatatctgaagaagaaggagaacaccatgtgaagctggaggcagagattggagtgacacgcctacaaactgaggggcaccaaagaccaccagcaaccaccagaagctggaagaggcatggcacagatgaccacaagagcctccagaaggaaccaaccatgctgacgccttgattttggacttccagcctctcaaattgtgagcaaataaatttttgttgttttaagcta

SEQ ID NO: 466737 - DNA, 958 bp, Homo sapiens
ctgaaatccagtggggcagtcaaatcttaaagctctgaaatgatctcctttgacaccatgtctcacatccaggtcacactgatcctggacttcatcatccatttcactaccagcattttggtcaaaggaattcaacaagttgctaggaagttacaaactttctcactgttccaacctctgcctgttacccagtttcaaagttgcttcaacatttttgggtatctttatagcagcacccgactctctgtggtactaatttactgtattagtctgtttacatactgctataaagaactgcctaagactagagttaatgaggttggctctgcattcttgatgccatctgtgtcagcaagtaaattgcttggcaatgaaaccatttatcattgtgaacatgtggatggtaagagaagattcccaatgggacttgcaaaataggacttcttcattgatagtgtttgtaaagatgttaatttgctttatttctgtataaaacagtgtcttagctctcatgcctccaattccataagggcaaaaaacttaatcttgcaaaaccaagtatgctcagccaagtctagtttaatactcagtctctttgggacaaatacacaattaactcaagatgcttagcttctcctttttcctttgtttctcctcaagggacaggaatcagatgggcatagggcatctggtccatgatcatcctttgttcgtgctgatctctgatgaaatatctgaagaagaaggagaacaccatgtgaagctggaggcagagattggagtgacacgcctacaaactgaggggcaccaaagaccaccagcaaccaccagaagctggaagaggcatggcacagatgaccacaagagcctccagaaggaaccaaccatgctgacgccttgattttggacttccagcctctcaaattgtgagcaaataaatttttgttgttttaagcta

SEQ ID NO: 466738 - DNA, 1126 bp, Homo sapiens
ctgaaatccagtggggcagtcaaatcttaaagctctgaaatgatctcctttgacaccatgtctcacatccaggtcacactgatcctggacttcatcatccatttcactaccagcattttggtcaaaggaattcaacaagttgctaggaagttacaaactttctcactgttccaacctctgcctgttacccagtttcaaagttgcttcaacatttttgggtatctttatagcagcacccgactctctgtggtactaatttactgtattagtctgtttacatactgctataaagaactgcctaagactagagttaatgaggttggctctgcattcttgatgccatctgtgtcagcaagtaaattgcttggcaatgaaaccatttatcattgtgaacatgtggatggtaagagaagattcccaatgggacttgcaaaataggacttcttcattgatagtgtttgtaaagatgttaatttgctttatttctgtataaaacagtgtcttagctctcatgcctccaattccataagggcaaaaaacttaatcttgcaaaaccaagtatgctcagccaagtctagtttaatactcagtctctttgggacaaatacacaattaactcaagatgcttagcttctcctttttcctttgtttctcctcaagggacaggaatcagatgggcatagggcatctggtccatgatcatcctttgttcgtgctgatctctgatgaaatatctgaagaagaaggagaacaccatgtgaagctggaggcagagattggagtgacacgcctacaaactgaggggcaccaaagaccaccagcaaccaccagaagctggaagaggcatggcacagatgaccacaagagcctccagaaggaaccaaccatgctgacgccttgattttggacttccagcctctcaaattgtgagcaaataaatttttgttgttttaagctacccagttgtggtacactgttatggtagcctgatatagtttggctgtgtccccatgcaaatctcatcttgaattgtagctcccataattcccacatgttatgagagggatccggtgggaggtaattgaagcatggagaaaggtctttcccatgctgttctcatgatagc

SEQ ID NO: 466739 - DNA, 794 bp, Homo sapiens
taacaggagtgtctacctcacagggcggctgctggcatatcacagagatgaggttctcaaaatgcaaagcagaaggtccagccaagagtcggtgcccaaggcaacaaagacaggaggagactcctcggccatcctgatttacctgagctgtaagtaccagacgccggaccactggtatccatctgacctgcaggctcgtgcccgtgttcatgagtacctgggctggcatgccgactgcatccgtggcacctttggtatacccctgtgggtccaggtgttggggcccctcattggggtccaggtgcccgaggagaaggtggaacgcaacaggactgccatggaccaggccctgcaatggctggaggacaagttcctgggggacaggcccttcctcgctggccagcaggtgacactggctgatctcatggccctggaggagctgatgcagccggtggctctcggctatgaactgtttgagggacggccacgactggcagcatggcgtggacgagtggaggctttcctgggtgctgagctatgccaggaggcccacagcatcatcttgagcatcctggaacaggcggccaagaaaaccctcccaacaccctcaccagaggcctatcaggctatgctgcttcgaatcgccaggatcccctgaagggtctgggatgggggccaggagattagcaacaaggattcattctgttacttacttgcccctttttatctttccctcttgccccagtcccttctctccagcttcatgtgaagctctgcacagacaagacactcag

SEQ ID NO: 466740 - DNA, 918 bp, Homo sapiens
cgcgctcagcgccttcactgccatccccgctgtccttgccgccccgccatgggcctagagctgtttcttgacctggtgtccagcccagccgcgccgtctacatcttcgccaagaagaatggcatccccttagagctgcgcaccgtggatttggtcaaagggcagcacaagagcaaggagttcttgcagatcaacagcctggggaaactgccgacgctcaaggatggtgatttcatcttgaccgaaagctcggccatcctgatttacctgagctgtaagtaccagacgccggaccactggtatccatctgacctgcaggctcgtgcccgtgttcatgagtacctgggctggcatgccgactgcatccgtggcacctttggtatacccctgtgggtccaggtgttggggcccctcattggggtccaggtgcccgaggagaaggtggaacgcaacaggactgccatggaccaggccctgcaatggctggaggacaagttcctgggggacaggcccttcctcgctggccagcaggtgacactggctgatctcatggccctggaggagctgatgcagccggtggctctcggctatgaactgtttgagggacggccacgactggcagcatggcgtggacgagtggaggctttcctgggtgctgagctatgccaggaggcccacagcatcatcttgagcatcctggaacaggcggccaagaaaaccctcccaacaccctcaccagaggcctatcaggctatgctgcttcgaatcgccaggatcccctgaagggtctgggatgggggccaggagattagcaacaaggattcattctgttacttacttgcccctttttatctttccctcttgccccagtcccttctctccagcttcatgtgaagctctgcacagacaagacactcag

SEQ ID NO: 466741 - DNA, 8213 bp, Homo sapiens
tctgatgattgttttatatagctgttgcaaagagttaattcattctttccttaaagattccaaatctatgcaagacggctggggggagagtgacgggccagtcacaggagctcgccatcccagctgggaagaggaggaggatggaggagtctggaacaccactggctctcagggcagtgcttcctcccacaactcagcaagctggggacaaggaggaaagaaacaaatgaagtgctcactcaaaggaggaaacaatgattcatggatgaatcctcttgccaaacagttttcaaatatgggattgctgagtcagactgaagataatccaagcagcaaaatggatttgtctgtaggaagcctttcagataaaaaatttgatgtggacaagcgagcgatgaatctcggggattttaatgatatcatgaggaaggatcgatctgggttccgtccacctaattccaaagacatgggaaccacagatagtgggccttattttgagaagggcggtagtcatggtttgtttggaaacagcacagcacaatcgagaggtctgcacacacccgtgcagccactaaattcttctcccagtctccgggcgcaagtgcctccccagtttatttccccccaggtttctgcctcaatgctcaagcagtttcccaacagtggcctgagtccaggtcttttcaatgtggggccccagttatctcctcaacaaattgccatgctgagccagcttccacaaattccccagtttcagttggcatgtcagcttctcttgcagcagcagcaacagcagcagttgttacagaaccagagaaagatttctcaagctgtacgccaacagcaagagcagcagctggctcgaatggtgagtgcactgcagcagcagcagcagcagcagcagaggcagccaggcatgaagcactcgccctctcatcctgttgggcccaagccgcatctggacaacatggtacccaacgcattgaatgtggggctcccagaccttcaaaccaaagggccaatacctggatatggttctggcttcagctctggcggcatggactatggcatggttggtgggaaggaggctggaaccgagtctcgctttaaacagtggacctccatgatggaggggctgccctctgtagccacacaggaagccaatatgcacaaaaatggcgctatagtggcccctggtaaaacccggggagggtcaccgtacaaccagtttgatatcatccctggtgacacactgggtggccatacgggtcctgctggtgatagctggttacctgccaaatctccaccaacaaataaaatcggaagtaaatccagcaatgccagttggcctccagaattccaaccaggagtgccatggaaaggtatccaaaacattgaccctgaatctgacccctatgtcaccccaggaagtgtgctggggggtacagccacatctcccattgtagatactgaccaccaactgctgcgggataacaccacagggtctaattcttccctcaacacctcgctgccttcacctggtgcctggccctacagtgcctctgacaactcctttaccaacgttcatagcacttcagcaaagttccctgattacaaatcaacatggtccccagatcccataggacacaaccccactcatctctccaacaagatgtggaaaaaccatatttcctccaggaacactacaccgctgccccgcccacctcctggtctgaccaaccccaaaccatcatctccctggagcagcacagcaccccgatcagtcagggggtgggggacacaggactcacggctcgcctcggcctctacctggagtgatggtggctcagttcgtcctagttactggctggttcttcacaatctcaccccacagattgatgggtcaaccttgagaacgatctgcatgcagcatggcccactgctgacattccatctgaatctaacccagggcactgccctgatccgatacagcaccaaacaggaggcggccaaggcccaaactgcactgcacatgtgtgtgttgggaaacactaccatccttgctgagtttgccactgatgatgaagtcagccgctttctggcacaagctcagccccctacacctgcagcaaccccaagtgcgccagctgcggggtggcagtcgctggagaccggccagaaccagtcagatcccgtgggacctgctctgaatctttttggtgggtccactgggctcgggcagtggagcagcagcgctggtggcagcagcggggccgatcttgctggcgcttcattgtgggggcccccaaactattcttctagcttatggggagtcccaacggtggaagatccccataggatgggcagccctgctcctttactacctggtgaccttctgggaggagggtcggattcaatctgaacttagaactttcaactctgacctcgtgaccttttttggaacagcagcagcactaacttgaccttttcgttttttttttcaacttgcaataaatacatttttaaaaggaaaaaagaaaacggagagaaaaaaaggtgggtcattgacagactgtctgagcacatagttgcctcccttataacttcagttttttcgtttggaatatgaatccaaaaagagaacatatcactcttgaaatacttgaatcatgaacgccaacctagaaagacaatgtgaagcaagtacacataccatttaaatttaaacacaaaaaaattaaaaaaattagtttctagtttttcacttttttcatgttatatggaagttgttgctaagaaacatatatactgaaaaaaaatagctttttaactttgtttgcactgggtgtgtttccgtccttaggtctaccatgtttgggagggagggaaattcaaaagaattgttgggggaggggggagggaagacttgacggagcctcactttaaaaacaaaaacacaaaaaacctaaaaaaaaaaaaaaggaaaaaatttgtgattggctggttgataaataccagtgtgttctggcacatgtaactgcccaggcatgctcgttctggtgtgtgtgtgcacgtgtgttcatgtgcattcgcgtgcatccttctctgtctctgtgtgtgtgcctgtgttcttcccttctcccctgccccaccctgacttctcagaaagctgcatcgctgacagtctgcaggctggctggccggcccatctgctttttattttatttttttaactatgagaacacacaggcccggagagccactgctactaaagcaactccattgggctgcattaagatgaacagagtgctttttaatgatgaaagcagggagctcctttccatttgcaacttagcctgaatgtggggtttctctggctgttcttttgacctagcagtagagtggagcactgccaagtccaaaaaactagagcaggaggtacctcttggagcaacggtgtgtttatttctgtttttttttttttttaagtgaatggccaccaggcacatctgagtatctgttaagtttcatgcaggccttttcgttagtttgaaatgggaacggaagataacttttgatgatgcgatgtctcaaaaacagagaaactttgttccctctttccttatgatcaggtttgagaaattcttcaaaaaattaggtgaagttgagttacatatttctgttggttggttctctttttcattttatgaaaacagaaaagaataagtggtgagcagcctcctgaaagcatctgcagctactccctctgctcctttctcgccgagcgttacctgtgccaggccgtggcgcgttacagcaccaggccatcactgacagaaacgtttacttaacgaatgttcttaaaccagtgtgtacttcaagcgtttccttttgtttctctgtgttgtgtatttcctgtgtatgtggttttgcttaggcaggtataacttagcgaagacttttaagtattgcacctttttttgatttttgacctcttccccccaccttgtaattttgcttttttaatttcggtatttaaatacttttttttttttttaagcatcaatgtagtagtactctgggccgaacaggggtcaacgtttaatctacagttatcaccaacatgtatgtacttatgtcggaatcaaaatgtatcaaactgcttattgtgaagagaattatagcagacctgaagggggcgaaaaaccagatagggtggggggatggatgccggtgacgtgctagcacttgtgtggacatcccagtctgcattatgctgtttaacataaagtgccgacattttgtaccagcaaatacctgcccattccaacccttggtgggagcagacctctactgtcctctgtaacttgctgctattgaggacaagggagtttttctttctttagcgtcttcagtgaaggatacaatacaacaatgcctaatgtatttgactttttagcttgtgtctgtgtgtaggtgggtgggtgggtgtgtataggaaaagcctaaaacaagttatttgcatttcagtggttttgtgagacaaagaatgggaaattctgtagcccttctggcttaccctgttgattataaacctagcctcaaaagagattgacaggcatgactcaagtgagtgttcacatatacaagcctgcatgagccctctgtgggtaggtggtcacacttggcatctgcagcattgacgtggccccgctgggtgccttgagcatgccctcttcctgctctgcaatttgaatcaccaccgtgccccttccaccactgttccccatgcaaaagctctgcttccagcagcccccactgaccgctctctgtgtggagcaaagtgctgtcgtgcggtgaccaccaggtgaagagcagcttgtattcagacatctagagaaggttaaatcttagtgtccctgggccaggagcatatcccaaggctcctgcgagccagtggcgaccctgtccactgccgctcttggttcactgctgtgtcctgccccaccctcctctcctcctgcctgttggttccttgacctgcactatgggttagttgagttccttacgatactacggtgaaagccgggtgctagagcccctcttgtttacaagacataatgagggatttgaaatatgtaaaaataaacatgagaagctaaaatgttcttccatcataagcttaaagggaaaaaaactaaaaactttaaaaaaaaaagaccaaaaagtgcgtatatatatacatataaatatatattttagatgaagactaactctgggagcatttaacagtgttttttgtttctgtttttaacatttgttttcctgctttaaaatttgcaagcattctcaggaattctagggtaggaagccagttttttgaagatggtttatttaaccatatcttatcctagagagatggctgtttctttcctgttaataaacttttacaagttcctgaaacttcagaaagtttaaacaatttttacttaaaaaaatgtaaaaagaaaagtctccaaacattattgtcatactggggatcacacattttaaaacacatagaaatattttttaaaaattatcaatttagcagcaacaggtaaattcattatcttaaaaatatgggagaaggattaagctttgtaagagctcgatcatggattcttttgaaattgtgtgtagtttaatgggagagtgtttggtgtatatagatgagaatgccatcactttgttcctttccatttgagactgaactgaaatctcccctagtaatttttatttttttaaaggaacccttctccttgtccccacaaccccagcaacaaaagaaaggaaggaaggaagaaacaacagcttaaaaaaaaaagtaatctgtaaaatagtacagttggattgctgagaatctatgtaaagagttaggaaatataggttaataatttttggaacaaattttaaatataggcattactagaggaaaattatctatggactgtcctattaatgaagaatgtctgtcttacctccgtttgttttgggaggaggagaaaatatagaagaatctaataaggaacaagtgattttacttttttagctcccagctactgttgtgctcgttttaattgctgttttgaagatctgctgcttaattatccccatcccttagccggagatgtggagtgtttcctttcagtttttggtgatgttgaattcttttgtattccctcctggggccaggggtcagaattcccaagcatgaccacagcttcttttaaacattaagcttcccagtgggaaggaaactccagctcgacaggtaaagggagtgggtggggttgctgcctgcaatttctctaaaaccgctttagtgccttcgtacatacacccagacatcctgagcaagggggacgcacatgtgtgtgtgtgtggtccagtcactccacagatgtaagatactcacccataaaggaaattggagtggttctggacaggccccaaaggcagtgggctgaatttaaaataaataaacaaacgtcaagcaagttaatatgcttatgtctcagtaatgtagaatgccaagttccttcctgtgtcgtgtgccctccattactgtgcattgattcctccaggtgtgtaattgtgacaactgcagtgatttggaaagtctctttgtcttgggcaaatagaaggggttcctgttgttctgctcttgtccttcgtctcctccccttttcccccagacctcccccttctttttgtcaacttgctgggagctttgctttattggttggcagtgacctaagaacaggatatggtgaggatgtcatggaagagaagagctctttccgtggtattctttggcaagagccatgtctactaagaggttaggtgacttcagtatacttataaaattcagtgagagtgccttcttctcttctaccacactctggcatagatacaggcttgctggtcacctctcattacatagatttattttaaaaacattttgattatgttaatttgagctttcccttttttttttttaactactttttaaaacacttgattactagtggcttagaggtgtgtacatctcctgaacatcacaaacttggtttctacctaccacacgagtagccaaaagaaaagaagcactaatagagaaaggggtgtctcacaccagacagaggacctctgctgtcaattagatccagtatcatgacctaactttaagtgtggaaaagagttcagatctctgagacactgtgaagaaatggatggctcatgtaacatctctgatccctcagtccccaaccctggacgtgtttcatttacaacattcataggagttaacttagcagtgttgcaagttaaggttccaaaccaaattatttaatcagtgtccccccaataaatcacttatccatttattgctagttagttttatttatagcaacttgatttcctatgagtatggctcctgttgtaagaattttcccacctcttctgacatgaatgtagcataagttagcaatcggttcttccaaactcctgtgggttgaatatggtatagaaggtatgcaagaggaaaaagaaaggaaaagataaaactcctgcctgagaatttggaagcacctttattaacacatatatctcgcagaaactagaagctcataggctgttaactttttgcaactattcactcatttttaccacttttttttttgggtgagggggtgatttttgtaaggttaacagccagattccattttgacctcagatgctgtgtactttttaatttcattttttatattctgccatcttgactcttctctaaaacagaatgaaaatgtctgcatgctgagcaaaatgcttacgccaagcctgtttttctctgcagagtaaacaggatgttttcagcagacttggctctaatagccatctctaagattagggaacaattgagtctttatgtagaaaagatccattttttccccatcctcagagttaaaattcaacatttaaagctttatcggttattgttttagatttgagatttttgtttttaagtatctataagatctttagaagtgagataaatttttcgctggttaaaaaaaatcaaactttcctctgcagtgtttttgccaagttttgtcacacttcatgtgtatgcattaactatacttcttagtgttactgcaaaaaaaaaaaac

SEQ ID NO: 466742 - DNA, 2067 bp, Homo sapiens
aggaagaaaccagacaaaatacttctcccaggccagaggaggcggcaccctcagtctgagaagtattgatacgagcagtgaccccgggaaaagagatgacaagtgggttctaacttggacctgaaggggctggagaacaagtggggtcaggccctggtgtggcagaccgaggagatgagacttggcccatccagcagtgccaacggggcaggagagggtgactgcatggccggagaaggaagaaggaacttgctgcttcctgttcccatgagggcacttgagcaatgcttttttgccccacagcagcagcagttccttcctgtagatgcacctgaatccattttgcagttttcccaatacttggaggtccatcttcgctgcatcctcaggggtgttgacactggcccaaagctccatggaagcctcttccctttgttcccccagccctggggcagctcccacctctatagcagcatttcagtgtgtcctagcttggatgctgtggcttcccgagctctgaatctatactgcttactctgggcttatggagtgtgtagcagggaatccttgttgaaggatccccaaacccttgatagccatggacagcccacagtggtcatggagccggagccagaatgtaattcccagtgtgaccaggagctagagtttaagtcaaggcagcaggtattactgatcgaaggaaagttcagtgaagatgctggtagtttacagcactccggagaattaaaacaatgagatgtaaaggtattattgacatttacaatgcgagtcaataacctaggcaatgaatggctgggtcatatagtaggtgtatgtttagctttttaagaaactgccaaagtgttttccaaagtgattgtaccattttacattcccatcatgagagagttccatttgttaattcttggaatgttgctgactattctgaatcctttgcttttccatatgaattttagaaggtacttgtcaatttctacaaaaaaattctgctgggattttaatataaagatttcgttgaatctaaattaattggaggatgattgacatcttaatattaagtcttttcattcatgagcatggtacatctcttcacttacgtaggtttttaaaaatttctatccgcaatgttttgtagttttcagtgtacatattcaggacttgcatatttttgtcagatttattcttatgtgttcacagtttttgaaacttatatatatggaatctttttttaaaatttctatttctgattgttcctagtatgtaaaaatgtaattagtttttttatattgatcttgtattttgcagccttgttaaactcacttattaattttggtaacctttttggtaggctccatttgattttccaaataggaaagattttaatatagggaatcgaaggttcacacaaccgctggaaagtctaatgaaagaagttcaggaaggctcctattattgttgatgaaattagagtgcatattcctagaggagcagtcatgtcagctgcatgcagctatggctttagatgatctggaagctgctgcagaataggaaagtcctgcctgttgttgcctatgtgtctttttgcaactgtttctagagaatattgacttcttttctgctttccagatctaagaagggtacctctccttggtggcagctaacctggaaccctacagggaatgggattctggaaaatatagttccaggccatttcctgaagtgcagggaagatcaggagaggtggtgatggcagtttgacagtctggcactgacggtattaatagagatacataattactcagtcatggaaaagtgacttagcagtattgtgaaaaaacaggagtgttaggtggctgtaactcagtaagatgtgatttccaagaaagcaaatgacctctttaacagtattagcagcggcatatcatacgggacaagtaagtggcaggcccaccctatttggttgccttgcccggtaattggatgagggtagacaaactggaacatgtttaagggataatgatcccagtggtaaggggatagaaaacc

SEQ ID NO: 466743 - DNA, 1570 bp, Homo sapiens
tcaagtgattctcctgcctcagcctccagagtagctgggattacaggcgcacgtcaccacacctggctaatttttgtatttttagtagagacggggtttctccatgttggtcaggctggtctcgaactcctgacctcgtgatccgcccgcctcggcctcccaaagtgctgggattacaggcgtgagccaccgtgcccggccgggaggtcactttaaggagggctgtccaactgcaaggagccgcaagcaggaagtgaaaccacagcacttcaaaaaaagagggagactgggacaagcgtatctaagaggctgaacatgaatccacagatcagaaatccgatggagcggatgtatcgagacacattctacgacaactttgaaaacgaacccatcctctatggtcggagctacacttggctgtgctatgaagtgaaaataaagaggggccgctcaaatctcctttgggacacaggggtctttcgaggcccggtactacccaaacgtcagtcgaatcacaggcaggaggtgtatttccggtttgagaaccacgcagaaatgtgcttcttatcttggttctgtggcaaccgactgcctgctaacaggcgcttccagatcacctggtttgtatcatggaacccctgcctgccctgtgtggtgaaggtgaccaaattcttggctgagcaccccaatgtcaccctgaccatctctgccgcccgcctctactactaccgggatagagattggcggtgggtgctcctcaggctgcataaggcaggggcccgtgtgaagatcatggactatgaagactttgcatactgctgggaaaactttgtgtgcaatgaaggtcagccattcatgccttggtacaaattcgatgacaattatgcatccctgcaccgcacgctaaaggagattctcagaaacccgatggaggcaatgtacccacacatattctacttccactttaaaaacctactgaaagcctgtggtcggaacgaaagctggctgtgcttcaccatggaagttacaaagcaccactcagctgtcttccggaagaggggcgtcttccgaaaccaggtggatcctgagacccattgtcatgcagaaaggtgcttcctctcttggttctgtgacgacatactgtctcctaacacaaactacgaggtcacctggtacacatcttggagcccttgcccagagtgtgcaggggaggtggccgagttcctggccaggcacagcaacgtgaatctcaccatcttcaccgcccgcctctgctacttctgggatacagattaccaggaggggctctgcagcctgagtcaggaaggggcctccgtgaagatcatgggctacaaagattttgtatcttgttggaaaaactttgtgtacagtgatgatgagccattcaagccttggaagggactacaaaccaactttcgacttctgaaaagaaggctacgggagattctccagctcttcttgtagaggctctccatccacctccccagtcctgttcccccagcctgggtgcccctaacttgactcttcccatctccccagcataaccaaa

SEQ ID NO: 466744 - DNA, 975 bp, Homo sapiens
tcgattagaggatcccatcgcgtgacagcatgacggggaggaacagcctcagagatggatggatctgcaatgccatggctgggggtgttccagggcagcctgcaggggtggggctggcactgattgcaactgacagccaggagaccaggcctgggagggcaggcccagggtcaggggagagcctgagtgcttcccacctcttcatctcagactttgcatactgctgggaaaactttgtgtgcaatgaaggtcagccattcatgccttggtacaaattcgatgacaattatgcatccctgcaccgcacgctaaaggagattctcagaaacccgatggaggcaatgtacccacacatattctacttccactttaaaaacctactgaaagcctgtggtcggaacgaaagctggctgtgcttcaccatggaagttacaaagcaccactcagctgtcttccggaagaggggcgtcttccgaaaccaggtggatcctgagacccattgtcatgcagaaaggtgcttcctctcttggttctgtgacgacatactgtctcctaacacaaactacgaggtcacctggtacacatcttggagcccttgcccagagtgtgcaggggaggtggccgagttcctggccaggcacagcaacgtgaatctcaccatcttcaccgcccgcctctgctacttctgggatacagattaccaggaggggctctgcagcctgagtcaggaaggggcctccgtgaagatcatgggctacaaagattttgtatcttgttggaaaaactttgtgtacagtgatgatgagccattcaagccttggaagggactacaaaccaactttcgacttctgaaaagaaggctacgggagattctccagctcttcttgtagaggctctccatccacctccccagtcctgttcccccagcctgggtgcccctaacttgactcttcccatctccccagcataaccaaa

SEQ ID NO: 466745 - DNA, 368 bp, Homo sapiens
tcgattagaggatcccatcgcgtgacagcatgacggggaggaacagcctcagagatggatggatctgcaatgccatggctgggggtgttccagggcagcctgcaggggtggggctggcactgattgcaactgacagccaggagaccaggcctgggagggcaggcccagggtcaggggagagcctgagtgcttcccacctcttcatctcagactttgcatactgctgggaaaactttgtgtgcaatgaaggtcagccattcatgccttggtacaaattcgatgacaattatgcatccctgcaccgcacgctaaaggagattctcaggtgagggtctccctctggcctcatcgtctctctcctctcgcct

SEQ ID NO: 466746 - DNA, 851 bp, Homo sapiens
tcgtgtaagtcctgttagcctgccccaaataacctaatggaacgacaatggatgacacccctccctggggcgctcgctgcgcgcagggcgccgcgctgggcactttggagcgctctctcccggagtcccccccaccggccatccgatgccccatttcagagactggaacggggaggccggccccgcatcgccagttccgcggtgtcacccgcacccaggacagcgacgactcaatgcccgaccctcccggacgcaggaggtcgctgacggccgcttggggacggcggcgtggggaccagcgcgggccggggcagctggtacctgggatcgggcaggacggtcctcttgctggcgcgggcggccggagtcgccttgctcttctccatggccatcaggtaatgatgaagcccctgctctggtccaagctacctgtgaacagcgcccagcgggccgggcccccaacctcgctcctgaacgtacccgcaagcccgccgtgagaattcagcgaagagtaaaggctggagaaagttgcgtgtctcaggctaagcagagcaaagtggggtgagggcttcgccgctaggaacagagatgcccttagggagccccctgatggaagagctctctgcttaagaaggtcagcacgcccttacactcaggtgagaggttttagtttgggtgttgaaatagaaggagagagagtattcctgcccttagggttttacggtcaatacaagagacaattagggagcatctgctgcgagcacgctcgcaccacgagggtgatttagggaagtggaaaagcaagatacagcccaaacaccgaagctggggggtaatttccagcttcccaa

SEQ ID NO: 466747 - DNA, 2008 bp, Homo sapiens
tgctgttggctggctgcgctctctgtaccttagtcacttaggagcggtggcaatttgtaaaaagacagctctggaagttgaagagaccagtggcttcaagcaaaaagtaaattgaaaatgggagatatctttttgtgtaagaaagtggaatcaccaaagaagaatttgagagaatccaaacaaagggaggaggatgatgaagatccagatctgatctatgttggggtggagcatgtacatagagatgctgaagttctctttgtcgggatgatttcaaattcaaaaccagtcgtttcaaacattttgaacagagtcaccccaggctcaaagtcaagaagaaagaaaggccacttccgtcaatatcctgctcacgtgtcgcagcctgcaaatcatgtgacctctatggcaaaagccatcatgcccgtttctctgtctgaggggcgatcgacagatagtcctgtcactatgaagtcttcatctgaacctggttataaaatgagctcaccacaagttgtttctcccaattactcagattcgctccccccagggactcagtgtctagttggagctatggtctctggaggaggcagaaatgagagttctcctgattcaaagcgactttccacttcagatataaacagcagagattccaaaagggttaaactcagggatggaatcccaggggtaccttctttagctgtggtcccttcagatatgtcttctacaataagcacaaatacaccctcacaggggatctgcaactcatcaaaccatgttcagaatggagtaacatttccttggcctgatgctaatggaaaggcacatttcaatcttacagatccagagagagcaaatgagtctggcctggcaatgacagacatttcaagtctagcaagtcaaaacaagacctttgatcccaagaaagaaaatcccatcgtgttacttagcaacttttactatggacagcataaaggagatgggcagccggaacagaagactcacaccacctttaaatgcctcagctgcgtgaaagttctaaaaaatattaagtttatgaatcacatgaagcatcatttggaatttgagaagcagaggaacgacagctgggaagaccacaccacctgccagcactgccaccggcagtttcccactcccttccagctacagtgtcacattgatagtgtacacatcgccatggggccctctgctgtctgtaaaatctgtgaattgtcatttgaaacagatcaggtcctcttacaacacatgaaggaccatcataagcctggcgaaatgccctacgtgtgccaggtttgccattacagatcgtcggtctttgctgatgtggaaacacattttagaacgtgccatgaaaacacaaagaatttgctttgtctgttttgtctcaaacttttcaaaactgcaataccatacatgaatcattgttggaggcacagcagaaggagggtccttcagtgttccaagtgccggctacagtttttgacgttgaaggaggaaatagagcacaaaaccaaggaccatcaaacatttaaaaagccggagcaactgcaagggttccctcgtgaaacaaaagttattattcaaacttcagttcagccaggatcaagtggtatggcttccgttattgttagcaacactgaccctcagtcttctcctgtaaaaactaaaaagaagacggctatgaacactagagattccagactcccttgcagcaaggattctagctgaaaatatgttcgactgacttccaggagttccgaaaggcagaagtgaggctaggccatatgtgcattgtggctgtagatgctagcaagcaatgtcatcaactgtcaggttgtttttcacagtgacatctcatcagctccctattgtcaagaagtagctccaaagtctttgagccctttcccagtcaaatgctcccaacaaggcatcccttattctgacctcagaggtttttcttgtttatgaactttaaataaatggaatcaca

SEQ ID NO: 466748 - DNA, 4222 bp, Homo sapiens
gcctagagggagaaaacttgttgaaattcagagatccccctccccctaccaatacacaccaaatcagacgcctctgaccagatctgaatttggctctcagagatttccattgtagccaggcagttggggcactttctgagtgctgcctccacctcactgtccccagcctgcctgcctccgtttccctagccctgggcctgtgccgctgtcaccatcacctgggcgccctctagtggatgaatcggattatgcacgagggggcttggagcaggattcagaaggggctcctgtccttccttgaaatgctggacgccgggatcctggaacagctcttcaggtctctgcattcctcctggcaacagccagagcctgggcgcagggggctactgttgtttgaaggctgaaggctgcagcctggtagggcactcaggagacctggcagttggctgcagggccaggtctaggggccagggcatgagggatgctctgggctggctcagccccgggcccccatgcggattgtgactgtgggggcatggccacatgatgttgaggggggatctctgaccctgaccttcttggctctgtgcatccttgaaaccagaaaggtctggaacaaatcagtgaacaatgccctaactcggggagggagccacatcctgaccccagcagcctcagaaggatccgtgtcagggttatggggcaccctgggggccccgagtctgcatgggtctccacatgcaacttctgccggaaactctgaaaaatcccaactggggggtcataggacacaatcagaaatgctgatgccactgtgtgtggatccccgggccctggggggtcaggagcatgtagaaggtgggccacagggggttcataagagaatcctgtaaccgcccctgccccccaaacttagaagcccactggagggccatgggtgaaagcttgggggggtgtcctgtggagtgggtggtggggggtctttgggtttacatgctgctgggcctgagcagcaggaccccgtccacagctgatccctgggccctgctgctcagctgctctcttgagtgttgctgtggctgccgagagagcctgagtcgagcctctcttgtgccggccgtacgctgtcaggccacgctggtgagtttggcaaggcacagatgcccagagcagagaactttccttggggatttaatatgtgcgaatcttgaggtccggcaaatctttccctcagctagagagggggtttttgagactagaatcacctcagcatcctcctgtccccagctgtgtccagcctgtctgcagggacatcctgagaggactaggctctcccctcatccacctgcgtaagtgccaccctgaagcctgtccacccatgcttggagaggcttggcctcaacctgcttagccagcagcaggcttgggcctggggtgcagcagagacccaggtggctgtggggtggttgcttcatggggtggttctgaaacgcagttggaagtgcatggacagtgccttacctgttctctgtgggaccctgtttagaaaccaggtctgagttactgggggtcatcgctacattctgatggcctagctgtgtggaggccacggtggagccccatccaaggagccagggccctgggtctagccgtgaccagaacgcatgccctggaggtgtttctcatcttgcacctgtgttgcctggtgtctcaagtggccacaaaactctgtgttagctcttggtgcccctgggcttcggaaccagggtttcccttcatctcagtgacccgggagcatctgggcagtgagtaaagagggtgatttacttgatgggtacgtttggtcctgcctgggagcccccccaggcacggtcctgggacctgaagctgccctcgttggtggaggggagggagagagcttcagggatgaggtggcgttgagctgggcgggaagggtgagcccctgcaaggtggggtgggtgtgctggggacgctgagcagcacggccagcaggtgggtcttcagctcggtacccggtgggacttgtggttggggctggtgtgtggccaggagaggggctggcagaagacaagggggactgtgaggcagctcccatccagcggttgaagcctgatggcctggctctgtgcctcagttctctcatctataaaatgagaaaacagtgccagcctcccagacctgtcatgaggatgaacgagtgaccacgtagcatgggctgggtgcgtgtcacctaacattaccagcctttgcaaggagagccctggggacctggctgagtttttcccttgcctggcccactgcacctgtccccacaggagccaaggaggtcctgctgctggcccggtagacggaccaatggagggtctcgctggacacaccggacttcaccgacatcgtgctgcagctggacgacatccagcatgccatcgccatcaactatgacccaatggagggccacgtctactggacggatgacgaggtgtgggccatccgcagggcatacctggatgggtctggggcgcagacgctgatcaacaccaagatcaacgaccccgatgacatcgcagtcaactgggtggcccgaagcctctattggacccacacaggcactgaacacatcgaggtgacgtgcctcaacagcacctcccacaagatcctggtgtcagaggacatggacgagccccgtgccattgcactgcatcccgagatgggcctcacgtactggatagactggggagagaaccctgaaatcaagcgtgccaacctggacaggcaggagctgcgcgtgctggtcaatgcttccctcgggtggcccaacggcctggccctggacctgcaggaagggaagctctactggggagatgccaagacagataagatcgaggcgatcagtgtcgatgagacgaagaggcagaccctcctgaaggacaagctcccacacattttcaggttcaccctgctgggggacttcatctactggaccgcctggcagcaccacagcatcaagcgggtacacaaggtcaaggccaaccgggacgtcatcattgaccagctgcccgacctgatggggctcaaagctgtgaacgtggacaaggtcgtcggaaccaaccctcatgcggacaggaatgggggtgcagccacctgtgcttcttcacgccccacacaacccggtttggctgccccatctagggcctggaactgctgagtgacatgaagacctgcatcatgcccaaggccttcttggtcttcaccagtagagccgccatccacaggatctccctcgagaccaacaacaacgatgtggccatcctgctctcggcgtcaaggaggcctcggccctggactttgatgtgtccagcaaccacatctactggacagacatcagcctgaaggtagcgtgggcccgaacatgcacacgtgcagcctatatgggaaaaccttccctctgtacctgcctcaaaggtttcagacatttttcttaaagcactataatatttattgtaacacaattcaagctaattaaatatgagcaagcctatttcaaaaaaaatagacgattataatgagcaaatccggtagacacacatgacggcttttgtgaaatgcttgtgtgaatgtgaaatgtctgttgtccgttgagcttgacctcagacaccccacccgctgtctttccagtgcccgtttgcttagcactctttcttcatttatagtgcaaatataaacatccaggacaaatacaggaagaccttttttttttttttttttttttttttttttttttttttttgagacggagtcttgctctgtcgcccagggtggagtgtgcagtagcatgatctcagctcaccgcaacctccacctcccaggttaaagcgattctcctgcctcagcctcctaagtagctgggtttacaggcatatgcaaccacacccagctagtttttttagtagagacagggtttcaccatgttggccaggctggtcttgaactcttgacctcaggtgatctgcccgccttggcctcacaaagtggtgggattacaggcgtgagccaccgtacccggcctagaaagactttttgccttctaaagaagggtttaggggcacgctgctagctagggggagctgtggccgagtacaatgccgggcgtggggagccaggcggccccggggctgaggcgagcgaaggggctgaagggagt

SEQ ID NO: 466749 - DNA, 1637 bp, Homo sapiens
cctgcccccgtcacaggtacatgtactgggcagattggggtgagacgccctggatcgagcaggtggggatggacgacagcacccagaagatcattgtggacttggacatttactggcccaatagactgaccatcgacctgggggagaagaagctctactgggctgacactaagctcggcttcatccaccgtgccaacctggacggctcgttccggcagaaggtggtgaagggcagcctgacgcaccccttcaccctgacactctccggggacactctgcactggatggactggctgacgtgctccatccatgcctgcaacaggaacactgcggggaagaggaacgagatcttgagcgccctctactcagcatggatatccaggtgctgagccaggagcagcagcctttctgagccaaggaggtcctgctgctggcccggtagacggaccaatggagggtctcgctggacacaccggacttcaccgacatcgtgctgcagctggacgacatccagcatgccatcgccatcaactatgacccaatggagggccacgtctactggacggatgacgaggtgtgggccatccgcagggcatacctggatgggtctggggcgcagacgctgatcaacaccaagatcaacgaccccgatgacatcgcagtcaactgggtggcccgaagcctctattggacccacacaggcactgaacacatcgaggtgacgtgcctcaacagcacctcccacaagatcctggtgtcagaggacatggacgagccccgtgccattgcactgcatcccgagatgggcctcacgtactggatagactggggagagaaccctgaaatcaagcgtgccaacctggacaggcaggagctgcgcgtgctggtcaatgcttccctcgggtggcccaacggcctggccctggacctgcaggaagggaagctctactggggagatgccaagacagataagatcgaggcgatcagtgtcgatgagacgaagaggcagaccctcctgaaggacaagctcccacacattttcaggttcaccctgctgggggacttcatctactggaccgcctggcagcaccacagcatcaagcgggtacacaaggtcaaggccaaccgggacgtcatcattgaccagctgcccgacctgatggggctcaaagctgtgaacgtggacaaggtcgtcggaaccaaccctcatgcggacaggaatgggggtgcagccacctgtgcttcttcacgccccacacaacccggtttggctgccccatctagggcctggaactgctgagtgacatgaagacctgcatcatgcccaaggccttcttggtcttcaccagtagagccgccatccacaggatctccctcgagaccaacaacaacgatgtggccatcctgctctcggcgtcaaggaggcctcggccctggactttgatgtgtccagcaaccacatctactggacagacatcagcctgaaggtagcgtgggcccgaacatgcacacgtgcagcctatatgggaaaaccttccctctgtacctgcctcaaaggtttcagacatttttcttaaagcactataatatttattgtaacacaattcaagctaattaaatatgagcaagcctatttc

SEQ ID NO: 466750 - DNA, 2208 bp, Homo sapiens
cctgcccccgtcacaggtacatgtactgggcagattggggtgagacgccctggatcgagcaggtggggatggacgacagcacccagaagatcattgtggacttggacatttactggcccaatagactgaccatcgacctgggggagaagaagctctactgggctgacactaagctcggcttcatccaccgtgccaacctggacggctcgttccggcagaaggtggtgaagggcagcctgacgcaccccttcaccctgacactctccggggacactctgcactggatggactggctgacgtgctccatccatgcctgcaacaggaacactgcggggaagaggaacgagatcttgagcgccctctactcagcatggatatccaggtgctgagccaggagcagcagcctttctgagccaaggaggtcctgctgctggcccggtagacggaccaatggagggtctcgctggacacaccggacttcaccgacatcgtgctgcagctggacgacatccagcatgccatcgccatcaactatgacccaatggagggccacgtctactggacggatgacgaggtgtgggccatccgcagggcatacctggatgggtctggggcgcagacgctgatcaacaccaagatcaacgaccccgatgacatcgcagtcaactgggtggcccgaagcctctattggacccacacaggcactgaacacatcgaggtgacgtgcctcaacagcacctcccacaagatcctggtgtcagaggacatggacgagccccgtgccattgcactgcatcccgagatgggcctcacgtactggatagactggggagagaaccctgaaatcaagcgtgccaacctggacaggcaggagctgcgcgtgctggtcaatgcttccctcgggtggcccaacggcctggccctggacctgcaggaagggaagctctactggggagatgccaagacagataagatcgaggcgatcagtgtcgatgagacgaagaggcagaccctcctgaaggacaagctcccacacattttcaggttcaccctgctgggggacttcatctactggaccgcctggcagcaccacagcatcaagcgggtacacaaggtcaaggccaaccgggacgtcatcattgaccagctgcccgacctgatggggctcaaagctgtgaacgtggacaaggtcgtcgggcctggaactgctgagtgacatgaagacctgcatcatgcccaaggccttcttggtcttcaccagtagagccgccatccacaggatctccctcgagaccaacaacaacgatgtggccatcctgctctcggcgtcaaggaggcctcggccctggactttgatgtgtccagcaaccacatctactggacagacatcagcctgaaggtagcgtgggcccgaacatgcacacgtgcagcctatatgggaaaaccttccctctgtacctgcctcaaaggtttcagacatttttcttaaagcactataatatttattgtaacacaattcaagctaattaaatatgagcaagcctatttcaaaaaaaatagacgattataatgagcaaatccggtagacacacatgacggcttttgtgaaatgcttgtgtgaatgtgaaatgtctgttgtccgttgagcttgacctcagacaccccacccgctgtctttccagtgcccgtttgcttagcactctttcttcatttatagtgcaaatataaacatccaggacaaatacaggaagaccttttttttttttttttttttttttttttttttttttttttgagacggagtcttgctctgtcgcccagggtggagtgtgcagtagcatgatctcagctcaccgcaacctccacctcccaggttaaagcgattctcctgcctcagcctcctaagtagctgggtttacaggcatatgcaaccacacccagctagtttttttagtagagacagggtttcaccatgttggccaggctggtcttgaactcttgacctcaggtgatctgcccgccttggcctcacaaagtggtgggattacaggcgtgagccaccgtacccggcctagaaagactttttgccttctaaagaagggtttaggggcacgctgctagctagggggagctgtggccgagtacaatgccgggcgtggggagccaggcggccccggggctgaggcgagcgaaggggctgaagggagt

SEQ ID NO: 466751 - DNA, 1699 bp, Homo sapiens
cctgcccccgtcacaggtacatgtactgggcagattggggtgagacgccctggatcgagcaggtggggatggacgacagcacccagaagatcattgtggacttggacatttactggcccaatagactgaccatcgacctgggggagaagaagctctactgggctgacactaagctcggcttcatccaccgtgccaacctggacggctcgttccggcagaaggtggtgaagggcagcctgacgcaccccttcaccctgacactctccggggacactctgcactggatggactggctgacgtgctccatccatgcctgcaacaggaacactgcggggaagaggaacgagatcttgagcgccctctactcagcatggatatccaggtgctgagccaggagcagcagcctttctgagccaaggaggtcctgctgctggcccggtagacggaccaatggagggtctcgctggacacaccggacttcaccgacatcgtgctgcagctggacgacatccagcatgccatcgccatcaactatgacccaatggagggccacgtctactggacggatgacgaggtgtgggccatccgcagggcatacctggatgggtctggggcgcagacgctgatcaacaccaagatcaacgaccccgatgacatcgcagtcaactgggtggcccgaagcctctattggacccacacaggcactgaacacatcgaggtgacgtgcctcaacagcacctcccacaagatcctggtgtcagaggacatggacgagccccgtgccattgcactgcatcccgagatgggcctcacgtactggatagactggggagagaaccctgaaatcaagcgtgccaacctggacaggcaggagctgcgcgtgctggtcaatgcttccctcgggtggcccaacggcctggccctggacctgcaggaagggaagctctactggggagatgccaagacagataagatcgaggtgaggctcccatggaggtatttgatcctggaggcctggccctgcccggctgtccctgggctcctaagaggccaggcccggccaccccctgcagcctgacatacgtatcaccaaggcaccaatgggtgcctgtgctctgctatttggccaagcggaatgcttgataaagtagttacagtactttctgacaaaaacgccttgagagggtagcgctatacaacgtcctgtggttacgtaagatgttatcattgggccaggcgcctgtagtcacagctacttggagactgaggtgggaggatcactggagcccaagagtttaaggccagcctgggtaaaggggacacgggaaacctctgcactgcttttgccacttactgtgagccttaaactatttcacaaacaatacaaaatcaagacaaaaaattaataacatatccactgcccccacttaagacataaaacatgagtgtcattgaagccagaggcagccattggcctgagtttgttgattcgttcccaagcagttgaagacagttttgtttttctgtggatgtctgtctcttctccctatgctgggtgcagccctgcattgccactgtggttggatttcagtggccttgtcctgtgggcgtgctttgctatttgcgccaagcggaatgcctgctaaagtagttacagtactttctgaccaaaacgccctgagagggtagcgctatacaa

SEQ ID NO: 466752 - DNA, 3563 bp, Homo sapiens
gcctagagggagaaaacttgttgaaattcagagatccccctccccctaccaatacacaccaaatcagacgcctctgaccagatctgaatttggctctcagagatttccattgtagccaggcagttggggcactttctgagtgctgcctccacctcactgtccccagcctgcctgcctccgtttccctagccctgggcctgtgccgctgtcaccatcacctgggcgccctctagtggatgaatcggattatgcacgagggggcttggagcaggattcagaaggggctcctgtccttccttgaaatgctggacgccgggatcctggaacagctcttcaggtctctgcattcctcctggcaacagccagagcctgggcgcagggggctactgttgtttgaaggctgaaggctgcagcctggtagggcactcaggagacctggcagttggctgcagggccaggtctaggggccagggcatgagggatgctctgggctggctcagccccgggcccccatgcggattgtgactgtgggggcatggccacatgatgttgaggggggatctctgaccctgaccttcttggctctgtgcatccttgaaaccagaaaggtctggaacaaatcagtgaacaatgccctaactcggggagggagccacatcctgaccccagcagcctcagaaggatccgtgtcagggttatggggcaccctgggggccccgagtctgcatgggtctccacatgcaacttctgccggaaactctgaaaaatcccaactggggggtcataggacacaatcagaaatgctgatgccactgtgtgtggatccccgggccctggggggtcaggagcatgtagaaggtgggccacagggggttcataagagaatcctgtaaccgcccctgccccccaaacttagaagcccactggagggccatgggtgaaagcttgggggggtgtcctgtggagtgggtggtggggggtctttgggtttacatgctgctgggcctgagcagcaggaccccgtccacagctgatccctgggccctgctgctcagctgctctcttgagtgttgctgtggctgccgagagagcctgagtcgagcctctcttgtgccggccgtacgctgtcaggccacgctggtgagtttggcaaggcacagatgcccagagcagagaactttccttggggatttaatatgtgcgaatcttgaggtccggcaaatctttccctcagctagagagggggtttttgagactagaatcacctcagcatcctcctgtccccagctgtgtccagcctgtctgcagggacatcctgagaggactaggctctcccctcatccacctgcgtaagtgccaccctgaagcctgtccacccatgcttggagaggcttggcctcaacctgcttagccagcagcaggcttgggcctggggtgcagcagagacccaggtggctgtggggtggttgcttcatggggtggttctgaaacgcagttggaagtgcatggacagtgccttacctgttctctgtgggaccctgtttagaaaccaggtctgagttactgggggtcatcgctacattctgatggcctagctgtgtggaggccacggtggagccccatccaaggagccagggccctgggtctagccgtgaccagaacgcatgccctggaggtgtttctcatcttgcacctgtgttgcctggtgtctcaagtggccacaaaactctgtgttagctcttggtgcccctgggcttcggaaccagggtttcccttcatctcagtgacccgggagcatctgggcagtgagtaaagagggtgatttacttgatgggtacgtttggtcctgcctgggagcccccccaggcacggtcctgggacctgaagctgccctcgttggtggaggggagggagagagcttcagggatgaggtggcgttgagctgggcgggaagggtgagcccctgcaaggtggggtgggtgtgctggggacgctgagcagcacggccagcaggtgggtcttcagctcggtacccggtgggacttgtggttggggctggtgtgtggccaggagaggggctggcagaagacaagggggactgtgaggcagctcccatccagcggttgaagcctgatggcctggctctgtgcctcagttctctcatctataaaatgagaaaacagtgccagcctcccagacctgtcatgaggatgaacgagtgaccacgtagcatgggctgggtgcgtgtcacctaacattaccagcctttgcaaggagagccctggggacctggctgagtttttcccttgcctggcccactgcacctgtccccacaggagccaaggaggtcctgctgctggcccggtagacggaccaatggagggtctcgctggacacaccggacttcaccgacatcgtgctgcagctggacgacatccagcatgccatcgccatcaactatgacccaatggagggccacgtctactggacggatgacgaggtgtgggccatccgcagggcatacctggatgggtctggggcgcagacgctgatcaacaccaagatcaacgaccccgatgacatcgcagtcaactgggtggcccgaagcctctattggacccacacaggcactgaacacatcgaggtgacgtgcctcaacagcacctcccacaagatcctggtgtcagaggacatggacgagccccgtgccattgcactgcatcccgagatgggcctcacgtactggatagactggggagagaaccctgaaatcaagcgtgccaacctggacaggcaggagctgcgcgtgctggtcaatgcttccctcgggtggcccaacggcctggccctggacctgcaggaagggaagctctactggggagatgccaagacagataagatcgaggcgatcagtgtcgatgagacgaagaggcagaccctcctgaaggacaagctcccacacattttcaggttcaccctgctgggggacttcatctactggaccgcctggcagcaccacagcatcaagcgggtacacaaggtcaaggccaaccgggacgtcatcattgaccagctgcccgacctgatggggctcaaagctgtgaacgtggacaaggtcgtcggaaccaaccctcatgcggacaggaatgggggtgcagccacctgtgcttcttcacgccccacacaacccggtttggctgccccatctagggcctggaactgctgagtgacatgaagacctgcatcatgcccaaggccttcttggtcttcaccagtagagccgccatccacaggatctccctcgagaccaacaacaacgatgtggccatcctgctctcggcgtcaaggaggcctcggccctggactttgatgtgtccagcaaccacatctactggacagacatcagcctgaaggtagcgtgggcccgaacatgcacacgtgcagcctatatgggaaaaccttccctctgtacctgcctcaaaggtttcagacatttttcttaaagcactataatatttattgtaacacaattcaagctaattaaatatgagcaagcctatttc

SEQ ID NO: 466753 - DNA, 1549 bp, Homo sapiens
cctgcccccgtcacaggtacatgtactgggcagattggggtgagacgccctggatcgagcaggtggggatggacgacagcacccagaagatcattgtggacttggacatttactggcccaatagactgaccatcgacctgggggagaagaagctctactgggctgacactaagctcggcttcatccaccgtgccaacctggacggctcgttccggcagaaggtggtgaagggcagcctgacgcaccccttcaccctgacactctccggggacactctgcactggatggactggctgacgtgctccatccatgcctgcaacaggaacactgcggggaagaggaacgagatcttgagcgccctctactcagcatggatatccaggtgctgagccaggagcagcagcctttctgagccaaggaggtcctgctgctggcccggtagacggaccaatggagggtctcgctggacacaccggacttcaccgacatcgtgctgcagctggacgacatccagcatgccatcgccatcaactatgacccaatggagggccacgtctactggacggatgacgaggtgtgggccatccgcagggcatacctggatgggtctggggcgcagacgctgatcaacaccaagatcaacgaccccgatgacatcgcagtcaactgggtggcccgaagcctctattggacccacacaggcactgaacacatcgaggtgacgtgcctcaacagcacctcccacaagatcctggtgtcagaggacatggacgagccccgtgccattgcactgcatcccgagatgggcctcacgtactggatagactggggagagaaccctgaaatcaagcgtgccaacctggacaggcaggagctgcgcgtgctggtcaatgcttccctcgggtggcccaacggcctggccctggacctgcaggaagggaagctctactggggagatgccaagacagataagatcgaggcgatcagtgtcgatgagacgaagaggcagaccctcctgaaggacaagctcccacacattttcaggttcaccctgctgggggacttcatctactggaccgcctggcagcaccacagcatcaagcgggtacacaaggtcaaggccaaccgggacgtcatcattgaccagctgcccgacctgatggggctcaaagctgtgaacgtggacaaggtcgtcgggcctggaactgctgagtgacatgaagacctgcatcatgcccaaggccttcttggtcttcaccagtagagccgccatccacaggatctccctcgagaccaacaacaacgatgtggccatcctgctctcggcgtcaaggaggcctcggccctggactttgatgtgtccagcaaccacatctactggacagacatcagcctgaaggtagcgtgggcccgaacatgcacacgtgcagcctatatgggaaaaccttccctctgtacctgcctcaaaggtttcagacatttttcttaaagcactataatatttattgtaacacaattcaagctaattaaatatgagcaagcctatttc

SEQ ID NO: 466754 - DNA, 1751 bp, Homo sapiens
cctgcccccgtcacaggtacatgtactgggcagattggggtgagacgccctggatcgagcaggtggggatggacgacagcacccagaagatcattgtggacttggacatttactggcccaatagactgaccatcgacctgggggagaagaagctctactgggctgacactaagctcggcttcatccaccgtgccaacctggacggctcgttccggcagaaggtggtgaagggcagcctgacgcaccccttcaccctgacactctccggggacactctgcactggatggactggctgacgtgctccatccatgcctgcaacaggaacactgcggggaagaggaacgagatcttgagcgccctctactcagcatggatatccaggtgctgagccaggagcagcagcctttctgagccaaggaggtcctgctgctggcccggtagacggaccaatggagggtctcgctggacacaccggacttcaccgacatcgtgctgcagctggacgacatccagcatgccatcgccatcaactatgacccaatggagggccacgtctactggacggatgacgaggtgtgggccatccgcagggcatacctggatgggtctggggcgcagacgctgatcaacaccaagatcaacgaccccgatgacatcgcagtcaactgggtggcccgaagcctctattggacccacacaggcactgaacacatcgaggtgacgtgcctcaacagcacctcccacaagatcctggtgtcagaggacatggacgagccccgtgccattgcactgcatcccgagatgggcctcacgtactggatagactggggagagaaccctgaaatcaagcgtgccatcctgctctcggcgtcaaggaggcctcggccctggactttgatgtgtccagcaaccacatctactggacagacatcagcctgaaggtagcgtgggcccgaacatgcacacgtgcagcctatatgggaaaaccttccctctgtacctgcctcaaaggtttcagacatttttcttaaagcactataatatttattgtaacacaattcaagctaattaaatatgagcaagcctatttcaaaaaaaatagacgattataatgagcaaatccggtagacacacatgacggcttttgtgaaatgcttgtgtgaatgtgaaatgtctgttgtccgttgagcttgacctcagacaccccacccgctgtctttccagtgcccgtttgcttagcactctttcttcatttatagtgcaaatataaacatccaggacaaatacaggaagaccttttttttttttttttttttttttttttttttttttttttgagacggagtcttgctctgtcgcccagggtggagtgtgcagtagcatgatctcagctcaccgcaacctccacctcccaggttaaagcgattctcctgcctcagcctcctaagtagctgggtttacaggcatatgcaaccacacccagctagtttttttagtagagacagggtttcaccatgttggccaggctggtcttgaactcttgacctcaggtgatctgcccgccttggcctcacaaagtggtgggattacaggcgtgagccaccgtacccggcctagaaagactttttgccttctaaagaagggtttaggggcacgctgctagctagggggagctgtggccgagtacaatgccgggcgtggggagccaggcggccccggggctgaggcgagcgaaggggctgaagggagt

SEQ ID NO: 466755 - DNA, 1301 bp, Homo sapiens
agctccagagagcatgtggtcagtagtccctccagccatgcagatcctgccactgatcaaaggacagccccgtggtgagagctgtggcctgaggcagggaccacagcacacaagcatcaggaagctgtccctgtcctggatgggaaaccacagggcaggtttcctgttggaattcatggtggaaagggaaggagctgagagagaagaattctcaaggccgcgctgcagcaagcctcttgcaccggtgctgggccccggtgagcctgaggagcaggagaccaaggatcagcccagaggtccccaagaccccttccctggaggcgtcacctgtgtcctgagtgaggagagtgaggagcagcagagcccaggccatggtggagacgtcccgagagcgctgcctcttgtgaccccagcactggccctgccccagccctgtcttatcccctttgcctcagaggagggcggggcctccatgaaaatcagcatcctgggctcctctcctcaccccaccctcaccatctgcaccatcgaatccctggagcacatcagccaccccaggcagtgcacccacatccacacggggcacatgtgggagggaccctctggagggacacagagcaccgaccagggccacagtcctgaacccaagccagctgctcccaatcctgcccttcccactcatgagcaggaaatcaagagccatgatttggcagcttccccaggagagagtccggaaagaccagggacaatgaaagtggaggagcagccaggaaaggagaagccactgtgtctgcaggacaggggctcccagagcaaaggggagataaaggggacacctgtgacctcagggaggacactgcacatggcagggacaccattttagcacaactgggtgtgtgaggagagggcactgtgagaagtcaagtgcctggagctgtggcagagaaagaggcagcatctgcaagagctgaaggtgtgagatcatggtcactggctcctgctgcatgtcagcgtctccctgtcacccaggcccgccccatcgccaggtggctttgccaggtaactctctgcttccccctggtggccgctccacactgtgggctgggggctcagggacttcctgggtctaggtgtggattcagaacctgctgttcaggtccctgatgccctgatccgaggactgctggtcccaggggaggaacacctcttctctgtgtggcccctgcctgactcaagatcaggtacaaggggctcagcttacccaataaaatacaaaagtatatatgtagaaacactgaaat

SEQ ID NO: 466756 - DNA, 1161 bp, Homo sapiens
ctgccagtggtatgatgtccgagccttctcccaccctgctactgcctgctcaggggtcctgggctgccctgaggccaccgcctagcaagatcaagatagggcttgagcggcagtgggatagggcagtgggggttccgggggggtccggtgcaggcagaaccaagagtgtgccggcggagggctgtcggtacagggtgcagggcgtggcggctgcaggacctcagcttgcctctttaaatcccttcctgggcaccgcggtggcccggccctttcccctcgtgctgtttctgctggaaacgccgcacagtctcctcgggggcagccgccagcggaaacgagggtgtgtgtgtggctgccactattctgcagacacgctggctccaccccagagagttgcagggccaggaaatctgcatttaaacagaccctggctctcacacttcggaaactgcccgaagcacctctcaaatatgggacaggtttgatactccctccccctctccgttcccccgcttctcccttcttcgccctccttcccacttcctccctcctccccgccccttctgccccccacctgccctccctccctcccttccatccttcctcctcctcccggcaacctttctcccttccccactccctcccctctccctcctccttgtgcttaggccgaaaatcaggaatctcttgaatgaatgcatgaaggtggagccctttcccttaatgcgcaggtgaaaagggcacctcggtggattctactaaatttaatagaagataaataaattaaataaataaataaatataatttaatataaataactagaaatttttcaatacttgcatctctgtaggttacctctggaagtgcagggctttgtctttttggattaactcagaaattagaccttcagaaaacaacatcagctctgattctctgcacccttgatgctgccggtggcgactgcggcttcctgatggaaatgtagacctgaacataagtcgcagaaaaatgcagacttgagttggagctaagctgactcaggtattttgagatctataatctgagtggggagcagagagattccaagatatttgcattcagtggcttttgcacacagcagaacctgtgctgagggcatttctagggtcattactcataat

SEQ ID NO: 466757 - DNA, 3410 bp, Homo sapiens
tctagtccacagaggcttcacttaaaagctaggagtgaaccaggaattgagaaagtaggaaggaggtgtcccagaccccaagctaggaatggggagggaaatggaggaatcccaaatgccttaaggacggcctacatactaaggaaaatttttttctaactcctggttgcagctgaggggagcggctgagggcggggacaggggtgcggcggacccactgctcccattacccgaccagcgcctcccttcctccttggatgggtgcccctgtcttgctaagaactgcctgtttacacaactgctttccttgtgaaaatttaaaggctcctattcccagttgttctatccttgtaggttaaagattatgtcaaaaactatattgcattatctctttccttctccttcccattaagacggaaaaaacatccgggagagccggtccgtttctcaggcagactaggccattaggtgcctcggagaaaggacccaaggctgctccgtccttcacagacacagtccaatcagagtttcccaggcacatcgatgcaccgcctccttcgagaaacaaggtaactttcgggttctggttgtctccaaagtcatccgaccaatctcgcaccgcccagagcgggcccttcctgtcaattacctactgaagggcaggcggccagcatcgccatggagaccaacacccttcccaccaccactccccctttctctcagggcccctgtcccctccagtgaatcccagaagactctggagagttctgagcagagggcggcaccctgccctctgattggtccaaggaaggctggggggcaggacgggaggcgaaacccctggaatattcccgacctggcagcctcatcgagcttggtgattggctcagaaggggaaaggcgggtctccacgacgacttataaaagccgaggggcgcgcggtccggaaaacggccagcctgaggagctgctgcgagggtccgcttcgtctttcgagagtgactcccgcggtcccaaggctttccagagcgaacctgtgcggctgcaggcaccggcgtgttgagtgtccggcgttccgaaggactgagctcttgtcgcggatcccgtccgccgtttccagcccccagtctcagagcggagcccacagagcagggcaccggcatggccaaagccgcggcgatcggcatcgacctgggcaccacctactcctgcgtgggggtgttccaacacggcaaggtggagatcatcgccaacgaccagggcaaccgcaccacccccagctacgtggccttcacggacaccgagcggctcatcggggatgcggccaagaaccaggtggcgctgaacccgcagaacaccgtgtttgacgcgaagcggctgatcggccgcaagttcggcgacccggtggtgcagtcggacatgaagcactggcctttccaggtgatcaacgacggagacaagcccaaggtgcaggtgagctacaagggggagaccaaggcattctaccccgaggagatctcgtccatggtgctgaccaagatgaaggagatcgccgaggcgtacctgggctacccggtgaccaacgcggtgatcaccgtgccggcctacttcaacgactcgcagcgccaggccaccaaggatgcgggtgtgatcgcggggctcaacgtgctgcggatcatcaacgagcccacggccgccgccatcgcctacggcctggacagaacgggcaagggggagcgcaacgtgctcatctttgacctgggcgggggcaccttcgacgtgtccatcctgacgatcgacgacggcatcttcgaggtgaaggccacggccggggacacccacctgggtggggaggactttgacaacaggctggtgaaccacttcgtggaggagttcaagagaaaacacaagaaggacatcagccagaacaagcgagccgtgaggcggctgcgcaccgcctgcgagagggccaagaggaccctgtcgtccagcacccaggccagcctggagatcgactccctgtttgagggcatcgacttctacacgtccatcaccagggcgaggttcgaggagctgtgctccgacctgttccgaagcaccctggagcccgtggagaaggctctgcgcgacgccaagctggacaaggcccagattcacgacctggtcctggtcgggggctccacccgcatccccaaggtgcagaagctgctgcaggacttcttcaacgggcgcgacctgaacaagagcatcaaccccgacgaggctgtggcctacggggcggcggtgcaggcggccatcctgatgggggacaagtccgagaacgtgcaggacctgctgctgctggacgtggctcccctgtcgctggggctggagacggccggaggcgtgatgactgccctgatcaagcgcaactccaccatccccaccaagcagacgcagatcttcaccacctactccgacaaccaacccggggtgctgatccaggtgtacgagggcgagagggccatgacgaaagacaacaatctgttggggcgcttcgagctgagcggcatccctccggcccccaggggcgtgccccagatcgaggtgaccttcgacatcgatgccaacggcatcctgaacgtcacggccacggacaagagcaccggcaaggccaacaagatcaccatcaccaacgacaagggccgcctgagcaaggaggagatcgagcgcatggtgcaggaggcggagaagtacaaagcggaggacgaggtgcagcgcgagagggtgtcagccaagaacgccctggagtcctacgccttcaacatgaagagcgccgtggaggatgaggggctcaagggcaagatcagcgaggccgacaagaagaaggtgctggacaagtgtcaagaggtcatctcgtggctggacgccaacaccttggccgagaaggacgagtttgagcacaagaggaaggagctggagcaggtgtgtaaccccatcatcagcggactgtaccagggtgccggtggtcccgggcctgggggcttcggggctcatggtcccaagggagggtctgggtcaggccccaccattgaggaggtagattaggggcctttccagattgctgtttttgttttggagcttcaaaactttgcatttcctagtatttctggttgtcagttctcaatttcctgtgtttgcaatgttgaaattttttggtgaagtactgaacttgctttttttccggtttctacatgcagagatgaatttatactgccatcttacgactatttcttctttttaatacacttaactcaggccattttttaagttggttacttcaaagtaaataaactttaaaattcaagtgatgccttttattcctttatttgggggtcagtagggtctgcataggttgtttttcccatagc

SEQ ID NO: 466758 - DNA, 805 bp, Homo sapiens
  misc_feature (751)..(751): n is a, c, g, or t
  misc_feature (777)..(777): n is a, c, g, or t
  misc_feature (786)..(786): n is a, c, g, or t
agtcattaaaaagtgttcttataggcatgtgtgtcataacattggtttagagtacatttgcttagaataaagtaggttgtgtatagcatggtgaaaaatgagggctcttaagccagactgcttgaggttgaatctcactttgagtactctgtgactttgtgcaaattgcttacccattctttttgcctttcttgactgtgaattctgagtattaataggagctaccttatagggctgttaggaagatgaaataagttaatgcatttatgttacttattaagtggtcaacaagttagctattattaatgtaaaaacattaacctgctcttgaaaaaatatgttttcttctctttagtggcacactgtgcatcttctcgacaaatcatttcacactggaagaattgtacaagacatgattgtcctgtgtgtctccccctcaaaaatgctggtgataagagaaatcaacagcgtaagtgatgaaatcttttgaaggtttatatgaaaagttttaaagtctcaccagtgccatttatagtactacttgattatgtgagggacctgtggtgttgtactatgttgaataaatgtttttttcccttttaatttttctgcttccctagtgcatagaattgaactgcttagggagtttgaggctgcagtgagctatggtcatgttactgcgctccagcctgagtgatggagtgagaacctgcctcaattaaaaaaaaaaaaactcgaggggggtgctgcnacggagcctacaacgctatcccatgngggcttganaggaggcagagcgagcgtg

SEQ ID NO: 466759 - DNA, 1611 bp, Homo sapiens
  misc_feature (1557)..(1557): n is a, c, g, or t
  misc_feature (1583)..(1583): n is a, c, g, or t
  misc_feature (1592)..(1592): n is a, c, g, or t
tgtggtagtttttgctttttagttttggtgtaacgtgagacttcagagatacagtggggttggtatacatgtccacacagttttcccattttggctctctatttgacttggagcacgacttaccagatgaattaatcaactctacagaattgggactaaccaatggtggtgatattaatcagcttcagacaagtcttggcatggtacaagatgcagcttctaaacataaacagctgtcagaattgctgcgatctggtagttcccctaacctcaatatgggagttggtggcccaggtcaagtcatggccagccaggcccaacagagcagtcctggattaggtttgataaatagcatggtcaaaagcccaatgacacaggcaggcttgacttctcccaacatggggatgggcactagtggaccaaatcagggtcctacgcagtcaacaggtatgatgaacagtccagtaaatcagcctgccatgggaatgaacacagggatgaatgcgggcatgaatcctggaatgttggctgcaggcaatggacaagggataatgcctaatcaagtcatgaacggttcaattggagcaggccgagggcgacagaatatgcagtacccaaacccaggcatgggaagtgctggcaacttactgactgagcctcttcagcagggctctccccagatgggaggacaaacaggattgagaggcccccagcctcttaagatgggaatgatgaacaaccccaatccttatggttcaccatatactcagaatcctggacagcagattggagccagtggccttggtctccagattcagacaaaaactgtactatcaaataacttatctccatttgctatggacaaaaaggcagttcctggtggaggaatgcccaacatgggtcaacagccagccccgcaggtccagcagccaggcctggtgactccagttgcccaagggatgggttctggagcacatacagctgatccagagaagcgcaagctcatccagcagcagcttgttctccttttgcatgctcacaagtgccagcgccgggaacaggccaatggggaagtgaggcagtgcaaccttccccactgtcgcacaatgaagaatgtcctaaaccacatgacacactgccagtcaggcaagtcttgccaagtggcacactgtgcatcttctcgacaaatcatttcacactggaagaattgtacaagacatgattgtcctgtgtgtctccccctcaaaaatgctggtgataagagaaatcaacagcgtaagtgatgaaatcttttgaaggtttatatgaaaagttttaaagtctcaccagtgccatttatagtactacttgattatgtgagggacctgtggtgttgtactatgttgaataaatgtttttttcccttttaatttttctgcttccctagtgcatagaattgaactgcttagggagtttgaggctgcagtgagctatggtcatgttactgcgctccagcctgagtgatggagtgagaacctgcctcaattaaaaaaaaaaaaactcgaggggggtgctgcnacggagcctacaacgctatcccatgngggcttganaggaggcagagcgagcgtg

SEQ ID NO: 466760 - DNA, 847 bp, Homo sapiens
  misc_feature (793)..(793): n is a, c, g, or t
  misc_feature (819)..(819): n is a, c, g, or t
  misc_feature (828)..(828): n is a, c, g, or t
gcggccggttcgtggttgtgggttgacgtggttggccttggtctccagattcagacaaaaactgtactatcaaataacttatctccatttgctatggacaaaaaggcagttcctggtggaggaatgcccaacatgggtcaacagccagccccgcaggtccagcagccaggcctggtgactccagttgcccaagggatgggttctggagcacatacagctgatccagagaagcgcaagctcatccagcagcagcttgttctccttttgcatgctcacaagtgccagcgccgggaacaggccaatggggaagtgaggcagtgcaaccttccccactgtcgcacaatgaagaatgtcctaaaccacatgacacactgccagtcaggcaagtcttgccaagtggcacactgtgcatcttctcgacaaatcatttcacactggaagaattgtacaagacatgattgtcctgtgtgtctccccctcaaaaatgctggtgataagagaaatcaacagcgtaagtgatgaaatcttttgaaggtttatatgaaaagttttaaagtctcaccagtgccatttatagtactacttgattatgtgagggacctgtggtgttgtactatgttgaataaatgtttttttcccttttaatttttctgcttccctagtgcatagaattgaactgcttagggagtttgaggctgcagtgagctatggtcatgttactgcgctccagcctgagtgatggagtgagaacctgcctcaattaaaaaaaaaaaaactcgaggggggtgctgcnacggagcctacaacgctatcccatgngggcttganaggaggcagagcgagcgtg

SEQ ID NO: 466761 - DNA, 500 bp, Homo sapiens
ggcgacagaatatgcagtacccaaacccaggcatgggaagtgctggcaacttactgactgagcctcttcagcagggctctccccagatgggaggacaaacaggattgagaggcccccagcctcttaaggtaagtacagttttggtttgtgtgcacaatcggcatgcatgtgagtattgtcatgatggatggagggtttgccttacattgtatagcagtttccactattacacgccaggaatttactgtgctgtcataagttttaagaagtgcctgtatttaagtaaaacgtttattttacagctggtattctataacttcatacttccaaatgattgctggctaatgctggttctctctggcacaagtattggaatgtttttatctcatttccaagtccagtttagccttgtagcctccttataaaattacagttttgagatggctggcattacactgtcttcagatggatactccatttgttcctattgctttgaatgt

SEQ ID NO: 466762 - DNA, 1180 bp, Homo sapiens
tgtggtagtttttgctttttagttttggtgtaacgtgagacttcagagatacagtggggttggtatacatgtccacacagttttcccattttggctctctatttgacttggagcacgacttaccagatgaattaatcaactctacagaattgggactaaccaatggtggtgatattaatcagcttcagacaagtcttggcatggtacaagatgcagcttctaaacataaacagctgtcagaattgctgcgatctggtagttcccctaacctcaatatgggagttggtggcccaggtcaagtcatggccagccaggcccaacagagcagtcctggattaggtttgataaatagcatggtcaaaagcccaatgacacaggcaggcttgacttctcccaacatggggatgggcactagtggaccaaatcagggtcctacgcagtcaacaggtatgatgaacagtccagtaaatcagcctgccatgggaatgaacacagggatgaatgcgggcatgaatcctggaatgttggctgcaggcaatggacaagggataatgcctaatcaagtcatgaacggttcaattggagcaggccgagggcgacagaatatgcagtacccaaacccaggcatgggaagtgctggcaacttactgactgagcctcttcagcagggctctccccagatgggaggacaaacaggattgagaggcccccagcctcttaagatgggaatgatgaacaaccccaatccttatggttcaccatatactcagaatcctggacagcagattggagccagtggccttggtctccagattcagacaaaaactgtactatcaaataacttatctccatttgctatggacaaaaaggcagttcctggtggaggaatgcccaacatggtgagtactaatccattacagacttgttttcaaactggcattttgacaaaagaattgtgttaaactttcacccttctgttatatatgctgggatttgtacccactaggagcctaaattgatatgtacttgatgatccctgtgaggaggcttgtgcttcctttccatttctctgttttttttgttccatgtggttattgatcagtgagcatgttgatccaaacaggagtaagtgaactgctacaatgaagttttaggggcctgccattcagcaacttggtct

SEQ ID NO: 466763 - DNA, 303 bp, Homo sapiens
ctctagaggatccggttgaagtagattcctctctaaaaaagattttgttaactatttctctcccaaagagactgtttaaccaatttttaggtacggaattacaacctgaaatcaagccttcatttccctctcaacttaattaccacttcctataagaacttgattatatgtctgagaaccgagatagtaaaatgaggagtctgactgaacaatcgagattactaccattggacaaaccctgagaggaatctactcttcaattctcctggctttcgttatcaattatatgatattaaagagaga

SEQ ID NO: 466764 - DNA, 881 bp, Homo sapiens
ggtgatacaagatgaggtttgagagaaagctgagaccagcagtgaaatcaaggaccgcacagttcgggcgctacgagagctgccgttccaattccatccgaaggaagggagacaacgctttcccgcgcggacgagcggccaggcgcggcgctaactgcttggacgccccgcctgccaccgtgcctcagctcgcctcttctgcacaacgggactctgccccacagggacaccgggaaggtcccgacccgagcgctcagtgggacggggtcgcaccaagagtccgcgcggaactcccgatctgggcggggcccaaaggtcacgtggccgggaaggcgggcgcgcgggctgcgagcaccaaccgccggccgccccgcgctgcgtcgccccgcctcccccgccccacccccggtggaaggctgcgggcgtcctaccagtgccaggactgccagagcgggaggagcgcggcgcgggccagccgggactgctggacagcggggtccaggctagaggcgagcgagcggtcagtgacggctgtggaggagggaggcgctgggcgtcagcgcgggacccgagcctctggaccactgagctggggggctggctgaggtccacctcctaacaaattattggaaggaatatgagaaaaagactgtttaaccaatttttaggtacggaattacaacctgaaatcaagccttcatttccctctcaacttaattaccacttcctataagaacttgattatatgtctgagaaccgagatagtaaaatgaggagtctgactgaacaatcgagattactaccattggacaaaccctgagaggaatctactcttcaattctcctggctttcgttatcaattatatgatattaaagagaga

SEQ ID NO: 466765 - DNA, 1112 bp, Homo sapiens
ggtgatacaagatgaggtttgagagaaagctgagaccagcagtgaaatcaaggaccgcacagttcgggcgctacgagagctgccgttccaattccatccgaaggaagggagacaacgctttcccgcgcggacgagcggccaggcgcggcgctaactgcttggacgccccgcctgccaccgtgcctcagctcgcctcttctgcacaacgggactctgccccacagggacaccgggaaggtcccgacccgagcgctcagtgggacggggtcgcaccaagagtccgcgcggaactcccgatctgggcggggcccaaaggtcacgtggccgggaaggcgggcgcgcgggctgcgagcaccaaccgccggccgccccgcgctgcgtcgccccgcctcccccgccccacccccggtggaaggctgcgggcgtcctaccagtgccaggactgccagagcgggaggagcgcggcgcgggccagccgggactgctggacagcggggtccaggctagaggcgagcgagcggtcagtgacggctgtggaggagggaggcgctgggcgtcagcgcgggacccgagcctctggaccactgagctggggggctggctgaggtccacctcctaacaaattattggaaggaatatgagaaaaatggagtttcactcttgtcacccaggctggagtgcaatagagcgatcatggctcactgcaacctctgccccccgggttcaagcgattctcctgcctcagcctctcaagtagctgggattacaagtgcccaccaccacgcccagctaatttttgtatttttagtaaagatggggtttcaccacattggccaggctggtctctaactcctgacctcacgtgattcatccatctcagcctcccaaagtgctgggattacaggcatgagccactgtgcctggcctatacttatattttcttctgtgattttaatattttagtgtttatgttttggtctatgatccattttgagtaaatttttatatttggtataaggtaggggtccaactttatttatttttgagatggaggcttactctattgcccaggcaggcatgcaatggtgcgatccagctcactgcaacctctg

SEQ ID NO: 466766 - DNA, 1964 bp, Homo sapiens
agcgggtggttggaaggtcgtccctgtgaccggcttggcggttggagcggctgtcgccatgttgtcggtagcagcccgctcgggcccgttcgcgcccgtcctgtcggccacgtcccgcggggtggcgggcgcgctgcggcccttggtgcaggccacggtgcccgccaccccggagcagcctgtgttggacctgaagcggcccttcctcagccgggagtcgctgagcggccaggccgtgcgccggcctttggtcgcctccgtgggcctcaatgtccctgcttctgtttgttattcccacacagacatcaaggtgcctgacttctctgaataccgccgccttgaagttttagatagtacgaagtcttcaagagaaagcagcgaggctaggaaaggtttctcctatttggtaactggagtaactactgtgggtgtcgcatatgctgccaaagaaatgccgtcacaccagttcgtttccagcatgagtgcttctgctgatgtgttggccctggcgaaaatcgaaatcaagttatccgatattccagaaggcaagaacatggctttcaaatggagaggcaaacccctgtttgtacgtcatagaacccagaaggaaattaagcaggaagctgcagttgaattatcacagttgagggacccacagcatgatctagatcgagtaaagaaacctgaatgggttatcctgataggtgtttgcactcatcttggttgtgtacccattgcaaatgcaggagattttggtggttattactgcccttgccatgggtcacactatgatgcatctggcaggatcagattgggtcctgctactctcaaccttgaagtccccacgtatgagttcaccagtgacgatatggtgattgttggttagagacttggactcaagtcataggcttctttcagtctttatgtcacctcaggagacttatttgagaggaagccttctgtacttgaagttgatttgaaatatgtaagaattgatgatgtatttgcaaacattaatgtgaaataaattgaatttaatgttgaatactttcaggcattcacttaataaagccactgttaagcactgttatgctcagtcatacacgcgaaagggacgcagattctgcaaggtcattgttgggatgaagtaaaattaacgggtcatctaaaaaaaaaaaaaaaaaaaagaaattcaaaaagtagttgcctctggagaggagggaaagcaagcagggatgaaggaactggatgaggtgattaaaatgttctttattgtgctatgggtgatggttccactcatccaaattcatccaactgtatacttaagatttaagtatgtcataatatgtaaattatatttcaataaagtggttagcataaaactattttaaaaagtaatttgtagtgaagaaagggaaatttttgtattagtcaactctgacatttctattttttatctttctaaaaaaagtcaattgctttaaatttgctaaaggtataaaaatatcaaggtattaatcattcattcatcaaatatatattgagtgatcctaccccaaggcaaggtactaagtgctaggaacactgttcttgcccttgaaaaattcagagttttgcaagggataaagatgtgtacataaatggactgtgacagaggcatacagacattgtaggcataaaagagagaatgtcagactacctgcgaatgttaacgagattcaggacgatcacttgggaaccttgaatcacctgtggtaactatggtgcccactcctgtgaggttgagcctaaattgtaatgggtcttaacctaagataaaagagactgacccagccttgccaactgtttctagctgtccacccaagaccttcaaattagtgaaggatttttaaagcctcaagagccacaataaagagcacatggtgcatgcttcttgccatccttgacctaaacaacttagaaac

SEQ ID NO: 466767 - DNA, 899 bp, Homo sapiens
tcagctggtagttccatctgccattgctgtgccagatgaagaccctgatagaacacaccaccatgcatggctacaggtgcacagcaggcaccatcaatgcagaaactcattctattcctctcagaacaggatcagaaacggtgtgcatacaaggagagaacctcctagggctctattctgtatttggatcagatgtgcatgagggggccctgtctattggaagctttggagccatgaacatcgcccactgttttggagcccagagcagggaggttctgcaccaggttcaggcagggatacaggacagcatcggacattcagtgaccaagcagccagaactgccagattcccccgtcgtgtgctcaggcagaccccagcagcgatccctgaatggagagtgcaggataaactgtagctcttctgtgaaaaacagttccagagaaatgcagttgtaccctacatgtactcctgcttcccatgtatactgaaaacgagattgattccgtcaccccaataagcacagctgcactgtaattggaagtaccggatttctgccactaaacctcagttgtgtacttaaaaaaccatcaccatcatcactgtcattataatttttctattaccattattttaatttcctaacgctgatccatgcttgtggtgggaggtagcactagccttttttgttttaatgaaatttaagacttcttggacaatgttgaatagcagctgtgaaagcaggagtccttgttttgcttctgatctttgtggggaggctttcactctttcaccatttactgtgagattcactgtggattttgataaaggcccttctttaatcaatttgtgcaggtttccttctgttcctagtttgctaagtgtttttgtcttgaaagtgg

SEQ ID NO: 466768 - DNA, 2597 bp, Homo sapiens
gatggggtttgctgcattgcccagactgatctcaaacacctgggttcggttgtcctgccttggcctcccaaagtgctgggattacaggcatgagccaccacacccgaacacttggggtggttttaagcccccagcaagatgcaccagcaggaccaggaggtggcctgggcaccccctatcactcccatccatgcaaacctagaggaccgaagcagagggtgctgtttcaacgccaccaccaggagagaggcagaggggctgtgccatgctagagtcctcagggagggagtgacctcgaccctggctgtgctgcaagctgactccagccttggggtcagcagcacctggcgaacagcagcaggaggagccgctagagcagctgctcatgggcagagcagcccttgggcaactcctgccaccaccccctccccagggagcccaaggcaggggaggctcagcatggaatgaaacagcggagtgagggacacaaggagcctccgagggcagcagtgcacatgggggagacatctcccacgaggccaaggcctccagtgctcaccgatgccctctgtgaagttggggtagaactcgtcagtgaaaaggggctcgggcagctcacggaagtacagcttcagcatgcctgcgatggcgttcacgtccatctcgctcatcatcaccgacacgtccttgttatctggaaagagcatggaaatgcagcggcctccttgaagatcctgataaatgaagaaaagacacagagaaggatgtgacatgcctgggccatggagcactctgagatctcatcgcggacaccactgcccacacctccatcccgtcctgcgcaggccgacactcactgacgttgaagcctgccttcagtgcctggatgtccgtggccaccccagacatgcggtagatgcccacctcctccatgcctcggcgctcgatctcctccacacactggcgcacgatgtagggcaccttggacctctctctcctgcgggaggagggaatgttctcagtgtcctaacagccctgcttgggccataacacaggagacctgctccctatgtgcacacccggaggtggggtgaggacggtgacgaaggtacccaggtctggggctgcacacagagccttctgcatgcctgtcctccctctgcaagctctgtcctcatggcatgtactttctcaggaacctttcaagcggccagaacccctgcgaatcacacatgacctttgcgggaagaaacagctgaagggacaggcaccctcagtgcgtgagcccaagcccctccccactcacttggtgaccacagcaatcttgactccgaagacccctgtctgttttcgggacggcatcctcttcaagctgaacttcctgctgttgaacttgaccgagagctttacttcgatctacagtggggagaaggggcacagtcctctaatccttctggtcctcatagcccaaggtcccaaggacccctgggatgggcgccaggagagtcccacggacacgtaccccattcatggcgatgacggcgcgctgccagtctctgtcctgcagggcctgtgggtccagctgaaaggaaggagtcatgattggcagaggccctgggtgaaaggcgagctgtccagcagcaacttcagtaacaactcctgggggcctggcatccacagctgctgtctggggaattccagcactatccaggcagctagcctgcaggagcttgtccttaatgtcacccgaacacagtctgtcctggtatgtaacaccctgactgtcatgaccaagccacatgtcccccacccaggaacgctctgtttcccactttatggggagcacaagctctatgtcagcggttcctgggtcctactggttaacgtttcccaaggctctgaactgtgcagccagagtggcacagagaagcaaagggcggcgggacgtctcccaccgggggccatgtggccacaggctctcattccgcacctggccctgaaggtcgtcagaggccacactccaggcctcagggaccccaccctgagaagcagcatctgtgagcagggagcgaacagccatcactgggcccctctccccttgaaaactcagaactggcagaagcagctaacaagcaacccagagtccagtgctccttctcctcctgcttatccagtgccctaggtccctcttttcacaaccctctactctttagtcaggtgtactgcccttcctgagttctggggacagagttttcccatttctcaaaatctatgtatcatagatttcccaactgtaaaacggagggataatgaacaactcatagagttgttgagatgaagggaattaataaatatgaagtacttggaagactgcttgatatgtattaaacacatatgaatctttactcctcctgctagtattactaccctaatcttcatccttattcttagtgcagaacaaaggcactagagatagaagaagcaggaaacgaacctcagagcatgaccttccagcccctccctgccctgcctcctgcaccctgctccatctgttccccctacccaaggtctttggggtccctcttgttttcatttgc

SEQ ID NO: 466769 - DNA, 2181 bp, Homo sapiens
cccaggggcccagtttcctatgaaatgggagcatgaagttgaagtgagggctgagcagaggggagcagacacgctcggggactgtctatgggcattaaaaatcccaaggccaaccccactgtcactctgttcccgccctcctctgaggagctccaagccaacaaggccacactagtgtgtctgatcagtgacttctacccgggagctgtgacagtggcctggaaggcagatggcagccccgtcaaggcgggagtggagaccaccaaaccctccaaacagagcaacaacaagtacgcggccagcagctacctgagcctgacgcccgagcagtggaagtcccacagaagctacagctgccagatgccaccagggccactggccccagcttcctccttcacagctgcagtgggggctggggctggggcatcccagggagggtttttgtatgagcctgtgtcacagtgtgtggtattcggcggagggaccaagctgaccgtcctaggtggacaccaggactctgaccccctgcccctcatccaccccgcaggtcagcccaaggctgccccctcggtcactctgttcccgccctcctctgaggagcttcaagccaacaaggccacactggtgtgtctcataagtgacttctacccgggagccgtgacagtggcctggaaggcagatagcagccccgtcaaggcgggagtggagaccaccacaccctccaaacaaagcaacaacaagtacgcggccagcagctatctgagcctgacgcctgagcagtggaagtcccacagaagctacagctgccagatgccaggtccctgccatggcatccctgaccctatgcaacaagccagtgactctgtgtcctccagaagcctggatttccagggatcctgctgtgggtcacaggatgtcaccggtcccctctctctgtgggttaagtgtgggggccatgtggactccctcatgagcagatgccaccaggaccactggccccagcttcctccttcacagctgcagtgggggctggggctaggggcatcccagggagggtttttgtatgagcctgtgtcacagtgttgggtgttcggcggagggaccaagctgaccgtcctaggtggacaccaggactctgaccccctgcccctcatccaccccgcaggtcagcccaaggctgccccctcggtcactctgttcccgccctcctctgaggagcttcaagccaacaaggccacactggtgtgtctcataagtgacttctacccgggagccgtgacagtggcctggaaggcagatagcagccccgtcaaggcgggagtggagaccaccacaccctccaaacaaagcaacaacaagtacgcggccagcagctacctgagcctgacgcctgagcagtggaagtcccacagaagctacagctgccaggtcacgcatgaagggagcaccgtggagaagacagtggcccctacagaatgttcataggttctcaaccctcaccccccaccacgggagactagagctgcaggatcccaggggaggggtctctcctcccaccccaaggcatcaagcccttctccctgcactcaataaaccctcaataaatattctcattgtcaatcagaaatcttgttttatctcattttttcttttctcacatataattcctagccttccctgggttctcaatttatggtggagggaattctgcacccagtgggaaagtcacccaagggaggaggcttacagcctccccgagtcatctctctggaaggtccttcctcttccagtcaccccttccccaactctccaccatacccctgagcctccagcctggcctcagctcagaccagtcccacaccctcctcaattttacttctcaataaagacctgatcatgtaaaacccagtttccaatgtgtcgtctgtgtctggtcatgtgcctgtgctgaagggtcactgctctgggacaggaggcagtttcaggtgagatcccatgtccccgtcaccccacaccccacccaacctgccaggaaaccgggtgagctccctgtgccagggggaaccatgttccagagcagaaagttgtccctgcagagtggtccctgaaatgcagttcttgcccacctgggaaggatgtggagcctagtgaggacagagtggtggccctgagcagggcatc

SEQ ID NO: 466770 - DNA, 976 bp, Homo sapiens
gacagcacccactcctgtcctggtcctgacatggtggagctgtggacaggaaggactgtagcctgggagccagctcaggatggcggcctggggcctggacagcctcctggagccagagactcccaccttcccaaccccaggaccaggctcatgggacctgcagactgtggcagtgccggggaccttcctccccacaaccctgattggctgcaggcacacaccctgggtgactgccctgagcccgagacccaagggccagcctgagcccctcagccctgaggtgcccctgagctctgggcttctgtccacgctagcttggggcagccccaacagcagcagcagagttcctgaggcccagcccccggcccccagcctggctgagacggggcccccgcggacctgctggctgccaggaacaccagctggcgagcgggaagctggagcaaggcaagtgatgtgggctgttgggtgggcggcgagtttgcacgggaccttggtgactgtttcctcatctgaaaatgagcagagtgggacacgggcgctgtctgtcctgtttcccttggggcgggggttcctaggattaggggaaactgacagctgtggtaggtggaggctccatgaggaaccttgccacacccccacctgtacctgcacctgcacctgccagctgatagatcgagtcaggcaagagagccccaagcccttcgacctctaaacagatccctcctcttctcggtgacctccctttcccagcctgcctggacggttgttctgtgacttaacagtggctcccccagccccaaagccagcccccttcatctgtgacttagtctgctgtcgtggtgagctgacacatccaggtgtgaccactggtgaaaacttgtgcctctgttgtacaccctgccctgttctataaatatctatcaatactcatatatagacacacctacacatggccgaccgcctcgcctctagc

SEQ ID NO: 466771 - DNA, 7557 bp, Homo sapiens
  misc_feature (68)..(68): n is a, c, g, or t
  misc_feature (70)..(71): n is a, c, g, or t
  misc_feature (73)..(73): n is a, c, g, or t
  misc_feature (80)..(83): n is a, c, g, or t
  misc_feature (85)..(86): n is a, c, g, or t
gttgcaaacacgttctctatcgtgcttaattgccagctgtgaggggttagctacatcagtttacagcntnnanagtgccnnnntnnaggtgtgcactgccttgcctggctaatttttttttttttttgagacagagtcttgctcagttgtccaggctggattcaagaccagcctggccaagatggtgacacctcgtctctactaaaaatacaaaaattatctgggcgtggtggtgggcgcccataatcccagctactcaggaggttgaggcaggagaattgcttgaacctgggaggcggaggttgcaatgagcctagatcacgccaccacactccagcctgggcgacagagtgagactccgtctaaaaaaaaaagaaaaatatactatctaatacatatagcatacaaaatatatgttcatggactgttgatgttatctgtaaggcttcccatcaacaataagctattagtggttaagcttttggggagtcaaaaattatatgcagattttctactgcatggcggggcagcattcctaatccctgtggtattcaagggttaactgtatttcttggtgaccttggacaaattgttgaacttctctgtaccgtggtgtccgaagtaaagtagtccattcaggcacagtgctaggacaccacctggcctatagcatgtgctcggtcaaagttaactctactgtaattcctgcttgggttgttctggggatacctaatttctccccaccagccacttccccaagaatagtgagtgtgagggtccttacagacagggagatgagagcgtcactcctctttatgaccgtcaaagctctgcaggtgctcgcccttcgggtctctccagcctcacctggtacccctctcccccttgcttgctttctgcagccatggtggccttttattcctcagacccgttttctttcctgtcccaggaagggcctttgcaggtgctcttcccacagcctgaaagttcctcgggtagctggctcttcctcaccctccaggcctccaggcctcagttcaaatgcctctccctgggagaggctggtcctgaccaccaccgcctcctgcctaaacacagcagattctctctcccctctagaatccaaacaccaggggagcaagagtagagttggtttcattcaccccgggctctccaagcatagcaaacgctctggaagcacgtgatgagtggctgggtgacgaagagctacgacccgagacatggtacccacatgggtacccaccctatgggtagacacgagcctggtgtcaggaggaactgggtttgaatccttcaacaactgtgtggcctttcctctctctgagcgtcgatgtccttattcgtagagtggatgatcataccttccttgcagagccattgcacagatagtgacataggcacacacaatacagtcctggctcacgctcaggagacagtggctgtcaagtcaggagcccgtcctgcagcagcctagccatctggaaggatcactcctcgacatgccgtcaatgcctggcacttggtaagaatgagtttctcacatttctctgaagggatggggtggggggcaggtagagaagaaggctctgggcacctagggtgggaaggaagaagagagagactggccctgagggtagccagtgcctctttgttcattttctcaccagaataacaggggaaatataccatttagaaagaggcagtgaggattaaatgagctagcatatccagcacatagaaggccctctccccatcctcgtccctgaaagcaaactcctcgatttctcagttttgctctggttcccaggctgtgcatggaggcaaacacagggcccttcactcaggccaagctcaggagagcccaggctgcaccgagtccacactctcggctcatttccctcagtccaccaagaggatgacaccaaggccccctcctgtacccctgcctctgccccagcaagtcctactgagatcctgcctgttatgaaatggggctgtcccattgggtgcagggcagatggcaccatgcctctaggagcctcagcatgtgtttccaaggagacagccgtgtgtgtgtgtgtacacaccaacttgtaccatccagttcttcaaaggaaggtggaaagaagggaatgagggtcaggttgcaaatgggatgtaggtggaagacgcacgacgccaggccatgctgctgtttgcctttcacagaaaaaaccagcacagcatctcacggtttgcagacactttcacatgggataactcacttaatcttggcaacaagctcatggcacagatattcttttccgctttttaaagtctggagatggagagagaggggggcaagtcccaaccagtgggttgtagaattaggatttgtggcctgactctgatcataagccccctgctctcttcccagggccacactgccttgcctagaaaggattctagatcaggagtgcccctacgtggggatgccgcctgcccagcccaaagcaaaggccttgttcagcctttgaggtgtatgttccggcttcacaactccctgaaacggaggcctgagtgaccggagatggcaagaaaatgggaggaggtgtctctaagcatggccagggccccatgggagagggaagtatagggtataaaatgctaatcatatgatttagagacacagtgtctttccagaagctggaagagaaagacgttaagagctggagtgagcagtctggaacagaatcaactcttggaaaagtatccttgggagacaggttgggagtgaagacaggaagagtggttttcaggatttagggcccagggacatagaggggaaactgagtcagggcttggctacagacccacccttttgctggaaatggatttctctgccaaaagagaaattgtttgaactcatggcctagagtgaaggccaccaagaagccattgtcgttggaagccaagggagtctgggagctggtcagctctggtggagaaagtctgtttatccagggacaggaaagaggcaaggtctacacgggctgggctgggaggcccaggggcagcacgagggagagggaccccaagtctgggtttcaaggggcatcaatgaactagaaaacggaatgaggctgggtgcagtggctcacgcctgtaatcccagcactttgggaggctgaggcagctggatcactggaggtcaggagtttgagaccagcctggccaacatggtgaaacctgtctctactaaaaatacaaaaattagccgggcgtggtggcgggtgcctgtaatcctagctactcaggagactgaggcaggagaattgcttgaacacgggaggtggaggttacagtgagctgacgttgcaccactgcactccagcctgggcaacagagtgagacactggctcaaaaaaaaaaaaaaaaaatgccaggcgcagtggtttacacctgtaatcccagcacttcgggaggctgaggcgggcggatcatgaggtcaagagataaagaccatcttggccaacatggtgaaaccccatctgtactaaaaatacaaaaattagcctggcgtggtggcgggcgcctgtagtcccagctactcgggtagctgaggcaggagaattgcttgaacccaggaggcagaggttgcagtgagccgagatagcaccactgcactccagcctggcgatagagcaagactcttatctcaaaaaaaaaaaagggggaaagagaaaataaaagaaagtggagtgagaggctgcacggagcggagagcatggggagagcacacctggagtttctcacactccgcagactttcctgtacacttccctcccactggaggtgagatacgctctgcacatgacctaaatgtgtgccgaagcacagccattgggcaggagaaagaagagaaaatggggagtttgtaaacagtcatccaaagagataactgcccccttccactggacgggagcagcaggaagtccaccaaagcaagggcacgcggacctgagggcatccctgttttctggagcacctggcctctgttgtctttctccaattcacacccagagtcagagcagtggcagatggaagagaagccacttcaacaactacttaagtacatggtccctgatggcaagtaattctgtaatcattctgtgtggtggctataccctcttttcaacaaggtctattgcttttcaggtagacgtttctgtttataaatggtctggagattcgggcagctttgggaaactgattgcagattagggggcagtaatgtgctgcagtcattgtgagtcctgtggctcttcagccctcttcccctcattttatctagcagttggctgctggcatctgtcggtcctgtgggacctcatgcttctcactctcagtgagatgccacatgaagtgacaggaggtgacccaagactggcccacaccccttggacctgcccagccatgctggactaactaattctcggccacagcttgccagtgctcggcaaagctctgcctgaaaccttgggcggtcccctatgtgccaggccctgactttgctcatccacagtgagggagggggacttttcggctattgcagggccccacagaccagctgggagccagagaccggcagctgctgccacacttcaaaggccttgttatcctcatctgaggagcagtgccccgagtcgcccctgagaatcctccctgccccactggcagcctcgcccttcatgtgtgtgctggggggcatcctgggacaccttgggggagccaggagggactgtaccacccttcctgggttcctggaccaaggaggggaccctctaccttagcttttggaaatgtgttcagctctgcccacccacacaggccactcagagatgccaaaaaagtcagctgtggcttgtttgtgggtgtggactccaaatgggggcagatccctccggctgagttgcagagggcttcgctgaggaggtgggcttctcatggtgagcaactggtgtccccagtgctaggaggccacaggagcgccttctgtgacactcttctcagagggtggcctggactgtcccaccatttgacagcatggagtgtggtcggaggggcctgagcccagagctgcgtgcgagagctccggagcccctgccctaagctcccagtacgtccttccccgttcgggcaatgtctccctggggctagaacctgctgaccctcctttcctggcttagcccaagcaaacccacacccagttccagaggggtgaagggaggccgggggctgtgggatctgtctcctggctctggtttgggagtgggctgagagcgtcctgtggaaggaaggagtcctgcggggacaaccagggccacctggtgatgctaggtagcaggtgctggcacagcaggatgagagggaggcctgagaaaggtcccctgagaggacaccccaggtgctcaagtcagactcaggcagcaaaagccagctgggcccctctaaaggcaaggaggagttggagccctggggacctgggggtgacctctgacttctgggaacagaagagatttggagagagatttatcagtattctccgccaaactaatctggccatggggttcccaggcaggacttgggagacacctggtgctggccaccaggtctgcccctcagtccacgccctcctctctcctccctcgcgcgttttgcctgtggtatcctaggaacgcagggcttcgagccttgtggtcctgttacataacagtttccatcccatccatgagttcagccctccggcaagcgggagctgcagcaggcgcaccaaggaaagcctctgcttcagacccaggctcctgctgcccaaatccacagtccctgccgctcctctgccacccccagcgtacagggggagggagcttcaaaagcagtcagcatccagccagattctttcaataggaccccctgtcctgtcctggtcccacatgagcacagcacctgtcagtggccacacactggccatggcttccccaaatccagcaggcctaggagagagtcccagagccggtgtgacacatgcctcctcgaacccctctccgcactctgcaccctgagaccaagggcgcaccactgctgagaccctccctggcttggagatgcctgtcctgccactgtgcctgtggctgccccctcgccccctcgagtacctgggcagccaatcaatgcaggtcacctgtgctcctacctgttctcttctctggccaaggcagagagtgctccagcagggacttgaggacctcaggcatgtccatggcaggggccactgagaaccagtcgcagctcacacagcccagcaggaggtgcttgctccagggagttcagaggcagctggagaggcaggggccgccagccgcaggctagggaggcaggcggggtgggagccttgaggcagccaatggccagcaccagtcccagcccgcccgtccacccccggctcggccacctgccagctccggctgcagccaggccttcccttcccgctgcttggcagggcgggcctggccctgcgccagctgcagcacgtggagctgtcgcgccaatcctctgacagagagcccagcctgttatctaactttggaaagggaagttctcccccaggctgggagccataactggggctgccaggtgagaatggtaagctccacgcccacagcaagcacgcatcagcatggaggtgccctggaggcccaggcacgcagtggaaaccatcccgggctgggacctgaggctccaagagaaaaggaggatgacaggcaaggacagcacctcaggcagccgagcacaagacaccctgtgttggcagatgcagggatgcggtcggacatcatgccttcacctgtgcgcttctgagcctcaagggcttgtggcatgttttgatgctgtgtttatgccatgcacacgtaccctacaaggcacgccagtgtacatatggcatgcataattggagctttataccatctgcacagcctgaagcctgttccccaaaaggaagtgataaaacctaccgcctcaggttctttggtcttcaggggagaggggaaaaggggcaggtgcaggagaccaggcaccactgaaaggggggcagctctgcagcctgcttcaggcttgtcctggatgaggaatccctgcttcccagtcattgtggggacttaaagtgccaattggctatttgctgtagttccctctcataccctcccaccaggacgctggcccctgtggtccttgggttacttgaatgggtgaagcaaaggttctggatgtcaacctctacgtcagaccaacatcacgtcaaagccagacttgccgggggatgccaggttctcgattctgccgtacattgctgtgggatcttgagcaagcgtggcagcaactctgggtctcagttcccgaaccaccgaatgcagtgacctctaaggtgccgttcagctctagttctatggctctgaagctccagatgggctgcaataaacatttggttttctgcgtggt

SEQ ID NO: 466772 - DNA, 2276 bp, Homo sapiens
  misc_feature (1)..(4): n is a, c, g, or t
  misc_feature (8)..(8): n is a, c, g, or t
nnnnggtnagtccagaactcactaggaggctcccagacgctgtgtccgtgtttctcctccagaccgacgatgctgcctgtgtcactgcctcagggccatgtcactgctgctgccccactggactcccacggggcctgtgggcctgagctaattttcctggctggccccagtccaggcagctcaggtggagagcgccaagctaatgaggccaaggtcatggtccagttagcatctctcggaggaaccgtggcttttcagccagactgtagctccctgaccagtcactgcgctcaggtagaggcgggccctagaggagaggacaatagcaaagctggatcctgcaagtcagcatttccacaacagcacggaatgaacactattgatgcacacagtaacctgaatgactctccagagaattatgccaactgcgaaaaggcaatccgcaagagttacacaaatgtggccaacagccccagtgactaccaccacagtgcttttgaaaaccactgcccagagccagaaggatggaggatcagcatggcggtaggaggaagggagaagccagaggggaatgaggaggagccggggtgcctgcagcggctccgaccgcctgtcctccaaggtcccgggctgcggctgcgcagcgccgacagcacgatgcgtgtgccgacagcgccacctcctggctctgccgaggctgttggcaacacgcagggctcgcagacagtggacatctgtttgccaatgcagacctcgtgctcactggaggctggagaaggcacgctcaagaaacgttcaaggcatgacagctacccagaaggcctctagtgccccaagagctgctcatcagccccattttcttcctaatattatttaaaaatttaaagaaattcagtgaaagtgtaagcatacaggcataggtagtaggtaaactagaattcactcttgctgggggaataccacccagggtttgaaaagatacagaaggcaaaagaaactgcatttagtataataaaatacaattaggcagagcacggtggctcatgcctgtaattccagcactttgggaggccgaggaaggcggattacctgagctctggagtttgagaccagcctgggcaacatggtgaaaccccgtctctacaaacatacaacaattagtgagtcttggtggtacatgccagtcatcccagttatttgctgggctgggctgggatgggaggactgtttgggctcaggaggtcaaggctgcaatgagctgtgttcacgccactgcactccagcctgggtgacaaagcaagaccatgtctagaaaaaataaaaaaattagcagcctataattccaaagcagaaaaccagctggctggctatgcactaaatctgaccagccattgtgtgtaaggcgtgtgtgtgcaaatgtgtgtttgcatgtatatcgtttaaatagttactttatttaccaacatttacatttaaggaaatttcacatcaaataatctataattctagaatcttcttaaacatgaggtgggcaacatgagacccccacttctatcagtatccatcctgactggacccaagtggacagcttgagtttccagttcaatccagttcctgcctggcctctgctggcctctgggtttgcaatcccaactccctaccaccgccactactgctgagagcatcccctctacagtactcagaacctcactggctgcctgcaaccctgggggatcagcagaagagactctaagcccatctatcagtgcccagagaaatgcacgtggcccacggctgctgccttctgaggtcacctggccataccccaagtagtctgggaacccatgctgagcctggagaatcttcactctcccacctctccctccattcctcaggggaacaaggactccaaaagagccgtcggataaacctgggtttggatccaggctttctaccttggacaagttacctaaacctcctgcatctcggtttcttcttcgtcaaatggggacaatacttctttctttaaaggctttactttgaggatgaggtgagagggaagccatcctcctccgtaccccacaaggatcacaggccagtgagatccagctattatcacctctggtgatgctggtcgccaacaacccaaggacccctgttactgagctctaaccagaccctccctctagtatccaacacatactctcaagggaaacagaaatcacacagaagaggccaggcaggcgcagtggctcacgcctgtaatcttagcattt

SEQ ID NO: 466773 - DNA, 945 bp, Homo sapiens
ggccagtgactttctgttcacgcacttgagagaatcaccatgtctaagggctgccagatagttacctgtgcgtgtgtcaaggttcacatcccattactactgaggccttggatagaacatgttcccacttttagttgtgacgagatgactggccccagcattgagaacaccaccttcccttcagcaaagggtttgtttaaatttacagaagtggtgaagtgcttattaccctccttgcactggttcctagggagctcagagcctatcttttccaagtgtcccgagcctcctgtaggcctttcgtgtgagtctccttcctggcttcctcccattcctcttaagtgtctgaacctgctgtcaggcacgtctatggcaccactctggaatctcatgattgactttgacctccccagccccactgaccatccgtggataactggacattaggtgatggtggaactacccctcaaaaacaatccagacttcattcccacaaggctaaaagaattttgttcatcttgcaggttggaccaatttagggtagaaaatgtataaacagaagcaaaacacaaaacccagggtttctggtggactgaggatatttattgagggtttattgagtgtaggaagaagggctggatgacttgggatggggagagagaccccctcccctgggaacctgcagctccaggcccctgtgggtggggtgagggtcgggggcctaagagcattctgcaggggccactgtcttctccacggtgctcccttcatgcgtgacctggcaactgtagcttctgtgggacttccactgctcaggcgtcaggctcaggtagctagctgctggccgcgtacttgttgttgctctgtttggagggtgtggtggtctccactcccgcgttgacggggctgccatctgccttccaggccactttcacagctcccggg

SEQ ID NO: 466774 - DNA, 1978 bp, Homo sapiens
  misc_feature (3)..(4): n is a, c, g, or t
  misc_feature (6)..(6): n is a, c, g, or t
  misc_feature (15)..(16): n is a, c, g, or t
  misc_feature (18)..(18): n is a, c, g, or t
tgnncngggtttttnntnaggttcctgggtaaagggcgctgtgcctgaagaacttcacaaacactaaggacagaccctcttcctgcaatgccagtactcacccaagagagggtcctatcagcccaaatcctggtgtcagcagacatcgccaagtcggtgtaccttacttgtcaccagctccaagccccagacagcagttcagaagtctcattacacaatctgggacaagccaaatgctagcatcttcaaaatcaccatgattcagctgaaggaggactcgggatcctactggtgtgaaatctacaacacttccaaaaacatcatcactgttctcagagatgtcagcctggtggtgtttgcaggaaatcaagtgcccccatctgccttggctcagctggccccaaactcctggtctctgtgttgtgtggactcctcctggccaagggcctgatgctgtgagtcctgtttgtgttcctgacctgcaggtgccacaggacagcagtgatggaggtttctgattgtatcagcccagccttgccccaggacccttgggtgcatgagtcacagcatggatccaggatgaatccccagttcttcccctgcccagctattgggagctgccctaagcgttgccccccatttgtctgtgaggaaaggccagcactaagcctattggagagaactttcagcccctgatctccctggtggtgacccctcacccctgcactgacccctcttagatctacttcccctgccctgactttcgccattggaaagacctggggtgggggtttctgcatccgggtcaacgctcagctcagcatcttcagctgtgcccgggctcctctcccagcactccgtggttctctcagccccacctcagcaggtctccaggatgcctcacattttccctgtttgttagtggtctacccgagagtcctatcaatttcctcttgtgcttgattaaattcaacctctgaactgaaatgtgtcagaggcaactaagcaagaaagcagatgtatcccctcaccctcctcccctcccaccctaaatgagaaagaaatgacttaaaaataaataataaaattgaaactaagaaaggctgtaatcagcagactggaaactgaggaagtcctagaagtaaaagaaaaaatcagatgccttaaatgacaagagcagtggattcagcagcctaaaacaggacccagaacattcaatggaatctcatcatcaggggtcaaaattctgtttgtttaacgtgtgaggagattcatagcctaaaagagaaaatcaagttgaactaacaatatttgatggtgggtgaaagataaatgttttggggaacagaagaggagcacacatctgtgaagcaagaaaaggcacagtcattttccaaccaggcaaccactctaatgcatgtgatatgtaaccttaaatttgaatatattcttgtaaagcctgcagcttttttttctgtgactgtattttaacttacatataagaaattgtgatagacatttttcatatattcgttttgctccttcccgggtacatatacagagcccacttcttttcagtgcttattccattgtgtacatatcccacagtgtatcattctgaacccagggtgcatgtgctgttttgcctccacttcttcatattgcaaacaatgctgtgaggaatattgtccatcatgttctctggtagaatcaggtgagatttcctttaggacttatacccaggtggcatcagctgagttttacgatctcagatgtctaagtaatgctgtcagcttgtgttgcccgaaacacgaatctagacactagagattattttctgtgagtctatgtgaagtacacagcacaacctatggaatagtattgccaataaaaaaaaatggaaggcaagagtaaatgtagctgagtgatgctacatgggggctagaagtatgattatctttttaaaaaaatttttttc

SEQ ID NO: 466775 - DNA, 3692 bp, Homo sapiens
  misc_feature (3)..(4): n is a, c, g, or t
  misc_feature (6)..(6): n is a, c, g, or t
  misc_feature (15)..(16): n is a, c, g, or t
  misc_feature (18)..(18): n is a, c, g, or t
tgnncngggtttttnntnaggttcctgggtaaagggcgctgtgcctgaagaacttcacaaacactaaggacagaccctcttcctgcaatgccagtactcacccaagagagggtcctatcagcccaaatcctggtgtcagcagacatcgccaactccaagccccagacagcagttcagaagtctcattacacaatctgggacaagccaaatgctagcatcttcaaaatcaccatgattcagctgaaggaggactcgggatcctactggtgtgaaatctacaacacttccaaaaacatcatcactgttctcagagatgtcagcctggtggtgtttgcagccccaaccacgtctcctacgtggaccctcacctggctcccaacaaacacaggccatgactcaaagtttgttagagaggaaaggggaagaggatgcaggttgttaattgtggaggaaccatggaaaagacagttcaacatggatttctgcaatgaaacaaaatggaacccagaaaatgtggaaaccttagaccgtgttggtgtgttgaaggaggatttagcctctgttcttccccattaccagattcatatctaatatgcctaggcgaatctgaattcacaagccaaaatacctaggcttcttggtagaagcactgccttagaagaatgacaacacagccaacaatagaaacttgtgaagcagaactatgggaacttcccattccccaggaactgaatcagtatgtcagtatattcagctctcttattctttgattctccattttaaagtttaacttcctggttctctttggccccttgcttctagtttcagtaaacaactttcctgccagtcctaatcaatagttcacatctgttccgctggtcacctgctccatcctgactcatcctggtcacttgctttgacttgagtcacctctggtcacctgctccatcctgactcatcctgttcacctgctctgacctaagtcacctttagttacctgttcctaaccgtccttcctgctaaactactcaccccaccactctggctcatacccctgccctctccatagccaatcggtattagcttaggctgtgcggtccaaccctagccactaggggaatgacacagcagtaggggctaccaccatcaggaataagaactgctgcccctcccctgtccagatgtgctctcgctgttgtttcatctgtgaggagtaccctttctgcagccgttgtttcatctgtgagaagcaccctttctgcagaaagtaaaaattgcctggctgagaaaattaaatttatgttcgaagcttttcttgcagcactggggaacaagcattttgcatttctaacatggatcataaggaagatccatcgaaaaaaagagccaaatcgcaatcatagttgtgaaaaatattatagacccataatgtatgtgatgaaggatggctgtggctggacagtgagcaggaagaggagtgaggaattctcatggaaggtcctggaaagaactggagatttaaaaatcaaagacaagttaggagacatgaaggagaaaactagatgtactaatatatcggtatcaagaacccctgtgggagataaaggatgaaagaaagaaacatttgaagaaagaatctaaggaaacttttcaaaactatagaagaagaaaagacctcacattgaaaagattcataaattgccaaagaggggaaaacagcacacacacaaaaaacaccagtagacccattaagtaaaagggaagcacatcaaaaacagagggaaaagtctgaaggctttcagatcacctacaaggcaacaagattagaattccctctgagttcttaagaggaacactagaggtaagaagacaattgagtaatatttctaaagtactaaagaaaaactttgtatatagtgttttgtattcagccaaattgtcactccaatgtgaaatcataaaacctctggattctcaaggcctcagaaggtttgccacatgcaaacatccccactgaaaacactcccagagaaaggaagccaggatgaaaaataaaccctggggatgctgcaagaggaaatcaagtgcccccatctgccttggctcagctggccccaaactcctggtctctgtgttgtgtggactcctcctggccaagggcctgatgctgtgagtcctgtttgtgttcctgacctgcaggtgccacaggacagcagtgatggaggtttctgattgtatcagcccagccttgccccaggacccttgggtgcatgagtcacagcatggatccaggatgaatccccagttcttcccctgcccagctattgggagctgccctaagcgttgccccccatttgtctgtgaggaaaggccagcactaagcctattggagagaactttcagcccctgatctccctggtggtgacccctcacccctgcactgacccctcttagatctacttcccctgccctgactttcgccattggaaagacctggggtgggggtttctgcatccgggtcaacgctcagctcagcatcttcagctgtgcccgggctcctctcccagcactccgtggttctctcagccccacctcagcaggtctccaggatgcctcacattttccctgtttgttagtggtctacccgagagtcctatcaatttcctcttgtgcttgattaaattcaacctctgaactgaaatgtgtcagaggcaactaagcaagaaagcagatgtatcccctcaccctcctcccctcccaccctaaatgagaaagaaatgacttaaaaataaataataaaattgaaactaagaaaggctgtaatcagcagactggaaactgaggaagtcctagaagtaaaagaaaaaatcagatgccttaaatgacaagagcagtggattcagcagcctaaaacaggacccagaacattcaatggaatctcatcatcaggggtcaaaattctgtttgtttaacgtgtgaggagattcatagcctaaaagagaaaatcaagttgaactaacaatatttgatggtgggtgaaagataaatgttttggggaacagaagaggagcacacatctgtgaagcaagaaaaggcacagtcattttccaaccaggcaaccactctaatgcatgtgatatgtaaccttaaatttgaatatattcttgtaaagcctgcagcttttttttctgtgactgtattttaacttacatataagaaattgtgatagacatttttcatatattcgttttgctccttcccgggtacatatacagagcccacttcttttcagtgcttattccattgtgtacatatcccacagtgtatcattctgaacccagggtgcatgtgctgttttgcctccacttcttcatattgcaaacaatgctgtgaggaatattgtccatcatgttctctggtagaatcaggtgagatttcctttaggacttatacccaggtggcatcagctgagttttacgatctcagatgtctaagtaatgctgtcagcttgtgttgcccgaaacacgaatctagacactagagattattttctgtgagtctatgtgaagtacacagcacaacctatggaatagtattgccaataaaaaaaaatggaaggcaagagtaaatgtagctgagtgatgctacatgggggctagaagtatgattatctttttaaaaaaatttttttc

SEQ ID NO: 466776 - DNA, 1016 bp, Homo sapiens
ggccaggctgcctgctcaaggacactggggttggccagcctttcagacaagggtgctgccgcaacccagtctaggagcggtcctggctataagtcaccatggcacagcaagctgccgataagtatctctatgtggataaaaacttcatcaacaatccgctggcccaggccgactgggctgccaagaagctggtatgggtgccttccgacaagagtggctttgagccagccagcctcaaggaggaggtgggcgaagaggccatcgtggagctggtggagaatgggaagaaggtgaaggtgaacaaggatgacatccagaagatgaacccgcccaagttctccaaggtggaggacatggcagagctcacgtgcctcaacgaagcctcggtgctgcacaacctcaaggagcgttactactcagggctcatctacacctattcaggcctgttctgtgtggtcatcaatccttacaagaacctgcccatctactctgaagagattgtggaaatgtacaagggcaagaagaggcacgagatgccccctcacatctatgccatcacagacaccgcctacaggagtatgatgcaaggcaagacattaagactgagtaatgtgtactgatgaggcaggagacagtcttcagatctggacttcagactgtcttcagttaacctgtgggactccttctccaagagattcattcaatttttatttgttcaacaacaacaaaaatttggtggtggcctgaaagctccatacattgaaagtaattgggggacaaaaaaaaggatgcagagaaccagagctttcctttttcttggccataccgaatggccttcataggaacttaggggccaccctcgtacatctgtgcaattcagggtctcttcatgatttgtcaagattctgaatcaagtggtttgatcagatttgcaaattatgagggcaggtaggtgggcgatttctttttctttttttttttttttgagatggagtctcactctgtcatccaggctg

SEQ ID NO: 466777 - DNA, 1510 bp, Homo sapiens
ttgagaagaaaagtagttcagcaaatggagaagactgggagaaagaattggaagccttccaaatggcacagcaagggtgtttgcaccagaagaagggacaagcagttctgtatgaaggtggaaaaggctatggaaaaagccagctgttggctgaaataaactttctggcacagaaagaagggcatagctacccttcacaggtgctttggaaacccactttattgtgaggtcctatgccaggaccttctctctaaggacgtgttgctctttcatgtcctacaaaaggaggaagaggaaaacagcaagtgggaaaccctctcagccaatgccatgaaatccataatgtatagtatttctcctgccaactctgaggaaggccaggaactttatgtctgcacagtcaaggatgatgtgaacttggatacagtacttctcctaccctttttgaaagaaatagcagtaagccaactggatcaactgagcccagaggaacagttgctggtcaagtgtgctgcaatcattggtcactccttccatatagatttgctgcagcacctcctgcctggctgggataaaaataagctacttcaggtcttgagagctcttgtggatatacatgtgctctgctggtctgacaagagccaagagcttcctgctgagcccatattaatgccttcctctatcgacatcattgatggaaccaaagagaagaagacaaagttagatggtgggtcagcctctcttctcaggctacaagaagaattatccctaccacaaactgaggtgttggaatttggagtgcctctgctacgggcagctgcttgggagctctggcccaaggaacaacagatagctctgcaccttgaatgtgcctgctttctccaagttttggcctgccgctgtgggagctgccatggaggagactttgtcccctttcatcattttgcagtttgttctactaagaattccaaggggacctctcgattctgtacttacagagatactggctcagtgctaacacaagtgatcacagaaaaattgcagctgccttctccccaagaacagaggaagagttcctagatcaagtgaagaggaagctggctcagaccagccctgagaaagacctgttgaccacaaagccttgtcactgtaaggatatcctgaagttagtgctcttacccctcacccagcattgcttggtcgttggagaaaccacctgtgcattttattacctgctggaggctgcggctgcctgcttggacctgtcagataattatatggtctgtttcaacatgggacgtatcactttagccaaaaaattggctaggaaagcccttcgactgctgaaaaggaatttcccttggacctggtttggtgtccttttccagacattcctggataagaagaatttggcagtcctgcagcagcaggtgcattgcctctccctactctggcagctctataacctggaggccacagccagtagctacaggtttgcctgcctggctac

SEQ ID NO: 466778 - DNA, 1634 bp, Homo sapiens
gaaagaagccaaacacaaaaggttacctattgtatgactccgtttacatgaaatgcccagaacgggcaaatgcattgaaacagaaagccaatcagaggatgaagggagggcagaacggggagtggctgcttaatgaatgcaagccaggccatggcccacctaaattctggaaggccccacctcccttagccccaacaggcagtgctcatcatcaacgactttcctccaagcccccgccctctgcatactgcatggactccaggagtcccctgcccccactcccacccaggaaagctggtctaggaccaatcagaggctgtggaactttctggaaggcccagggcttctccctgggtggggcagggcctctgattggaggaggcctgccagaagggtggggcgatgggcgtggctaacgggataactgccagagcagaagacagttggcagttatttcgcaaccttcatctgttcctggaagatacccgtagcctgccttccttcttgacaggctgatttaggggtgctccccaagaagatcaggactgctgaaagaatgaagaagaacttacttggcctaggatgtggctagagaacggagcgcactttcacttacctggcaaggtggttttggaagtttccacggaagccttcccagggccgctgctgcccgtcctcgcctagaagaattccattctcccatcccaggaaggagagtgccctgcgtgccacgaaagagcccaggacccacaggacaaatacgtcactggcagacctgccttcgccagcgccagcccatctctgaaacctccagcatttgtgccccggtccggcccctcccaggcctgactctttccgtgaacggtcactgcgcaggatcaagctacaatgaagaggagggaggcagtctgcgcgcaccgccattttctaggaactgggaagcccccccaccccttaggaagatccatccctgtggaaccttgcccaggcttaccagcctttgctgaggttgatctattgtccctccttgtccccatcaaaatatccagcactccaccttcagggagtagacttgaccctcaaatagcaagttcagccttcccaggtctaggttccctgggaggtcaagattcgtctggttccttagtacagagggctagctgtgagttggaatccccctatgagctttagaatcagtcaagaggaattgggccccttcccttcatccctcttcttttccctttttgtcccagagctcagctctgactcaaaagtttttccatttaccatcaacatggaaacttggctcctcacgtaggtatattatcccccttttgtacatggtcttgttgatccaaactccctttctgtgaaagaggcctgtggggctcaagaagcctggtcagccagccaggctagtcccacatacctcagaaccagtttaataaaggctctatgtcattcaaaaaaaaaaataaaggccttctggcctcaacagtgacctttagcgcgcttccttaatgggagaattcagatcccgctcctgactactgccgtgggtgttacgtgcgcgagcggtttagctatctaaggaggaatcggtttcacgatcaaggaaacgagaaaacatgggg

SEQ ID NO: 466779 - DNA, 912 bp, Homo sapiens
ctgccagcaaagccctcttcaacccactggagtcagcaggcccagtgcttcataaaccaagttatgagagcagagctgagaatttctaaggagcctcctttttaaagcctttcacttcacctgctctccaacagctggaacggtcactgcgcaggatcaagctacaatgaagaggagggaggcagtctgcgcgcaccgccattttctaggaactgggaagcccccccaccccttaggaagatccatccctgtggaaccttgcccaggcttaccagcctttgctgaggttgatctattgtccctccttgtccccatcaaaatatccagcactccaccttcagggagtagacttgaccctcaaatagcaagttcagccttcccaggtctaggttccctgggaggtcaagattcgtctggttccttagtacagagggctagctgtgagttggaatccccctatgagctttagaatcagtcaagaggaattgggccccttcccttcatccctcttcttttccctttttgtcccagagctcagctctgactcaaaagtttttccatttaccatcaacatggaaacttggctcctcacgtaggtatattatcccccttttgtacatggtcttgttgatccaaactccctttctgtgaaagaggcctgtggggctcaagaagcctggtcagccagccaggctagtcccacatacctcagaaccagtttaataaaggctctatgtcattcaaaaaaaaaaataaaggccttctggcctcaacagtgacctttagcgcgcttccttaatgggagaattcagatcccgctcctgactactgccgtgggtgttacgtgcgcgagcggtttagctatctaaggaggaatcggtttcacgatcaaggaaacgagaaaacatgggg

SEQ ID NO: 466780 - DNA, 1784 bp, Homo sapiens
gaaagaagccaaacacaaaaggttacctattgtatgactccgtttacatgaaatgcccagaacgggcaaatgcattgaaacagaaagccaatcagaggatgaagggagggcagaacggggagtggctgcttaatgaatgcaagccaggccatggcccacctaaattctggaaggccccacctcccttagccccaacaggcagtgctcatcatcaacgactttcctccaagcccccgccctctgcatactgcatggactccaggagtcccctgcccccactcccacccaggaaagctggtctaggaccaatcagaggctgtggaactttctggaaggcccagggcttctccctgggtggggcagggcctctgattggaggaggcctgccagaagggtggggcgatgggcgtggctaacgggataactgccagagcagaagacagttggcagttatttcgcaaccttcatctgttcctggaagatacccgtagcctgccttccttcttgacaggctgatttaggggtgctccccaagaagatcaggactgctgaaagaatgaagaagaacttacttggcctaggatgtggctagagaacggagcgcactttcacttacctggcaaggtggttttggaagtttccacggaagccttcccagggccgctgctgcccgtcctcgcctaggtgtggagcttcccgaccggctggggagggaatgtcctgcgggagccgccgaggaccctctttagcctcttccctggcttggctgcagctgcagtctggtactcgcccattctgctcttcttcacctccgtattttctctctcacggaagaagaattccattctcccatcccaggaaggagagtgccctgcgtgccacgaaagagcccaggacccacaggacaaatacgtcactggcagacctgccttcgccagcgccagcccatctctgaaacctccagcatttgtgccccggtccggcccctcccaggcctgactctttccgtgaacggtcactgcgcaggatcaagctacaatgaagaggagggaggcagtctgcgcgcaccgccattttctaggaactgggaagcccccccaccccttaggaagatccatccctgtggaaccttgcccaggcttaccagcctttgctgaggttgatctattgtccctccttgtccccatcaaaatatccagcactccaccttcagggagtagacttgaccctcaaatagcaagttcagccttcccaggtctaggttccctgggaggtcaagattcgtctggttccttagtacagagggctagctgtgagttggaatccccctatgagctttagaatcagtcaagaggaattgggccccttcccttcatccctcttcttttccctttttgtcccagagctcagctctgactcaaaagtttttccatttaccatcaacatggaaacttggctcctcacgtaggtatattatcccccttttgtacatggtcttgttgatccaaactccctttctgtgaaagaggcctgtggggctcaagaagcctggtcagccagccaggctagtcccacatacctcagaaccagtttaataaaggctctatgtcattcaaaaaaaaaaataaaggccttctggcctcaacagtgacctttagcgcgcttccttaatgggagaattcagatcccgctcctgactactgccgtgggtgttacgtgcgcgagcggtttagctatctaaggaggaatcggtttcacgatcaaggaaacgagaaaacatgggg

SEQ ID NO: 466781 - DNA, 1088 bp, Homo sapiens
aattccattccctgcaattggagcctgaataatgagttatttcacaggaagattgatctgggtattagggcatcatttagtttgccattacaacagccaattttggttacatgctcagctgtgaaggggaaatgggccagcctgctggagctttctaaagcatggagctgagaacggtgcagtcttcagggatctggtgagcagacggctacaggatttgtaccccaggattaaagccagaaaccaaaagaccatctgccggtacccacaggagggaggatgcaggtcattttcatgtgcagtgacatcgtaggaacggtcactgcgcaggatcaagctacaatgaagaggagggaggcagtctgcgcgcaccgccattttctaggaactgggaagcccccccaccccttaggaagatccatccctgtggaaccttgcccaggcttaccagcctttgctgaggttgatctattgtccctccttgtccccatcaaaatatccagcactccaccttcagggagtagacttgaccctcaaatagcaagttcagccttcccaggtctaggttccctgggaggtcaagattcgtctggttccttagtacagagggctagctgtgagttggaatccccctatgagctttagaatcagtcaagaggaattgggccccttcccttcatccctcttcttttccctttttgtcccagagctcagctctgactcaaaagtttttccatttaccatcaacatggaaacttggctcctcacgtaggtatattatcccccttttgtacatggtcttgttgatccaaactccctttctgtgaaagaggcctgtggggctcaagaagcctggtcagccagccaggctagtcccacatacctcagaaccagtttaataaaggctctatgtcattcaaaaaaaaaaataaaggccttctggcctcaacagtgacctttagcgcgcttccttaatgggagaattcagatcccgctcctgactactgccgtgggtgttacgtgcgcgagcggtttagctatctaaggaggaatcggtttcacgatcaaggaaacgagaaaacatgggg

SEQ ID NO: 466782 - DNA, 1948 bp, Homo sapiens
aagtggagatcgctgtggtcatgagtggcaagggacaggagcgcaactgcagaggcagggaggctgtgcggaggctgcggaggagcccggagcagatgggggctgggggaggggcatcgggcttagatgtcctccctctgctcgcagctcccaggtgcccacgtgctgcgctggctggaggcagcaaggggacgagtgtgggattggacgcgcagcagctctggcctgtctcgtccacagcggtgtgcgaaggcaactccacgtgctcagagaacgaggtgtgcgtgaggcctggcgagtgccgctgccgccacggctacttcggtgccaactgcgacaccagtgagcgtggggtcgggccggtattggtcggtggggcggaatcctggagagatggggcggggtccaaggtggggcggggtcggatccgccttcggggcgggtccccagaggtggcggctggagtgcgggacgcgggcaggttccggctggctgggggcacctactcaagcaccggggccttccaccccctccgctcctcccctgcagagtgcccgcgccagttctggggccccgactgcaaggagctgtgtagctgccacccacacgggcagtgcgaggacgtgacaggccagtgtacttgtcacgcgcggcgctggggcgcgcgctgcgagcatgcgtgccagtgccagcacggcacgtgccacccgcggagcggcgcgtgccgctgtgagcccggctggtggggcgcgcagtgcgccagcgcgtgctactgcagcgccacgtcgcgctgcgacccacagaccggcgcctgcctgtgccacgcaggctggtggggccgcagctgcaacaaccagtgcgcctgcaactcgtctccctgcgagcagcagagcggccgctgtcagtgccgcgagcgtacgttcggcgcgcgctgcgatcgctactgccagtgcttccgcggccgctgccaccctgtggacggcacgtgtgcctgcgagccgggctaccgcggcaagtactgtcgcgagccgtgccccgccggcttctacggcttgggctgtcgccgccggtgtggccagtgcaagggccagcagccgtgcacggtggccgagggccgctgcttgacgtgcgagcccggctggaacggaaccaagtgcgaccagccttgcgccaccggtttctatggcgagggctgcagccaccgctgtccgccatgccgcgacgggcatgcctgtaaccatgtcaccggcaagtgtacgcgctgcaacgcgggctggatcggcgaccggtgcgagaccaagtgtagcaatggcacttacggcgaggactgcgccttcgtgtgcgccgactgcggcagcggacactgcgacttccagtcggggcgctgcctgtgcagccctggcgtccacgggccccactgtaacgtgacgtgcccgcccggactccacggcgcggactgtgctcaggcctgcagctgccacgaggacacgtgcgacccggtcactggtgcctgccacctagaaaccaaccagcgcaagggcgtgatgggcgcgggcgcgctgctcgtcctgctcgtctgcctgctgctctcgctgctcggctgctgctgcgcttgccgcggcaaggaccctacgcgccgggagctttcgcttgggaggaagaaggcgccgcaccgactatgcgggcgcttcagtcgcatcagcatgaagctgccccggatcccgctccggaggcagaaactacccaaagtcgtaggtaaggatgacagcgcggggtatcttggagaaacacctctcgacgcaggaagctgctgggaaatgggtgtgagggggtccagatctcagtgaggaaatgggggaccttgagtgttgatgtgcgtgggcgcgaggaggtgcgaccagagggaaggtaagaggtgtggcagctgctgagggcgaggcaaggtacg

SEQ ID NO: 466783 - DNA, 3556 bp, Homo sapiens
tcccaggcatcttcctactgactgcaagtgtggaacaaggagttccaggaacccacaggcaggtcgttaatgagatttccagaaaatgctctccagatgtgtctgttgtttccagaacttccagcccagctggtctctgtggtctccctaatgcttctactgctgcagctgtcccaatgtcctttcccaacctgtcacccaagaccagtaccacagagcaatgagagcagcagtggacaaacggacaaggctactcaggaagaaatttgtaaaaagattggcagtcgaaattcagtcctcacttcccccttatctgaaatctacaagacagtggtcagtatgttccaactggtgggggtccaggtttctgaagaacaactcagggacacaggacagttcagaatctgcagtccaggccactcttgtggatttcatgagacagtgaacatctctggattgcctgttacgttatccaacatcctttgtaagagcatctctgcaataactccctcttggaatgacaaattgctctttttgaactctgaacagagactacccaccttgcagtagaaatttcatctctccagataagcttgtttgcctccttttatctgctaccacaaactatataacctaaccattggcatctttggaattgcatcctatacgtttaatgtaggaacagttcctgccttaaaagggcttccacagggcagagccataacgcatatgcagaacgcaggctaaggaagtcttcggggaggaaagagtatctcagaggggcaggtgcagccacagcgtgggcccgcgtgcctggtgctaagctgggcccattacgcgtacatcacatgatttaattctcactaaattgcaagctgggatggggcggggggacgtgagggttatttttttaatctctttttgtagttggaaaatcctggagcccagaaaggtgaagcaaactgcctgaggtcaagcccataatgtgaagtggagctgcaatgtctactcaagagtgtctgacatctgcactttttactctgccaggtaagaagaccctcaccagatgtggcccctcactcctggacttccaagcctccagaatcatgaactaaatacatttctatttgttataaattactcagcctcaggtattgctagagcagtagaaaacagactgagaaaggctgtgtctccctcctcagactgaaggatctttgtgatcagatgctgtgtctatatcctttgttcatttgtttgatatttgctgaggaccttttaagtgccaggcactattctagattcagaatactatgttgaaaagacagacaaaaccactggtctcatggaacttacaagttagttgcgacaaatgacaataaacaacaaacaattttaggttacaataagtactaagaagcaaataaaagcagcataatcgtcatggtaggagtggggtgttaactgaaatgtgtgactgaggcaagagtctcaatcaatcaaggtttattaagccagagcttgagaatatgtcttggaaaaacgcaagtcatagatgcatctgtggctgttttttccagaaatgttttttttttttttttcaggaggcttagtatttatatactttctgaaagggaggtttgctttgttattgcagacttggtccccagagctcagccactcacttcctgctctttagcacaatcttagtgaagccaaagagcaaaagacctccttaatcccaactctggatttacaacaggtgcctgcaaagcatgcagcctggcagacccagaagatgcagcccatcttcagcctgtcttccagacctggcagtcatcactggaagccccagtgtctcttctctgcccctacagctcagacaacctacaacaaacgtcagtgaagacctgtccttgtcacgtcccccgcaaatgggctgttaaaaggccaggttgggaagtcacaaggatccattgttgaaatctggcaagttatttaagttctcagttcctcagtttccccatctgtaaaacagagataatagtatatagttttcagggttgaaatcagatcataactacttggctccatatgttaaaaggggtaaaaatgattatgcttactatgtgctggacactgtgcttagtaatatttaattatcatagccatcatagctcaatgaggaaggtgcattagaatcctcatttctcaaatgaagaccctgaggtgcagagaggccacacaactcttcaagtatgccacctaccaggtagtggttctcagccaggtttggtactgtctccctaggggacatgttaaaacatgggtgtgtgcttttgggttgtcatgctggctggaaacactggggttggaagagggggcaggaaggattcctagtaagtgtgcccccttggcaatgtatggctcttatcatgtgttgaatagtcctactcaggaaaaattaatcagcctctgttttgagaaacactaattacagcacaatcccacattaacagaaaaggaactgagtcccaaataaagtgatgagtccagattcacttggtgcatcaggccagaagtaggacaagagccaagcccctatcttaaccaccaatctttaccacgtgggggcccaagccagattgtggaccacctgtaggggcaggccagttggcagcagtgggttggtgcttcctctcaaaaatccattgggaatggccctgtgatttccccttcccagcctgaggaaaacttgcccccctccaccctctatcccctggctagaaagatgttcttagttatctttgattggtttctcagatttccattgcccaaggccaatttccacaaagggaaggtgtcaataattacatttctgctctccataccctgtaattaataattgcgattaatctggcacacttagtcaaatattgcaggtcctaattggctgccgtgcctttcttcttctgattgagacaatcctattcttggcagttctgcagccagctgcggtgaactcagcaggacctgtcaaatgcttctgcttggcaatttgcatgacattttgggcggcaaagcagagtagaggggtgaggtagctgggccttatgcgttggggcagaggggctgagattaggaagcccctgggtcctggtcaaggtgttggaatagatctgtttcacccttaacttgccctgatcagacagagcacctcggggtttatttcagttccagatgcaaggtagccctgccctctcctttcacactggatgtgagagggtttaaggggaggtagtctggttccctcctcctcttgtcttcttgtcccagggggcaggaagtttacttcctatcgggtggtaaaaacaaaacaaaacaaaacacaccattgtaaccctggcctctgtcaattcatctctcaggccagaggtatgtactgcagcatccagtccctaggaggtctgggttggggaatatcagattgtaagggagggaaaacaatctttcctctatgcatttaggtttgctaactggaactctgcaaattaaa

SEQ ID NO: 466784 - DNA, 3468 bp, Homo sapiens
tcccaggcatcttcctactgactgcaagtgtggaacaaggagttccaggaacccacaggcaggtcgttaatgagatttccagaaaatgctctccagatgtgtctgttgtttccagaacttccagcccagctggtctctgtggtctccctaatgcttctactgctgcagctgtcccaatgtcctttcccaacctgtcacccaagaccagtaccacagagcaatgagagcagcagtggacaaacggacaaggctactcaggaagaaatttgtaaaaagattggcagtcgaaattcagtcctcacttcccccttatctgaaatctacaagacagtggtcagtatgttccaactggtgggggtccaggtttctgaagaacaactcagggacacaggacagttcagaatctgcagtccaggccactcttgtggatttcatgagacagtgaacatctctggattgcctgttacgttatccaacatcctttgtaagagcatctctgcaataactccctcttggaatgacaaattgctctttttgaactctgaacagagactacccaccttgcagtagaaatttcatctctccagataagcttgtttgcctccttttatctgctaccacaaactatataacctaaccattggcatctttggaattgcatcctatacgtttaatgtaggaacagttcctgccttaaaagggcttccacagggcagagccataacgcatatgcagaacgcaggctaaggaagtcttcggggaggaaagagtatctcagaggggcaggtgcagccacagcgtgggcccgcgtgcctggtgctaagctgggcccattacgcttggaaaatcctggagcccagaaaggtgaagcaaactgcctgaggtcaagcccataatgtgaagtggagctgcaatgtctactcaagagtgtctgacatctgcactttttactctgccaggtaagaagaccctcaccagatgtggcccctcactcctggacttccaagcctccagaatcatgaactaaatacatttctatttgttataaattactcagcctcaggtattgctagagcagtagaaaacagactgagaaaggctgtgtctccctcctcagactgaaggatctttgtgatcagatgctgtgtctatatcctttgttcatttgtttgatatttgctgaggaccttttaagtgccaggcactattctagattcagaatactatgttgaaaagacagacaaaaccactggtctcatggaacttacaagttagttgcgacaaatgacaataaacaacaaacaattttaggttacaataagtactaagaagcaaataaaagcagcataatcgtcatggtaggagtggggtgttaactgaaatgtgtgactgaggcaagagtctcaatcaatcaaggtttattaagccagagcttgagaatatgtcttggaaaaacgcaagtcatagatgcatctgtggctgttttttccagaaatgttttttttttttttttcaggaggcttagtatttatatactttctgaaagggaggtttgctttgttattgcagacttggtccccagagctcagccactcacttcctgctctttagcacaatcttagtgaagccaaagagcaaaagacctccttaatcccaactctggatttacaacaggtgcctgcaaagcatgcagcctggcagacccagaagatgcagcccatcttcagcctgtcttccagacctggcagtcatcactggaagccccagtgtctcttctctgcccctacagctcagacaacctacaacaaacgtcagtgaagacctgtccttgtcacgtcccccgcaaatgggctgttaaaaggccaggttgggaagtcacaaggatccattgttgaaatctggcaagttatttaagttctcagttcctcagtttccccatctgtaaaacagagataatagtatatagttttcagggttgaaatcagatcataactacttggctccatatgttaaaaggggtaaaaatgattatgcttactatgtgctggacactgtgcttagtaatatttaattatcatagccatcatagctcaatgaggaaggtgcattagaatcctcatttctcaaatgaagaccctgaggtgcagagaggccacacaactcttcaagtatgccacctaccaggtagtggttctcagccaggtttggtactgtctccctaggggacatgttaaaacatgggtgtgtgcttttgggttgtcatgctggctggaaacactggggttggaagagggggcaggaaggattcctagtaagtgtgcccccttggcaatgtatggctcttatcatgtgttgaatagtcctactcaggaaaaattaatcagcctctgttttgagaaacactaattacagcacaatcccacattaacagaaaaggaactgagtcccaaataaagtgatgagtccagattcacttggtgcatcaggccagaagtaggacaagagccaagcccctatcttaaccaccaatctttaccacgtgggggcccaagccagattgtggaccacctgtaggggcaggccagttggcagcagtgggttggtgcttcctctcaaaaatccattgggaatggccctgtgatttccccttcccagcctgaggaaaacttgcccccctccaccctctatcccctggctagaaagatgttcttagttatctttgattggtttctcagatttccattgcccaaggccaatttccacaaagggaaggtgtcaataattacatttctgctctccataccctgtaattaataattgcgattaatctggcacacttagtcaaatattgcaggtcctaattggctgccgtgcctttcttcttctgattgagacaatcctattcttggcagttctgcagccagctgcggtgaactcagcaggacctgtcaaatgcttctgcttggcaatttgcatgacattttgggcggcaaagcagagtagaggggtgaggtagctgggccttatgcgttggggcagaggggctgagattaggaagcccctgggtcctggtcaaggtgttggaatagatctgtttcacccttaacttgccctgatcagacagagcacctcggggtttatttcagttccagatgcaaggtagccctgccctctcctttcacactggatgtgagagggtttaaggggaggtagtctggttccctcctcctcttgtcttcttgtcccagggggcaggaagtttacttcctatcgggtggtaaaaacaaaacaaaacaaaacacaccattgtaaccctggcctctgtcaattcatctctcaggccagaggtatgtactgcagcatccagtccctaggaggtctgggttggggaatatcagattgtaagggagggaaaacaatctttcctctatgcatttaggtttgctaactggaactctgcaaattaaa

SEQ ID NO: 466785 - DNA, 2262 bp, Homo sapiens
ctaattataatgcagcacaataacgatgaggtatgttattacctgtactgtgttaactagatcaaacaaccaacaagagaagaactggccttctcaacaagagaagagtgtgtacctctgcagagcagctgatgatggcatgagccatctaaagcatgcgcagcactctgctgataaagcacccttcacacttagtctgccttcagaagagaggagcattagaagccctcctgcctcagtccaacaggccaagcaaaatgccactcaaggtcacccagagaaagaaactaaaatgtcattacttggaattatgtctcttcattaccaaaaagaagatccaacttatgttatttctggcccatttaataaatattttttgaaggaggtcttcttatcctcgagtcatttaagaattactcacttaactcaaactgagcaacgatgccacgaacacatcaagctggcagcaccatttgctagcacctggcagatgagagagaaagaaaacctggtgtggagacccccatccattaaaggcaagagagtgaaaagtgggagagaaagctcccaagttcaacagcagtgacctagggtcatgcagtgaggacttacaaagtccaagaagaaagcatttggagaagtgctacacatgctcaactgaacttcctgtcaaattgttctcactcgtttgggcacaagtctgcttaagccatctctcattaacatttactcttgcccgaagccctctacgcccccaacccctgctaatcttccacaagcaagctgatcacactgggatctccttttcccagacacgtttgattctcactttctcctgaacctagaaatgtgcttcccaccaaagcatgccaggcactaactcgtccctactgaaaggggctgttaaaagctcatcttctttccagatggtagtgaggtgtgaggtgatcctttctctttcttttttttttttttttacttttagctacccctcaattctggtgttcagtaacaatgtattccacttaaaagagagaaatcatattaattattctaagatataaacacttaattttattcatgctcttgaattactttcctttctaccgcatgtttgtgtagctgttatatgagtcctttctactgatgtagctgtcattccttcaactcagttcttgccaaacactgagctatgtctggagatacaaagataactactcttgttgaagagatgccagtttagtgggggagacagacatgtaaacagatctgtatctgagatagatggcctgggtaggaaaagaatatatatagcacaaataactcagtggacctgcaaaaacagagcttgaggccatgatataccacaaagacccaccaaggcacaagcactgtcaacatgaaggtaaggcttccatttttgcctctttcaatctgggtacatctattctacatactctgcctttcctcctgttacaggaaaagaaggaacctcaattctacctaaagtcaatcttctccttgagctagagatccagcccctctcccataatgagggttattaactggcctaatttcaatattgtatctcagggaatagggagattggaggacagggagagatgggggaacaaccagtcagtggagcagtcagaatacacacatttatctattaaattctgtcttctatgggtgtggtttgtgatgttccaaaacaattacaatagtaacatcaaaaatcatcgattacagatcactacaatagatataataataatgaaaagttttgaaatattgtgagaattaccaaaatgtgacataggcacacaagtaagcacatgctgctggaaaaatagggccaaaacacttgttgaacacggagttgccataaccttcagttggtaaaaacaaaacaaaataccacagtatctgcaaagtgtaacaaaaaggggtatgcttgtagcactattctcattttaacttgaaatggtcagatagttggtaaatgaccaagctgggactgaattcggtccatttaactctaaaatctgtgcttaacacttatgtttacaagagagaatggtaaaaacgaatgtctgacaggagaaaacttgcagcccttttgacatgtggcttatagaatttatttcaagtaaatcagcatgatctggaaagtcaaaggcagcagagaaccaaaactgaaaaagggcttacttctagtgcatagatttttcccagaaaaggcaccaggtaatctgactg

SEQ ID NO: 466786 - DNA, 2290 bp, Homo sapiens
gagtgggttcagtggctcacacctggaatcccagtactttgagaggcagaggaggtgctctggtaaaacaagtataaaatgaatgtcaggatgttctccctcatggtgggcatcttctctgtccttaataccacccagttcttcatctttgacctgaaccagaagacacacatttgctatgaggccaagttcagcatctacgtggactcaaagtcggagctagtcacttggaccctgttccacagggctaatatcagcactggcctctccctcaccaccatcatcatcggctgcttcctcttttattgtatccacaagaatatctacatggggctgctgatctatgccatgtggatcatcacttacgagctcatcaacttctccatagtcctgctcctcaacgggatcatcaaagatcacttcaagacgctgagttatttgcactggatcttccaaatctcacacatgctcctgcactttttctgtctgcccttcatcgtcaagcatgcatacaacctttacaaggaatcccagactgtgggcaggaaacgccgccacaggctctgctccaccattgcagtgaactcatgactacctgtccgtctgggaatgttgtaccggaagttaaactgaaccatgccagatgccaggaaaggtgggagggaatggtgttcctcaacaatggaaccctccctaccctgcctgtcttctgttgatgctgcttggtttgtcagggcttttgagttttacgcactgaggaatgattctcgggagagggcaggttgtgcggatcaattattttacagatgtgttgtgtgacttgttttagcagttaatgatatgtggccttggtagttccttttcccttgaaaaatgttgggagtgaagtcaagagacatgtttgtttgtttgttttggccatactcttccaaaccatgagcatagtaatgacagtcgctggcttttactgaacactcagtgccagtctctggtgaagaatctagacacaggtaggaaaataccgacaaaggatacgatttcagccccttattcctttcctcctttcccagtcctgttcccttacaccaactgctgccactagaatcaccacctcatctcccagctccatctcaccaagtggaaaacaagtctttctaacagtgcaggtgtccccgggaagagcaacactcttaagggctgtcacccacccctgacactttcagtccgtgaagatcccccagccttccgtcctacttttcttcatacagtttattactgtgttgcagacctaggccccaatgtctgctgtttccttcttcgtgtccatatgtactcagtgttcagctcccactcataagggagaacatgcagtatttcttttttctgttcctgtgttagttcgcttaggaaacaagggttttatgcatgtgtgtttggtgtatgattgtgtgtgtctgtgcatctgtgttgtgcgtgtgaatgtatgcatttgggtctgtgtgtatgtttgtaatctgggtttgtgcatgtgcgtgtttgtatttgtgtctgttgtgtctatgtgtgtatgtttgggtatctgtgtttgtgtatgtgtatgtgaatatgtgtgtgtatttgtgtatgtttgtatgtctgtgtttgtgtatgtgagtatgtgcgtgtatttgtatatgttgtgtctgtgtgtatgtttgggtatctgtgtttgtgtatgtgaatatgagtgtgtatttgtgtatgttgtgtctgtgtgtatgtttgtatgtgtgtgcttgtgtatgtgtgtatgtgtgtgcttgtgtatatgtaaaagactgagttaaataattactaggtagcttctgtactggaagggcttaaaaagaaataattacttggtgattatcagaaataactttcatattaaagatacacaaaactcaaaatttttttcagactttacatgtttttaaaatctccttctgcctcttaccaaggatacagaaatgtatcccgtgaggggcatcttatttaaagtgtatgtttggtttctcctcctgacagcgtggcactgacaagatgtcttttatgaatgatgtgatggagaatggatttgaagtgcttactgtttagtggagagaaatacgtagataagccatcagagctaacactgattgagtgtttaccaggccccagtgtgtgctgttccccatcctgtgtccaagtgttctcattgttcaattcccacctgtgagtgagaacatgtggtgtttgtttttctgtccttgcaatagtttgctgagaatga

SEQ ID NO: 466787 - DNA, 2050 bp, Homo sapiens
atcgcttgcggctgcgcttgagcttgcataagtccttgtcgaagacctccccagagcgcagggccgacaccaggtcatcgaactctcctccctcctccagcgagctgcctgcagccaggaccttccgctgccgctgccaccgctcacgttccctctgctccttcagctgcgggcggggggccaaagataggaaccctctcagggagaggcgctgaggccagggcagccccccaaccctgggctaactcctaggccatggtcatgctgcctgcctgtatctgttggccccactttcttcctgcctaggacatacaggcccccagcttcacaccactctcttccctcaggctgggaagaagtttctctctcctggggctgacatccaacccctatggtgttcctcagttcctcagtctctgccctcctcccacacaccccagtttgggggtgttctccccaagtagcacccgtctcccctcagtcccaggcctggcactgcccctcaccatggcttccatgcgcgcccgccgctcctcctcctccttcctcctcctcatggcctctagatcctgccgggcctctgagaaggcctgcaagaaggtatcaaagatgccaaagaattcgtctggctgcatcttgctgtcatgctccccgaagtgcatcaaggccttggcgaactgtcaagggacagaacaggattggtggagagtgccctggagcatgctgggctcagcccctgaggttagctgggttctagccagagcagagcccagcgcaaggctggggactgttggcacagggggcagggctggaagaggtgagaagacacccccatcatcatcaggatcagagacaaggctaaggagaggcagctcggagaagctgaagctggacaccgtgatgaagtcgctcatgacagggacaaacttgtcactgggctcccgtacctggcgcctctgatactccagctcctgaggagggagggtgaagtgctgcttagactggtgccaagatgagagtcgggtgcaggggtcaccacatctcccctcgtcactcacaggacattgagccctttggaagagggaacaccctgcatctcaaagttctaaggatggcaaagactatgagctaacattagcagccagcccaccctgccatctttctttctctagagcactgagacccaacatgtgacctggggccagcagcatcacctaggaaattatgagaaatacagactctcagacccacaggatcagaagctgcattttaacaagactcatctttacaagactccaggagcttagggtgcagtgacgaacagtgtttgctgacagcagccctcacccagacaagaaccgaggtctcacaccagccatcatcaagcccagagtagaccccaaaagaggaaagtaagacaagaatgagggtcatcatggggagaaggaagtcttggagagaaccctcacttgactttggcagcttctggaagatgttgcagctctgaaggcatgtttagaatatcaggaaaatgcttctccaggatcatgatcagataactctccactctaagcctcctgcaaccctcagccctaccttccactttgggctttgcctcagccagccgctcctggaatttcttcttgaagaagagggcttgcagtcgctgctggtagtggtcaatcctgtagacaaggaggtcaatgtcactcttctctgggatgaacttgaggagctgcaaagagcaggcgcaagtcacacaagcaactggtttcccaaaggatccaaaaaactgagagggaagagatttggggaagatgtcacttttcctcatctgactttgccttggagtcagatgggagaatgactcctggagaacacttagccttttccagctttccccaagaaaggccggcccagggaggcttctataaaccttctccctaactcttccagcctgatttctccttgacccaagaatcgcagcctcctgggggctgttgggaaggggcgtggctgcccgctgggttcagttccccttccttcccac

SEQ ID NO: 466788 - DNA, 825 bp, Homo sapiens
ttcttgtgtatttattttagtcagtatttgtactcatttccctggagttatacctaagagtgggattactaggcaatagggcgggtatatgtttagctgtagagtgtacttccaagtagttttccaaaataattgtgccaaatgagaattccaattgcttcacatcctcgtcagcacatggcattgtcagtctttttaattttagctactctagtgggtgtgtggtgcccccttattgtggttgactgtatttctctgataactaatcatattgaacaccttttcatattcttattgtctatttggaaatcctctttcatgaagcaccccttcaagtcttctgctcatttttaagttgatttcatcattttctcattgatttgtagagttctttgttctgaatatgatctttgttatatgtatgtatagcaaatatcttcttctaaggtttgtcttcttttcactcagtaaccatgcccttgatgaacagaagttcttaactgtaatgaagtccaattgatgatgtttctttgtgtgttttctaggtttcccaaaggatccaaaaaactgagagggaagagatttggggaagatgtcacttttcctcatctgactttgccttggagtcagatgggagaatgactcctggagaacacttagccttttccagctttccccaagaaaggccggcccagggaggcttctataaaccttctccctaactcttccagcctgatttctccttgacccaagaatcgcagcctcctgggggctgttgggaaggggcgtggctgcccgctgggttcagttccccttccttcccac

SEQ ID NO: 466789 - DNA, 1960 bp, Homo sapiens
atcgcttgcggctgcgcttgagcttgcataagtccttgtcgaagacctccccagagcgcagggccgacaccaggtcatcgaactctcctccctcctccagcgagctgcctgcagccaggaccttccgctgccgctgccaccgctcacgttccctctgctccttcagctgcgggcggggggccaaagataggaaccctctcagggagaggcgctgaggccagggcagccccccaaccctgggctaactcctaggccatggtcatgctgcctgcctgtatctgttggccccactttcttcctgcctaggacatacaggcccccagcttcacaccactctcttccctcaggctgggaagaagtttctctctcctggggctgacatccaacccctatggtgttcctcagttcctcagtctctgccctcctcccacacaccccagtttgggggtgttctccccaagtagcacccgtctcccctcagtcccaggcctggcactgcccctcaccatggcttccatgcgcgcccgccgctcctcctcctccttcctcctcctcatggcctctagatcctgccgggcctctgagaaggcctgcaagaaggtatcaaagatgccaaagaattcgtctggctgcatcttgctgtcatgctccccgaagtgcatcaaggccttggcgaactgtcaagggacagaacaggattggtggagagtgccctggagcatgctgggctcagcccctgaggttagctgggttctagccagagcagagcccagcgcaaggctggggactgttggcacagggggcagggctggaagaggtgagaagacacccccatcatcatcaggatcagagacaaggctaaggagaggcagctcggagaagctgaagctggacaccgtgatgaagtcgctcatgacagggacaaacttgtcactgggctcccgtacctggcgcctctgatactccagctcctgaggagggagggtgaagtgctgcttagactggtgccaagatgagagtcgggtgcaggggtcaccacatctcccctcgtcactcacaggacattgagccctttggaagagggaacaccctgcatctcaaagttctaaggatggcaaagactatgagctaacattagcagccagcccaccctgccatctttctttctctagagcactgagacccaacatgtgacctggggccagcagcatcacctaggaaattatgagaaatacagactctcagacccacaggatcagaagctgcattttaacaagactcatctttacaagactccaggagcttagggtgcagtgacgaacagtgtttgctgacagcagccctcacccagacaagaaccgaggtctcacaccagccatcatcaagcccagagtagaccccaaaagaggaaagtaagacaagaatgagggtcatcatggggagaaggaagtcttggagagaaccctcacttgactttggcagcttctggaagatgttgcagctctgaaggcatgtttagaatatcaggaaaatgcttctccaggatcatgatcagataactctccactctaagcctcctgcaaccctcagccctaccttccactttgggctttgcctcagccagccgctcctggaatttcttcttgaagaagagggcttgcagtcgctgctggtagtggtcaatcctgtagacaaggaggtcaatgtcactcttctctgggatgaacttgaggagctgcaaagagcaggcgcaagtcacacaagcaactggtgagcagcagacatggggtacagggtgtgagaagctgtactgacttgggtcaagatggggagggtgccttgaaagagggaggcaccctcatgtggacagatttctttcatctgcctgaaggggatgacagggcacacagctctgaaattcttttttcttttttaaaattgagatgtaactgatatacag

SEQ ID NO: 466790 - DNA, 316 bp, Homo sapiens
gcagagccccacctgccccacctgccagaaccccacctgcttgaatccccaccatgcccatggcccaacctgctcatttcatagaggaagcggtcagcacgggccatccgctcaatttcatgcttgtgctcctccaggaggtcaatgtcactcttctctgggatgaacttgaggagctgcaaagagcaggcgcaagtcacacaagcaactggtgagcagcagacatggggtacagggtgtgagaagctgtactgacttgggtcaagatggggagggtgccttgaaagagggaggcaccctcatgtggacagatttc

SEQ ID NO: 466791 - DNA, 1909 bp, Homo sapiens
atcgcttgcggctgcgcttgagcttgcataagtccttgtcgaagacctccccagagcgcagggccgacaccaggtcatcgaactctcctccctcctccagcgagctgcctgcagccaggaccttccgctgccgctgccaccgctcacgttccctctgctccttcagctgcgggcggggggccaaagataggaaccctctcagggagaggcgctgaggccagggcagccccccaaccctgggctaactcctaggccatggtcatgctgcctgcctgtatctgttggccccactttcttcctgcctaggacatacaggcccccagcttcacaccactctcttccctcaggctgggaagaagtttctctctcctggggctgacatccaacccctatggtgttcctcagttcctcagtctctgccctcctcccacacaccccagtttgggggtgttctccccaagtagcacccgtctcccctcagtcccaggcctggcactgcccctcaccatggcttccatgcgcgcccgccgctcctcctcctccttcctcctcctcatggcctctagatcctgccgggcctctgagaaggcctgcaagaaggtatcaaagatgccaaagaattcgtctggctgcatcttgctgtcatgctccccgaagtgcatcaaggccttggcgaactgtcaagggacagaacaggattggtggagagtgccctggagcatgctgggctcagcccctgaggttagctgggttctagccagagcagagcccagcgcaaggctggggactgttggcacagggggcagggctggaagaggtgagaagacacccccatcatcatcaggatcagagacaaggctaaggagaggcagctcggagaagctgaagctggacaccgtgatgaagtcgctcatgacagggacaaacttgtcactgggctcccgtacctggcgcctctgatactccagctcctgaggagggagggtgaagtgctgcttagactggtgccaagatgagagtcgggtgcaggggtcaccacatctcccctcgtcactcacaggacattgagccctttggaagagggaacaccctgcatctcaaagttctaaggatggcaaagactatgagctaacattagcagccagcccaccctgccatctttctttctctagagcactgagacccaacatgtgacctggggccagcagcatcacctaggaaattatgagaaatacagactctcagacccacaggatcagaagctgcattttaacaagactcatctttacaagactccaggagcttagggtgcagtgacgaacagtgtttgctgacagcagccctcacccagacaagaaccgaggtctcacaccagccatcatcaagcccagagtagaccccaaaagaggaaagtaagacaagaatgagggtcatcatggggagaaggaagtcttggagagaaccctcacttgactttggcagcttctggaagatgttgcagctctgaaggcatgtttagaatatcaggaaaatgcttctccaggatcatgatcaggaggtcaatgtcactcttctctgggatgaacttgaggagctgcaaagagcaggcgcaagtcacacaagcaactggtttcccaaaggatccaaaaaactgagagggaagagatttggggaagatgtcacttttcctcatctgactttgccttggagtcagatgggagaatgactcctggagaacacttagccttttccagctttccccaagaaaggccggcccagggaggcttctataaaccttctccctaactcttccagcctgatttctccttgacccaagaatcgcagcctcctgggggctgttgggaaggggcgtggctgcccgctgggttcagttccccttccttcccac

SEQ ID NO: 466792 - DNA, 1468 bp, Homo sapiens
atcgcttgcggctgcgcttgagcttgcataagtccttgtcgaagacctccccagagcgcagggccgacaccaggtcatcgaactctcctccctcctccagcgagctgcctgcagccaggaccttccgctgccgctgccaccgctcacgttccctctgctccttcagctgcgggcggggggccaaagataggaaccctctcagggagaggcgctgaggccagggcagccccccaaccctgggctaactcctaggccatggtcatgctgcctgcctgtatctgttggccccactttcttcctgcctaggacatacaggcccccagcttcacaccactctcttccctcaggctgggaagaagtttctctctcctggggctgacatccaacccctatggtgttcctcagttcctcagtctctgccctcctcccacacaccccagtttgggggtgttctccccaagtagcacccgtctcccctcagtcccaggcctggcactgcccctcaccatggcttccatgcgcgcccgccgctcctcctcctccttcctcctcctcatggcctctagatcctgccgggcctctgagaaggcctgcaagaaggtatcaaagatgccaaagaattcgtctggctgcatcttgctgtcatgctccccgaagtgcatcaaggccttggcgaactgtcaagggacagaacaggattggtggagagtgccctggagcatgctgggctcagcccctgaggttagctgggttctagccagagcagagcccagcgcaaggctggggactgttggcacagggggcagggctggaagaggtgagaagacacccccatcatcatcaggatcagagacaaggctaaggagaggcagctcggagaagctgaagctggacaccgtgatgaagtcgctcatgacagggacaaacttgtcactgggctcccgtacctggcgcctctgatactccagctcctgaggagggagggtgaagtgctgcttagactggtgccaagatgagagtcgggtgcaggggtcaccacatctcccctcgtcactcacaggacattgagccctttggaagagggaacaccctgcatctcaaagttctaaggatggcaaagactatgagctaacattagcagccagcccaccctgccatctttctttctctagagcactgagacccaacatgtgacctggggccagcagcatcacctaggaaattatgagaaatacagactctcagacccacaggatcagaagctgcattttaacaagactcatctttacaagactccaggtgactcatgcacaaattaaagagacatttttctaaagctcccagctgattcagaagctgctggtccatgtaccgcactttgagtagcacttaacaggactataaaattgtaaatttggaaatcatcttcccccaccgtagtggcaacaaaacgttctttgtcatcctt

SEQ ID NO: 466793 - DNA, 1993 bp, Homo sapiens
aagcaggctggtccggccgggatgttaggatcagaggagccgacaggtgagaacagtgtgcatgtgggtgtgaacactcagtgtggaaagcaggtgtgtgtgtattcaatcccccaatggtgtcaagggctcctcaaaatgccatgggtccccaggtcattgtgataaacactgtccccatcctgctgtggttgtggctggaaggtccctcaaggagtagactgtccctgagaacaagatggatgcagggtagtgacgagttcaagcatagctagagttactgttttttagcaactcaacctgattttttaagctgcctacttttactttttactgtgagcttctgtccatcaccatgtaatttgtaataataataatacaaaaagaaaaacgagagagagaagaggacaagatgtccacagaggaatctgcattcgaggctgtttgcagaactaccgcgtttgtaaggactgtttcccactgggaactgtgtgtaattaatgagcagttttatgctttccctctcgtctgtgtacggtgtgattgttgtgtgtttcagaatctctattcagaaccaatagctggtaatgcctgctggctcgctgccctcaagttagcctctgaacgtgccctgcacctagagaagcagccttctcacccgcctcacctggctgctccagcggccaggccagccacctgaccatgaccattgctgatgtgcaacaggccttaattgaaaaaacacacaagtacatacatgcacatgcgcgcacacacacaggtgatttcacaggtagatctggtccctcttgctgtctccaatgctctagaaagcagcaagtaggcagctgacagtgttcccagggtgagtggcatctcccctcatcatcagaaagattcagtcaaattttggcccagagctgaagaggaggacttgggaatgtcagggaaaacatgacagggctaggggttaacaggcttctttggccaggagatggtttccagttcaccgtcaacccaaaagctctcttcaggtcatggcaaacagaccagggctgtgggtgtggctgtgcttggcactgactcccccacaggccgctgtccaggttggctcaggattccagctgccatccccaggcaggcccctccgctggctcggctgctttcacaatcaccatgtctgtctattagagactgtgccattcaaggagacggggtccccgggggtgcagacttgtaaaattttttaatttttcaacttggctgaactggtccccatcaacaggaaaagccttcggaagtgaatttacagatttctcccatgtttgaaattaacataacatgaacccagaaggcagagcttgcagtgagctgagatcgcaccagtgcactccagcctgggcaacagagtgagactctgtctaggtaggtaggtaagaaggaaggaaggaagaacagacctggatggagttattgggaacatgtcttatcaatgttgaagggccccctatcactgtagggagacatccacgtgggttgttttcgtctgctgtgaaaatctagggttggaatcatggaagcaaactgcaggaattcttaatcatcctgctcacgtggtgggcatcagagggtgtctgcttggcccccacagcactgggacagtcagagaggccatgagtggatgacgccctgatcactgccctttgcagtccaggaatacctcactgggctggggccataccctgtgccctctggaagacaagcctgcgcacttactatgtgccagatgccatgcacagtgccctagttccttgctgtagcaccaacacgtcccacgctggtgcttaaatgcacgcaaacaactttggtggttgtggcccgaaaagctcaaatgttaaagttaagcagtcaggcaagctagaagaggtgaggagcctcctagaaaactcattcgatgacacgcgcttccctcacctattcagatacttgccga

SEQ ID NO: 466794 - DNA, 1294 bp, Homo sapiens
gggctgtaccggcccgggagtttgggagccttaattgaaaaaacacacaagtacatacatgcacatgcgcgcacacacacaggtgatttcacaggtagatctggtccctcttgctgtctccaatgctctagaaagcagcaagtaggcagctgacagtgttcccagggtgagtggcatctcccctcatcatcagaaagattcagtcaaattttggcccagagctgaagaggaggacttgggaatgtcagggaaaacatgacagggctaggggttaacaggcttctttggccaggagatggtttccagttcaccgtcaacccaaaagctctcttcaggtcatggcaaacagaccagggctgtgggtgtggctgtgcttggcactgactcccccacaggccgctgtccaggttggctcaggattccagctgccatccccaggcaggcccctccgctggctcggctgctttcacaatcaccatgtctgtctattagagactgtgccattcaaggagacggggtccccgggggtgcagacttgtaaaattttttaatttttcaacttggctgaactggtccccatcaacaggaaaagccttcggaagtgaatttacagatttctcccatgtttgaaattaacataacatgaacccagaaggcagagcttgcagtgagctgagatcgcaccagtgcactccagcctgggcaacagagtgagactctgtctaggtaggtaggtaagaaggaaggaaggaagaacagacctggatggagttattgggaacatgtcttatcaatgttgaagggccccctatcactgtagggagacatccacgtgggttgttttcgtctgctgtgaaaatctagggttggaatcatggaagcaaactgcaggaattcttaatcatcctgctcacgtggtgggcatcagagggtgtctgcttggcccccacagcactgggacagtcagagaggccatgagtggatgacgccctgatcactgccctttgcagtccaggaatacctcactgggctggggccataccctgtgccctctggaagacaagcctgcgcacttactatgtgccagatgccatgcacagtgccctagttccttgctgtagcaccaacacgtcccacgctggtgcttaaatgcacgcaaacaactttggtggttgtggcccgaaaagctcaaatgttaaagttaagcagtcaggcaagctagaagaggtgaggagcctcctagaaaactcattcgatgacacgcgcttccctcacctattcagatacttgccga

SEQ ID NO: 466795 - DNA, 2576 bp, Homo sapiens
gttgttacatgtactgtctcatgtcctcacatgtagcagatgagtaaactgaggtggctggtagcgggttcaggtgttggctgggggtgtcagttgctcaccaggcagaaggaacggctagtgcaaagatcctgcggcagccacaggcttggtggtttcaaggaagcacaagaaagccaggtggcacaagaaagccaggtggctggggacccagagggaaggcagaaggagatgagggtgatagtgcccagctctgggctctgctcccagctgcggaagccacagctgtgtcccacgtgcagtgcctcagaaggcagaggaagccttgaggtgggggcccaagacccagattctgacatcagctctgccactgagaacagcgtgacctcaggcaagtccctcttgggcagctgggctgaggactggaacattctgtggcaagcaggaggcctcagcagagatcaccaagacccagcacacctggtgcagacagccacggcatcctccttcctgcaggtcacccccacgagccacttaacctctcagagcctctgcttctcacctgtcaagtgtgtgaggtagggtaccagttagtcacggtacttgctgtctcacagaggagccgacaggtgagaacagtgtgcatgtgggtgtgaacactcagtgtggaaagcaggtgtgtgtgtattcaatcccccaatggtgtcaagggctcctcaaaatgccatgggtccccaggtcattgtgataaacactgtccccatcctgctgtggttgtggctggaaggtccctcaaggagtagactgtccctgagaacaagatggatgcagggtagtgacgagttcaagcatagctagagttactgttttttagcaactcaacctgattttttaagctgcctacttttactttttactgtgagcttctgtccatcaccatgtaatttgtaataataataatacaaaaagaaaaacgagagagagaagaggacaagatgtccacagaggaatctgcattcgaggctgtttgcagaactaccgcgtttgtaaggactgtttcccactgggaactgtgtgtaattaatgagcagttttatgctttccctctcgtctgtgtacggtgtgattgttgtgtgtttcagaatctctattcagaaccaatagctggtaatgcctgctggctcgctgccctcaagttagcctctgaacgtgccctgcacctagagaagcagccttctcacccgcctcacctggctgctccagcggccaggccagccacctgaccatgaccattgctgatgtgcaacaggccttaattgaaaaaacacacaagtacatacatgcacatgcgcgcacacacacaggtgatttcacaggtagatctggtccctcttgctgtctccaatgctctagaaagcagcaagtaggcagctgacagtgttcccagggtgagtggcatctcccctcatcatcagaaagattcagtcaaattttggcccagagctgaagaggaggacttgggaatgtcagggaaaacatgacagggctaggggttaacaggcttctttggccaggagatggtttccagttcaccgtcaacccaaaagctctcttcaggtcatggcaaacagaccagggctgtgggtgtggctgtgcttggcactgactcccccacaggccgctgtccaggttggctcaggattccagctgccatccccaggcaggcccctccgctggctcggctgctttcacaatcaccatgtctgtctattagagactgtgccattcaaggagacggggtccccgggggtgcagacttgtaaaattttttaatttttcaacttggctgaactggtccccatcaacaggaaaagccttcggaagtgaatttacagatttctcccatgtttgaaattaacataacatgaacccagaaggcagagcttgcagtgagctgagatcgcaccagtgcactccagcctgggcaacagagtgagactctgtctaggtaggtaggtaagaaggaaggaaggaagaacagacctggatggagttattgggaacatgtcttatcaatgttgaagggccccctatcactgtagggagacatccacgtgggttgttttcgtctgctgtgaaaatctagggttggaatcatggaagcaaactgcaggaattcttaatcatcctgctcacgtggtgggcatcagagggtgtctgcttggcccccacagcactgggacagtcagagaggccatgagtggatgacgccctgatcactgccctttgcagtccaggaatacctcactgggctggggccataccctgtgccctctggaagacaagcctgcgcacttactatgtgccagatgccatgcacagtgccctagttccttgctgtagcaccaacacgtcccacgctggtgcttaaatgcacgcaaacaactttggtggttgtggcccgaaaagctcaaatgttaaagttaagcagtcaggcaagctagaagaggtgaggagcctcctagaaaactcattcgatgacacgcgcttccctcacctattcagatacttgccga

SEQ ID NO: 466796 - DNA, 812 bp, Homo sapiens
tcccatgcacacgccagcgtgcagtgtgtgtgcattgcatatgtatcagtgtgcatgtgtatgcaagagcaattgtcagtgtgtcatgtgtatgagtgtgtatgtgtgtgtcagtgcatatgtgtgtaagtgtgtcagtgtgcatgtgctacacaggaagcacgacccagtatctgctcctggtgaggcctcagggagcttttactcttggtggaagatgaagcaggaacagataagaaaactgagacacagaaaagtcacacaagattatcgaggtcaacacagagaacagtggaacctgcacctgaccccaggcaggcggaaccttcatgaccacaccacaccaccacagggaacaggcagggaaaacaatgggtctagcaggacaaaagtgacatttcccagagtttcttgctgtttggatctggctgcagtttcagttttgccaagaagaggcatttccatgagctctggacagtggcagagaggcagaggtgctccactgcagtgtgctggatggtccacgggctcctgccaatgtgaggatttgcagcaactggtatatccatggtcttgtcaccagcttcctgaattcggggcagctggagccacactagtggtccttccttgcaggggcagcagctgtctcctggtctcagaatcacagctgtggggatgcaaccttaagccaaaagcctagcggtgggtggtcctaaacttcttttgtctaggccctctgatccctctgtaagtcgctatttcccttattaaatctctttctgctggaaaaaataaaaagggagccgcctaag

SEQ ID NO: 466797 - DNA, 931 bp, Homo sapiens
tcccatgcacacgccagcgtgcagtgtgtgtgcattgcatatgtatcagtgtgcatgtgtatgcaagagcaattgtcagtgtgtcatgtgtatgagtgtgtatgtgtgtgtcagtgcatatgtgtgtaagtgtgtcagtgtgcatgtgctacacaggaagcacgacccagtatctgctcctggtgaggcctcagggagcttttactcttggtggaagatgaagcaggaacagataagaaaactgagacacagaaaagtcacacaagattatcgaggtcaacacagagaacagtggaacctgcacctgaccccaggcaggcggaaccttcatgaccacaccacaccaccacagggaacaggcagggaaaacaatgggtctagcaggacaaaagtgacatttcccagagtttcttgctgtttggatctggctgcagtttcagttttgccaagaagaggcatttccatgagctctggacagtggcagagaggcagaggtgctccactgcagtgtgctggatggtccacgggctcctgccaatgtgaggatttgcagcaactggtatatccatggtcttgtcaccagcttcctgaattcggggcagctggagccacactagtggtccttccttgcaggggcagcagctgtctcctggtctcagaatcacagctgtggggatgcaaccttaagccaaaagcctagcggtgggtggtcctaaacttcttttgtctaggccctctgatccctctgtaagtcgctatttcccttattaaatctctttctgctggatactttgggtgtttctactttctacacagaatgctgattgacatataggacacggctgggacaggtggatgctgggctgaacaaaggaggggcctgggcctgattcagaggccaaggaagactctgacactggtgtctgtgatg

SEQ ID NO: 466798 - DNA, 2848 bp, Homo sapiens
ctccctccagagcccacatttgggcccagccccgtccaaggctgcatcccggccctatcccgggtcacggagtgacccttcctcgtcccgatcaccccgcccggtccacccgccatgggcttcttagaggaggagggcagatggaacctgtccttctccggcgccggctacctgggcgcccaccacgtgggcgccaccgaatgcctgcgccagcgagccccgcgcctcctccagggcgcccgccgcatctacggttcctcgtctggggcgctcaacgcagtcagcatcgtctgcggcaagtcggtcgacttctgctgctcccacctcctgggcatggttgggcagttggagcggctgagcctaagcatcctgcacccggcctacgcgcccatcgagcacgtcaagcagcagctgcaggatgctctgccccccgacgcccacgtcctggcctcccagcggctgggcatttcgctgacccgctggcctgacggacgcaacttcttggtcactgacttcgccacctgcgatgagctcatccaggccttggtctgcaccttatactttcctttctactgcgggctgatcccccccgagttcagaggggagcgctacatcgatggggctctgagcaacaacttgccctttgcagactgcccctccaccatcacggtgtcgcccttccatgggacagtggacatctgcccccagagcacctcccccaacctgcatgagctgaacgtcttcaacttcagcttccaaatctccactgagaacttcttcctggggctcatatgtctcataccccccagcctcgaggtagtggccgacaactgcagacaaggctacctggatgccctgaggttcctggagagacgtggactcaccaaggaaccagtgctatggacgctggtgtctaaggaacccccagccccggctgacggaaactgggatgctggctgtgaccaacgctggaaggggggcctgtctctcaactggaaagtgccccatgtgcaagtcaaggatgtacccaactttgagcagctctcaccagagctggaggctgcactgaagaaagcatgtacgagggatcccagccggtgggcccgcttctggcactcggggcctggacaggtgctgacgtacctgctgctaccctgcacactgcccttcgagtacatctacttccgcagcagaaggttggtggtgtggctgcccgatgtgccggcggacttgtggtggatgcagggcctgctgaggaacatggccctcgaggttttctccaggaccaaggcccagctccttgggcccatcagccctccggccactcgcgtcctggaaacaagccccctccaaccccagatagctcctcatagagaggagctcgggcccacccaccaggcctgagggggccgagcagggccagcccagtgactggtgtcccttgattcctgctctggcctttgtcctgtgtgcccacatctgccccagcgggaagaggccctgccaatctccgtggagaccctgcagcttggagcccgttccttggggcgcagcctgtcagcatgtccccggtcactgtgtacccaggtcacctgccctccctcttgccccgtctcatcagggagagaaaggaggacagccacagagacacatgtcttactttcagaatttccacggggggactaggagggcagcattgctggggagaggggctcctgttctgccgtggagctgcccacggagcacctcacagaagattgagaaagtgcctgatgcccgcgtcagagaccagaggagccaactgagatgatggggtgggggtgctccccccagactttctcagtcctgcagcggcccttgggggtgacccccggcatctaccccactcaggaaaccttgacttctgaattcctatcaggtccagagggtggaaggccctggcaggaagcaggaggaggaggagaggggggtccaggtcttttcaggatcccagctgtgggtgcttctgttgggcccagtggcccctgctatccccacagcctcattcctgcagaaggtttgtgacgtagctgtgcctgtacctggggcagagaggatgccagggacaccaggcctctggcctctccacgagtcactgctctccccattggcagcacgggacccatgctgtgcccccggccaggccctgaggaaatgctcagcctcagtggagatggggaggttagagagatggaggcgtgagtgagaacgggaagcaaaggaatacacgtgggaactaaagagaaaaatgaccagcctgggcagcatagcaagaccctgtctctaaaaaaaataataaaaacttagctgggcatggtggtgcatgcctgtggtcctggctacttgggaggctgaggatggaggatcatttgagcccaggaggtcgaggctgcagtgaaccgtgatcacgccactgcaccccagcccaggcaacaaagtgagcccctgtctctaaataaataaagagacaataagccactcattcattctttcattcatttatcagcttatgcttagaccccctgggtctgagcaggactctgcccctctggccatctcctgggtgggggcagccagaaacctctctgagccctggagccctggagccctggagcagctatggtgcccgtttgtgggccacattcctgggcctgctacaagcctccctgcctggctttctgagcaccagttgtgtgctgggtgtttcctgctgcctgaggcagatcccttccccaaggagctcctgtgcctttaatgctgtctccatggaggtaacaggtaatgcagccctcacaagtacacatcacct

SEQ ID NO: 466799 - DNA, 1239 bp, Homo sapiens
gccaccttggcagctttttaatcaaagaccaggcagttgtttccttgaaaagtcaggccacaagaaacctggatgcttgtgcttacatcctgacactctgggaatggaaagatggagcaggaagctcataccccatggctccaggggtagaagagagctaaaagttcagaaaaaggaatccacggtgtcaacaggccaagtttgaatttgggcaggagatcagcctgggtgggccccatgagtgtgccagtctgatatggtgagataagcctgggacagatgtgctgccgcattcgtgactagaaaagagtccccaggaatttctggctcctgccttcagattgtgaactttccaggttggtagatcagcttaggtagaacagttctcggtgagggccagctacatacctggctaagcgctgcccactgcagaaaagctcatcacccgggacctgatctccaggactcagaagcacttggaggaaggcctattcacttagaagcagttaccagtgctgggcagtgtcctccaagtgccagaggagtgctgtggagaaaagaagtccatggaagccaggagatgggcaagattttgcctcttcaaggtgaatgcggcttcaaggggctatctttgtgctcctgccccacctggggcccatcctggtctggctgttcactcgtgatcacatgtctggttggtgtgagggcccgaggatgctgtcctggtgcccattctacaaagtcttattgcttgtacagacagccatctactctgtcgtgggctatgcctcctacctggtgtggaaggacctgggagggggcttggggtggcccctggccctgcctcttggcctctatgctgttcagctcaccatcagctggactgtcctggttctctttttcacagtccacaaccctggtctgctgacccccggcctctatgcccaggccctgctgcacctgctgctgctgtatgggctggtgaatggaaacatagagaggctagacaagtaccagaaaaatccccctagcgtccacttgcacctactctaacacatttctcattttaagggctgaaattcccctctcaagttgattgtagtttgtcacctcttcccaggagtgagaatttaaaccttcctctggtgaggcttctattttccaccagccctgctcctggcctctctgctcccttcccaatgagggcagctccacatccagccaagatccaaggaacaa

SEQ ID NO: 466800 - DNA, 2188 bp, Homo sapiens
aagcaagcaaagaccgcggtcccggatcctgcaacttctacctcattttctccaggcctctccacttgcccgagctctcagccaccaggagacagacggaaggggcttctggattgcgttgggagcgggcactgtcccctacccactcctgctcagtttcccaaagtccagcgacttccgaccctccttggggggaaaaataccagtacccagacacctttgcaccctgttatatgactgggcttgcttcaggaatatcttacaaagaagaagaagaagaaagaacggcttggagtcatgtttacatctagttctactgatccgttcacatctggagagtttatttataactccctctataactctctgtttggagacactgtggctctattgacagactgatatctaggaaatattgctctatgtctaaccgtacctaaatgtgctgtggttgtatttacagatttatgtttgagggaaatataactatttccattgtatttgtgcatatacagtagttataggagcagatttatatatgggaaaatatacgactctcttacagccatccagctttatgtacatttgatatcctgacagatttatatctctgaacagctatatagataaaaacgtatattgttagaattatgtatcagaagatatatacttattgattgtgaaatagagtagttagagcattcatttagagccatatatggctatggagatattgctatattattatcactatatataggcatatctatttataactacatagttataaaaatacatataagtaattacagtcctatatgtgcatgctgcaatctctctctagagttatagacactttcaaatataactctatagagagatctgtatgcatataaggtgtaattatcttgtgatgtgtttacattgggacttaggcccgtctgtctagaacacacatatttatatgtaggggctgggagagacttgttcatagatatctgcagagggccaactggaaacactgtatctgccctctaggaaaccagctaggagagttgtgtacttacggagggatggagttacaaaaggagatcagcggacccacgtcagagaagatgtttgagtcttttcgcggctcttctctgagaaatgaagccacaccacgatacagtcagcaagaggaagccaggaatgagagatggcaacaatccctgtccctggaacgctggcctccctgcacaagccaccctttaggaaccccaccccttatgcctgtgacggtggcaagccgaagttgcgtcagggctgccagggccttggagggttggggttggggcgaattttgcagaaacctctttgctcctccggtaggcattcgaaaacgtggcttggaacgaccctcgggcgagagagcagcccaggggcatgcaggccgaactgtcctagagatcacggaccgaggcacgaattctggggagactcaccccaaccaacaccatccgggcaggcctgaggctgggttcctgtgctgcttcccccgtctccgctgggctttcctcatggtggtcggccctttgcgactcctggcatctggagacattcccgtcgaccccgtgaagttgttaggccggagcctcagatccccgaaacccaagcacgccagggagggctcctgcttcgccaagcctcggagactggtttctaagacaaccgtgggaaccactgtgacgggagaagccgctcgcgcctcgcgcatgcgcattggctgcaaattcactgatccatcagccctctgcctccctcctcctttgaaagagcagtggcctgccccgcttctaaaagccctggggatccggaaagccgaccgcgctttacaggtcaactgcaaagaggaacagaggcgaatcctaggtggagaccatgtgaccacgcgtggcactggcctatcccacagcaagaagagccatgaaaagacacaagcatcttctctgacgtgggtccgctgctctcctgtgggacaaagagctcctgttggggctcttgtcctcgtctgcagtggactgcgggattctactctcgacgagaacgaccctcggatgagagagcagcccaggggcacgcaggccgacctgtcttagagatcacggatggcggcacgacttttggggagagtcaacccaaccaacac

SEQ ID NO: 466801 - DNA, 3481 bp, Homo sapiens
ttctggagggcctcaggaagagctactgggaagtctcagcctgtggcctggctgggtagccaggtgagcaggaggcctttggctttggctggcacaggggtgaaggagagccagcggcattgagtaaccaggcgaatgtgcccccaggagagttcattccaaccctcccagttcctactgctggtgggggtcccagtggcaagtgtcctccttctggcccaatgccttcgatggcactgccctagaaggctgctgggggcctgctggacactgaatggtcaagaggaaccagtgtcccagcctaccccccaactagaaaatgaggtctcaaggcagcacctgccagccacactgccagagatggttgccttctaccaggagctacacacacccactcaaggccagaccatggtccgccagttgatgcacaaactgttggtgttttcggctcgagaggtggatcaccgcggcggttgcctgatgctccaggatacaggcatctccttgctcatcccaccaggtgctgtggctgtgggccgccaggagcgggtgtctttgatcctggtgtgggacctgtcggacgccccatcgctgtcccaagcccaggggctggtaagccctgtggtggcatgtggcccccatggggcctccttcctgaagccttgcactctcacgttcaaacactgtgccgagcagcccagccatgctcgcacctacagcagcaacactaccctgctggatgccaaggtatggaggcccctggggcggccgggggcccacgcctcccgggatgagtgtcgcatccacctctcccacttcagcctctacacctgtgtgctggaggcacctgtggggcgcgaagcccgcaaatggctgcagctggccgtattctgctcaccgctggtgccaggacagtcccatctgcaactgcgtatctacttcctcaacaacacgccctgcgccctgcagtgggcactgaccaacgagcagccccatggtgggcgcctgcgtgggccctgccagctcttcgacttcaatggggctaggggcgaccagtgcctgaagctcacgtacatctcagagggttgggagaatgtggatgacagcagttgccagctggttccccatctccacatctggcatggaaagtgccccttccgctccttctgcttccggagaaaagcagccgatgagaatgaggactgttcagcactaaccaatgagatcattgtcaccatgcacaccttccaggatggcttggagaccaagtatatggaaatcctcagattccaggcatcagaggaggaatcctgggcagcgccaccacctgtttcccagccgcccccatgcaataggctgcccccagagctctttgagcagctgcggatgttattggagccaaacagcatcaccggcaatgactggcgcagactggcctcccacctggggctttgcggcatgaagatccggttcctgtcctgccagcgcagccccgcagcggccatcctggagttgtttgaggagcagaacggcagcctgcaggagctgcactacctcatgaccgtcatggagcggctagactgcgcctccgccatccagaactacctgagtgggacacacggcggcagcccaggccccgagcgcgggggcgcccgggataaccagggcctggagctggacgagaagctctgagcgcccagcgggcagggccggaggagaaaacattaaagctgagtagaaacttcaagatgatcattctggcccagcccttttatctctttatctccaatggtgtgcgttttaagtttctctgacttggtttttctgtccctgtctcccacagttgttcccgctctgcacctgtgtttcagttactctctctctctgtcttagatctttttgtttctgcctagtctctgtgccctgtctttgtgtgtttctttctctgcctgaaaccctccctcttttcccttcaggcatatgtctctaaaccaatgttatgtatcaaagactgttgaaagagacagggctactctaggaatggatgggtggggatattttccccatggatcaagatccagtttagggttgggaaataaaggatagggataaaagaggcaccccattcagtcagcagatacttattcagcacctactatgtgtttgatactgtatacaaaagacatgaatgggctgggtcctgaacagagaataaagggtttgactccattctggaaattcttttgtttgcaaacaggtgttgttaatttgttcaaaggcaggcaaacaatctctctggcaacacaattttcttctgtatttaattaaaaaatattaaagctttttttctatgatgaatgataaaatatgaaaattgccttcctttgttactaactatattttgctcagattggcaaatttggatgtgagtatgaatgattttatttggtaaaattgtacctatggggatgggttggagggaagcattttgtagattgtgcttccagtatgaaaattacctgggtcccgcatggtaagtcagggaggttcccttccttttctgttagatgcaagccttcagaagcaggcctttccatcccttccctgttcccctatccccaccagtcctctcctacccttctcatctgtcctccttaccccatcgggtgctgccagtcacgccagattagtgccccggacttttcccccttcacttagctcaggattgaactgtgcagtagcccggcactgtttagccaaagacatcattgtgttccttcctaccctggaaaaaatcattttaagagtttcacatctactggagttgcaaatagaagccacacagattccagtgatgggaatagaatgctttctggccccaactccaatttctcaaaatgcgtttccagtgctggcaaagggaggcttggaaatcctggggtagatgcaggccaagtgattcctataaggcagacacttcctttctcacatcaaacccatttggcatgttatgtattggcacctaatgctgagagatggtgtgccccagtgagcatcaggagacttaacatttagccctgactcatactaactagaacagctcttctttgtgctttaaactcttccttggaatgaagctaccatattagaggctgtcccagggcctttgatttcatagacttatgcagaggtggcacactggtcacccaaggaacgttcacttggggatttttttttctttttgaattgccttcaaatagcaaacaattgatcactgcttgtggccttacttccagccctttccctgatgaagagttgcctaaatcacctgctgaaaaacactgcgtttgtgatttctgctttttcacatgttgcagaggcccacgtctacacttcctcctgctggatttggagtctggggaaaggcgatggggaaatgaaagggtaaggttgggcctaggtctgtggggttggagcctct

SEQ ID NO: 466802 - DNA, 3445 bp, Homo sapiens
aactggaccagccagcagcctctaagagctcctagacggcctttggctttggctggcacaggggtgaaggagagccagcggcattgagtaaccaggcgaatgtgcccccaggagagttcattccaaccctcccagttcctactgctggtgggggtcccagtggcaagtgtcctccttctggcccaatgccttcgatggcactgccctagaaggctgctgggggcctgctggacactgaatggtcaagaggaaccagtgtcccagcctaccccccaactagaaaatgaggtctcaaggcagcacctgccagccacactgccagagatggttgccttctaccaggagctacacacacccactcaaggccagaccatggtccgccagttgatgcacaaactgttggtgttttcggctcgagaggtggatcaccgcggcggttgcctgatgctccaggatacaggcatctccttgctcatcccaccaggtgctgtggctgtgggccgccaggagcgggtgtctttgatcctggtgtgggacctgtcggacgccccatcgctgtcccaagcccaggggctggtaagccctgtggtggcatgtggcccccatggggcctccttcctgaagccttgcactctcacgttcaaacactgtgccgagcagcccagccatgctcgcacctacagcagcaacactaccctgctggatgccaaggtatggaggcccctggggcggccgggggcccacgcctcccgggatgagtgtcgcatccacctctcccacttcagcctctacacctgtgtgctggaggcacctgtggggcgcgaagcccgcaaatggctgcagctggccgtattctgctcaccgctggtgccaggacagtcccatctgcaactgcgtatctacttcctcaacaacacgccctgcgccctgcagtgggcactgaccaacgagcagccccatggtgggcgcctgcgtgggccctgccagctcttcgacttcaatggggctaggggcgaccagtgcctgaagctcacgtacatctcagagggttgggagaatgtggatgacagcagttgccagctggttccccatctccacatctggcatggaaagtgccccttccgctccttctgcttccggagaaaagcagccgatgagaatgaggactgttcagcactaaccaatgagatcattgtcaccatgcacaccttccaggatggcttggagaccaagtatatggaaatcctcagattccaggcatcagaggaggaatcctgggcagcgccaccacctgtttcccagccgcccccatgcaataggctgcccccagagctctttgagcagctgcggatgttattggagccaaacagcatcaccggcaatgactggcgcagactggcctcccacctggggctttgcggcatgaagatccggttcctgtcctgccagcgcagccccgcagcggccatcctggagttgtttgaggagcagaacggcagcctgcaggagctgcactacctcatgaccgtcatggagcggctagactgcgcctccgccatccagaactacctgagtgggacacacggcggcagcccaggccccgagcgcgggggcgcccgggataaccagggcctggagctggacgagaagctctgagcgcccagcgggcagggccggaggagaaaacattaaagctgagtagaaacttcaagatgatcattctggcccagcccttttatctctttatctccaatggtgtgcgttttaagtttctctgacttggtttttctgtccctgtctcccacagttgttcccgctctgcacctgtgtttcagttactctctctctctgtcttagatctttttgtttctgcctagtctctgtgccctgtctttgtgtgtttctttctctgcctgaaaccctccctcttttcccttcaggcatatgtctctaaaccaatgttatgtatcaaagactgttgaaagagacagggctactctaggaatggatgggtggggatattttccccatggatcaagatccagtttagggttgggaaataaaggatagggataaaagaggcaccccattcagtcagcagatacttattcagcacctactatgtgtttgatactgtatacaaaagacatgaatgggctgggtcctgaacagagaataaagggtttgactccattctggaaattcttttgtttgcaaacaggtgttgttaatttgttcaaaggcaggcaaacaatctctctggcaacacaattttcttctgtatttaattaaaaaatattaaagctttttttctatgatgaatgataaaatatgaaaattgccttcctttgttactaactatattttgctcagattggcaaatttggatgtgagtatgaatgattttatttggtaaaattgtacctatggggatgggttggagggaagcattttgtagattgtgcttccagtatgaaaattacctgggtcccgcatggtaagtcagggaggttcccttccttttctgttagatgcaagccttcagaagcaggcctttccatcccttccctgttcccctatccccaccagtcctctcctacccttctcatctgtcctccttaccccatcgggtgctgccagtcacgccagattagtgccccggacttttcccccttcacttagctcaggattgaactgtgcagtagcccggcactgtttagccaaagacatcattgtgttccttcctaccctggaaaaaatcattttaagagtttcacatctactggagttgcaaatagaagccacacagattccagtgatgggaatagaatgctttctggccccaactccaatttctcaaaatgcgtttccagtgctggcaaagggaggcttggaaatcctggggtagatgcaggccaagtgattcctataaggcagacacttcctttctcacatcaaacccatttggcatgttatgtattggcacctaatgctgagagatggtgtgccccagtgagcatcaggagacttaacatttagccctgactcatactaactagaacagctcttctttgtgctttaaactcttccttggaatgaagctaccatattagaggctgtcccagggcctttgatttcatagacttatgcagaggtggcacactggtcacccaaggaacgttcacttggggatttttttttctttttgaattgccttcaaatagcaaacaattgatcactgcttgtggccttacttccagccctttccctgatgaagagttgcctaaatcacctgctgaaaaacactgcgtttgtgatttctgctttttcacatgttgcagaggcccacgtctacacttcctcctgctggatttggagtctggggaaaggcgatggggaaatgaaagggtaaggttgggcctaggtctgtggggttggagcctct

SEQ ID NO: 466803 - DNA, 1958 bp, Homo sapiens
acaaggagaaggtgggcccagcaagcccagaggacacagccaccaggactgtcacccactcctggggaagggcgggaaggtgctgtctccggggttgtcagaaaagtccagaatcctcctggagttgaagtctctctgcggggccaggatggcgaggaactggaaccctggagcctgtcatgttactccaaggctgactagtcccagtccccagtgagaagcaaggagaacctgatacaggcggtggcccggcttggaatgagcagaacaacctagacccgtctggctttgggagtcagaggctcggcttcaaatcccagctccaccttggtcacctgcaggaccctgagccgtagaggattaacccagtcggcgtgcagggggcgtggcctgtgcctcactgcaggtacccctcctgtccctcccgcagcactgatgacaggccggctgtgctgggcaccgagaatgcaccggccctgctctcgcagggcccacagaccagggagggaggaagatcataaataaatgaagtgagcaaggcaccgtgcatgtattctaccagtgtctacagagcccatgctctgagccaggcactagtctagtaaataaacatcgctaacgtgtttcagacacttgccttatcctccagcctcaacctctgttacccatgaagtctcacaataggcctagggggtggccctcttgtaaccccatcttacaggagaggaaacagaggcccagagaggctaagctccttgccatgctgttaggcagtgacggagcctgcacccataatcgcttgtacccagaactccaccgctgtctatcggttgggcagacagaggctgccttgcctggctgccaacacgaaatggcattttgctcgaggtgttcctcctccctcgcctttccctgcctctaaattcagagcaaaggtagcatgagtcacgactcatcgacacggtgagggacaagcatgctccgccagggaggggctttgtgcggtctgaaccggggactgcagcaaacgatcgcgcagcggggactcaagcccctgatggtgccagaaaaatataacaataacagaaataaacaccaaacccacaaaagctcagtgcagaaggcccagagtccaagagcgcccatagtaggagcattgccatcttggacgagcaccttgatcaaaaactgcctaaatccaaagggcatcagcctaacggccaagctgcaagctctctccctgaagctgcctttaattgggttgagaaggcacgatttgccaggtgcacactcctttgaaatcaggggtgaccctatgacctgctctgtctgcagaagtgatgagtcacctccagggagaagcattaaggaccactctgcctacccctttccactgtaacggacagggtggccccgcactcccgacttgctgctccgggatgttggtgctccagtcagctggggcagctgagccatccctgggagactgtggctctggggaatcacctgcacctgtcgtggactttgcttgggcagaaacacatgtttgactgaagccactgggactttgacagtttgttcctgcagcatcgttgaaatcaacctgatcgatgcaaatatattgtcaagttgaaatgcaggtttcaaaatggcattgattcatccatcagttattcattgggcccccaccttcccaccccatgtctgcaatttccaattccagatttaggggagggggcgtttagagtccaaatccctcccccaacacacacgtaggaaaacgaatgtggggataacagggccgcactgtggcgatggcggtgaggcagggaatggcagtcctggtatgcagtagggcctcgctcaatctcagctcctttctgaacttttcctgcccacacacctgtcctcgggcctcatccaggtgtcagggacaaaaagcattttaatagggcagg

SEQ ID NO: 466804 - DNA, 983 bp, Homo sapiens
caactctgttagcaaagctgtttgtctttctcggaaacaacagtaacgataagcctctttgaatatggaggccgctgcagacggcccggctgagacccaaagcccggtggaaaaagacagcccggcgaagacccaaagcccagcccaagacacctcaatcatgtcgagaaataacgcagatacaggcagagttcttgccttaccagagcacaagaagaagcgcaagggaaacttgccagccgagtccgttaagatcctccgcgactggatgtataagcatcggtttaaggcctacccttcagaagaagagaagcaaatgctgtcagagaagaccaatttgtctttgttgcggatttctaactggtttatcaatgctcgcagacgcattctcccggatatgcttcaacagcgtagaaacgaccccatcattggccacaaaacgggcaaagatgcccatgccacccacctgcagagcaccgaggcgtctgtgccggccaagtcagggccagtggtccagacaatgtacaaagcctgcccctgtggcccttgccaaagggccagatgtcaagagagaagcaaccagatccggagtcggcccctagccagaagctcaccggaatagcccagccaaagaaaaaggtcaagatttctatcacttccccgtcttctccagaacttgtgtctccagaggagtacgccgacttcagcagcttcctgctgctagtcgatgcagcagtacaaacggctgccgagctggagctagagaagaagcaagagcctaatccatgattgatgatgttccaaaaacccaagtagtcagtcccttgtgtactgtggtaaacctgtttatgttcaccccaacttatttgtatgcttatcttttatagaggcatctttctttctactggttttatgagtaccaatcttaattattgggactaaattctgtcagatatttcagtgtttccaggtgaaagacacta

SEQ ID NO: 466805 - DNA, 1133 bp, Homo sapiens
ccctgtagtgtcccaaaacaggatgcataggaccagaggcccggatcctgaggctgtttgtcctactgaaaagcacctccactttctgtttctctggacagacaagggttacacaggggaagaaggtggcaaggtggacacctttggcagtgggggctggcagcagggcccggaggggcacgtggtggggctgggcttccagtgggagcagtgtgacagagggcgggtggggcagcggggctgtcacagggacagggtggggcagcaggggaatagggaggatggtttctggataaaactatactacttcaggtcatcctcaagctttacattctccacagacaggggacccattccaattaaaagaagtccatcttcaagaaatggaggtcctcctcctacaaaatctgctcctgtgacaagaagcaatagtcggatgggaggccaagatcgacgaagtgattggattgaggctgacattccttttcatcctgtgttgctagcagattcatcttaatttttctaaaagctcctagaagtattctttgatggtcccatatcatatggaagagagaattatggaggtcctccatgcagaaagccaatctcttcctggcaaataaccatatgtcaccaagagatgacggttatgcaactaaggatggggacctctcatggtgcaccacctgcacaagggcctcggatgtcttatggtggaagaagccgccattattataacaatacacgagatagatatagcagaagtcggagagttactcaagacactgtggtgatttttattcctgttttcatgagcacgttggcagaaaagaccaaaggaatctaatttctctggatagagtgcaccctgctcctcgtgaagcatatggtagctcaagttatgtggcatctacaggagatggtgggaattgaaaaatgagatcacatggacacaggaaggggaacatcacactctggggaatgttgtggggttggggaagaggggagggataacattaggagatatacctaatgctaaatgatgagttaatgggtgcagcacaccaggatggcacatgtatacatacgtaactaacctgcacattatgcacatgtaccctaaaacttaaagt

SEQ ID NO: 466806 - DNA, 1019 bp, Homo sapiens
ccctgtagtgtcccaaaacaggatgcataggaccagaggcccggatcctgaggctgtttgtcctactgaaaagcacctccactttctgtttctctggacagacaagggttacacaggggaagaaggtggcaaggtggacacctttggcagtgggggctggcagcagggcccggaggggcacgtggtggggctgggcttccagtgggagcagtgtgacagagggcgggtggggcagcggggctgtcacagggacagggtggggcagcaggggaatagggaggatggtttctggataaaactatactacttcaggtcatcctcaagctttacattctccacagacaggggacccattccaattaaaagaagtccatcttcaagaaatggaggtcctcctcctacaaaatctgctcctgtgacaagaagcaatagtcggatgggaggccaagatcgacgaagtgattggattgaggctgacattccttttcatcctgtgttgctagcagattcatcttaatttttctaaaagctcctagaagtattctttgatgggacctctcatggtgcaccacctgcacaagggcctcggatgtcttatggtggaagaagccgccattattataacaatacacgagatagatatagcagaagtcggagagttactcaagacactgtggtgatttttattcctgttttcatgagcacgttggcagaaaagaccaaaggaatctaatttctctggatagagtgcaccctgctcctcgtgaagcatatggtagctcaagttatgtggcatctacaggagatggtgggaattgaaaaatgagatcacatggacacaggaaggggaacatcacactctggggaatgttgtggggttggggaagaggggagggataacattaggagatatacctaatgctaaatgatgagttaatgggtgcagcacaccaggatggcacatgtatacatacgtaactaacctgcacattatgcacatgtaccctaaaacttaaagt

SEQ ID NO: 466807 - DNA, 1418 bp, Homo sapiens
cttagtgagcacgtgggtgtcacagttgccgtaatagtctcatacagggcacaaagctctccaaatgtccacttgcagattctatgaaaagagagtttcaaaaatgctcaagcaaaagaaacatttaaagctgtgggatgaatgcacacatcacaaagtagtttctcagattgcttctgtggagattctatgtgaaggtgtttccttttctaccatcagcctcaaagcactcaaaatattcacttgcagattctacaaaaagagggtttccaaactgctcagtcaaaggaaggttcaactctgccgcaaagcgctcaaaatgtccacttgcagattttacaaaaagagtgtttccaaactgcacaatcacaagaaaggttcaactctgggagatgtatgcacacatccagataagtttctcagaatgtttctgtctagttcttatataaaggctgcagagcgctccaaatcccaatttgcagattctacaaaaaaagtgtttcctaatgctcaatcaaaagaaaggttcaactatttgagatgcacgcacacatcacaagctctttgacctaaagcagatggcaaaccacctcttgatatcagccctgatcagtgaccaagatgaagacatgctgagctacgtgatcaacttggaggtgaaagaagtgaaacatcccattcatctctgcaagatcatgttgttattttggagtaacccctacttccagaataaaatggtgaccaaggaatatcttgggaatgtcacaggtgacaagtggcttccaggatgggtagtggaaggaagatgatgggtggataattgccaatgtgatccagccctcttcacataaaatcctctctgtagaatacagggcttctcattccactccaattcagtagtatccagattatgaagttgagacttattgacccagacaccacaatagcagccttaacttcttcaactggttttctgaccacaacttcacaggacctaataggattgctgaggtgcatcctcaccgggaaacatcaggaatgacctggtgtgttcccagctgcttaggtcaccagtctgagccctgatgaggcctttcccaattgattcccctgacagatcctatgtaaggacctgtggcacaatcccctgcaatactacaagaggatgaagccacctgaagagggaacagagatttcaggggacttctggattttgagatgaatatgatggagcatcaggctttacctgaaacagcagaactcctacaaagttactacagtatgcaggatgtcagtactcagtatggtcttatgcacacgacctaaaggaaaaacagatccaggcacaaaaaaacgcagacaggaagaggggttaaacttggattttatggaatgaaaaataaacactattaaggatg

SEQ ID NO: 466808 - DNA, 1069 bp, Homo sapiens
cttagtgagcacgtgggtgtcacagttgccgtaatagtctcatacagggcacaaagctctccaaatgtccacttgcagattctatgaaaagagagtttcaaaaatgctcaagcaaaagaaacatttaaagctgtgggatgaatgcacacatcacaaagtagtttctcagattgcttctgtggagattctatgtgaaggtgtttccttttctaccatcagcctcaaagcactcaaaatattcacttgcagattctacaaaaagagggtttccaaactgctcagtcaaaggaaggttcaactctgccgcaaagcgctcaaaatgtccacttgcagattttacaaaaagagtgtttccaaactgcacaatcacaagaaaggttcaactctgggagatgtatgcacacatccagataagtttctcagaatgtttctgtctagttcttatataaaggctgcagagcgctccaaatcccaatttgcagattctacaaaaaaagtgtttcctaatgctcaatcaaaagaaaggttcaactatttgagatgcacgcacacatcacaagctctttgacctaaagcagatggcaaaccacctcttgatatcagccctgatcagtgaccaagatgaagacatgctgagctacgtgatcaacttggaggtgaaagaagtgaaacatcccattcatctctgcaagatcatgttgttattttggagtaacccctacttccagaataaaatggtgaccaaggaatatcttgggaatgtcacagatcctatgtaaggacctgtggcacaatcccctgcaatactacaagaggatgaagccacctgaagagggaacagagatttcaggggacttctggattttgagatgaatatgatggagcatcaggctttacctgaaacagcagaactcctacaaagttactacagtatgcaggatgtcagtactcagtatggtcttatgcacacgacctaaaggaaaaacagatccaggcacaaaaaaacgcagacaggaagaggggttaaacttggattttatggaatgaaaaataaacactattaaggatg

SEQ ID NO: 466809 - DNA, 1489 bp, Homo sapiens
tccgcgcggtgattcatcggcctggccgcgtcccccgcgcgggccatcttggtcacggccggcggcggacagagccgcggaggaaccgcgagaccccagggcccagagcaggtccagccacccgtctggctccgtagtccgcgaagtctgcagtaaaggagccgcgtgggaccggggccgaagtccctagggcctggcaccgcgtgcccctctctcgggccctcggcttgggggtctcgcagcgccctgccgtcgtgcaccccacactgcccccatttctacaggggcccacctggtcaccacaccctcttggtccacccgcggatctcagcgtgtggctgacctctggccagcatggtgcagccgcagacgtccaaagctgaaagcccagccttggcagcgtctccgaatgcccagatggatgacgttattgacaccctgacctccctgcgcctcaccaactcggcgctgaggcgggaggcttccaccctgcgggcggagaaggccaatctcaccaacatgctggagagcgtgatggcagagctgaccttgttacgcaccagggcgcggatcccgggggctctgcagatcaccccgcccatctcctcaattacttcaaacgggactcgacccatgaccacacctccaacctctctgcccgagcccttttccggggacccaggccggttggcggggttcctgatgcagatggacagattcatgatcttccaggcctcccgcttcccgggtgaggccgagcgtgtggccttccttgtgtctcgactgactggggaggcggagaagtgggctatcccccacatgcaacctgacagccccttgcgcaacaactatcaggggttcctggcagagttgcggagaacctacaagtctccgctccggcatgcgcggcgcgcccaaatcaggaagacttctgcctctaatagggctgtgcgagagaggcagatgctctgccgccagctggcctctgcgggcacggggccttgcccagtgcatccagcttccaacgggactagtccagcgccagccctgcctgcccgagcacggaatctttaagaatccgccagcacttggtagcgtctgcagccacccaggtagcatacgctctttgctgtgtagaagaaatgcccatacgacagctttgcccctgtttgaagacctcccttcttgcctctccagacgtgttccccgaggagatcttccttccgtccttcctggcgccctggttgcccaccttgccgtgcttcctcttacgtgctagctttgtacctatcgctcactgcatgctcgcctccctcttgctggcatcccggcctgtttcaatgactaccgctctgctacttaggcacagggactccgccgcacgctgacggaccacgagggctgaccccttccagcctgacttggttcatggaggctcctactctgccctctccaagctcccctggcggctccccacctggttgcccag

SEQ ID NO: 466810 - DNA, 1532 bp, Homo sapiens
  misc_feature (3)..(4): n is a, c, g, or t
  misc_feature (6)..(6): n is a, c, g, or t
  misc_feature (9)..(9): n is a, c, g, or t
  misc_feature (11)..(11): n is a, c, g, or t
  misc_feature (13)..(13): n is a, c, g, or t
  misc_feature (16)..(16): n is a, c, g, or t
agnnanaancncnatnagaaaaatgatgagactgaaaccagcctcattgtctgaggtgccacccgaagttgttgatgtcacggccaacgaaatcaaggactcggatactccaaagggagacttggctcacaccctcacaaggcaaagttctacaataggctgtctgcaagctagggaagaaggcagccagcagtggctcagtacaagtctgaaatcttcaaaagcagggaagttgacagtgcaaccttcggtctgtggccaaaggcttgagagccactggcaaaccactgttgtaagtccaagagtccaaaggccaaagatatcgaagacgtctgatatcgaagggcaggaggagtggaagggatatccagcaatggagaaagagtctcaggaagcaagtttatcccatctaccacctgctttgtttttgctgccctgatcagaatttcagatacggattagtcaattctttcccacaagccctaaaaaaaagctaaaatcaagcatttgcacatttaagataaacaagtatccctcttgtgctttgacactcttctttttcaaaaagacacagtcctttttaagggcttgattgattaggtgaggcccaccaggataatctttattttgattaattcctactcaactaattaggaacctaataatagggttgatatttaattgtattcacagatttcatatgtattcaaaaggaaggaattatataaaggatcatgaagtgagaatgtagtggaaatgcacattagaatcctgcttaccccagtatttaataatagtgattaaagtgtttatattataatatataataaataataatttatagaaattaatatattatttatttacttaataaacattcctagatgtgaaatggccgcatcaacaaagatgtatattctaatttggggagatattgccaaaatgctctgaaaagtggttttacttggttaatttcatgttgttaatacagaataccacatgcttatttacaaataaatttatttcacacagttctggaagctaagtctaatatcaaagtgattgcatctggtgagggccttcttccaaagtcatcccacagcagaagttgagagggtgacagaggaagagagacagaaagattgaactcacatcctcaagcccttttatcatcagcattaatttatttatgagagtgtagccttcatggcctaattatctctcaaaggtctcaccttttaatatattgttgcattgaagattaaattaaaagatgttttaattaaaaaattaaaccataattaaaccataattaaataaaattaaaccatataatgcttgatccaattaataatattatcacaaataataattgtagctcaccttaattgagtgcttattttgtgccaggcaggttcctaaaagctttacagattttctcatgcttaatgtttcaaatcttaaagttttagtatgagagtaagtgagaatctaattttaacttttgcatgtgatatggttaggctttatgt

SEQ ID NO: 466811 - DNA, 3586 bp, Homo sapiens
acaaactgtttctgaaagagtgttgtgagagttggatgttggcatgggtgtgtggctttgttttttttgtgtgtgtgtttgtgtgtgcctaatgaagaggagcacaccacaccaaaacaaaacaaaacaaaaaaaaaaaaaaagaaaaaaaaaaacaggcatctgccagtgtttcattgtcctgtggccaaccaagaaagagacactgtcagtcctgtcctcatggccccttgaatttaccaagaattcagttcactgccaagcaggttcttctggtcatgagacggcactcctccatcgtctgggcatttatcctgggacatacaggatgatgcttgatgtttcttggctttcatgggggattcacattgccactcaaccacactactggatacacttttcaggcttgccatcaccacagatggcctctgagacactgtttgaaccacatctgcacctgtgagaggccagtttgaggtatgagaacactgtttcaatttggacttgcctttgtcttggttcctgcttttcccagatagcacctacccaacccaggatgaatgagtgcagagaggtcaagtgccaggccatcttttgctgacacccttttctggtatttcaggtataagtccatcatccaaagactgctcaacatctcaccagaatatatttcaatcctcatggggcatgattctttcacaaaacccctttcaggaatggagtcagaagagtagtttccagagacaacctcacagtcttgaaacggctctgcctcccatgtgatctgaccatggagatggcatataagggccctaagtttgagacttttagggtactgcaatgcgttatcacaggcagcctttatcctgataccaagccagctctgcctgtaccattttcctctgcttaggcaggctgacagccctgacaccctggtgctccagtttgagtcactatatgtggatgtgctagtcttagggcaatggacctgagctgtgagctgtagctagtgtcacaatgaatgccagctttgctagtaacaattccctttggcttggtagagaaggagacctctgtggaggtacaatggtggtgcactgtcacctgtcttctctgtgggatccatgggacagttccatgatcctaggagagggtagatgtgagccagcctgaagaaatgtcaagcagagccccaggaatgaagcacaaaatcactacagatccaaaaggatctgcagaatttgtcaggcctgcctagacattgtaggggttagtcttattgaaatgtgtcccactgtaatttccaacttcagccttcctgtgttcccagcagtttctctctcccaggtggggctttctgcagaatgacacagcctcagaagctactgggctgtgtgttactgtgggagtgttgcgagtgttggatgtcagcatgtgtgtgtggctttgtgtgtttgtgtatgtgtctgtgtgtgtgtatgtaaatgaattctgtggatcaggaatcagcaatgactagttaagctgtctgtgaccagccgggttccccatcgtctgcccctgccaaaaaaacaggtactcttctacaaagaagaggagagcaccacacccaagaacagacatctcccagtgttgcattataaagcagccaacccacagacactagcactctggtctgcatagcccctttaatttacctagaattcagttcccagccaagtaggtgcttcatgtcctgagggtgcaatcctccatcatcttgagatttcatgctggtacagagagtgtgacagcaataaggtcagataggggtgagtatacaacctggtgaagggtggatggggtcccgtaccttcaccagcaaaaagggtgaaaatagatgacacagaatgtgcttccaactccatccccacattcccataattgcaaaatcagtcaacaacatggcctggtgtttaggtgggagtactccaacctgcaggaaaaatttggagtgcaaattgtggccaatctggaaaactcctggtttgagggttttaatacctgtagtcaaatggaagtggaatagattgatgctgggtgggttgtggcctccacatttgtgtcctcttttactgacttccattgtcctcattggtgtagggcttcctggatctggctcaacatcttccacactaaactcttccctgttcacagaagaccatcataaaaatgcattgtagaggccctgcaaggaccaggatgaagggagacagtgaggtcaagagcccagccatctttcactgacacccacttctgggttctcaggctggctgacaggtctgacagcccatcacgaaagcctgcatactcttagacacaaggactgagctatgggctccagctagcatcacaatgaaggccaccattgcctagggataagtccctgtgactttgtggataagaactccgtggagccaatccaaggagagacactatcattcatctctaccgggcctattaaatttacctcgaatttgattcccagaggagttggtgcttcacatcatcagggggaacttctccattgtcttgggatttcagtctgggatagagactttgaacagcaataagtttccttggtctggctcaacgtcttctaaactcaacattccccagttcatggaaaatgatcctcatgggattctattgtaaaagctgcatgattcctggagaatgttttattgtcctgaagtcaacccaaaaatcaacactaccagtcatgttgcagagctccttgaattaaccttgaattcagtttccagctgagcagctgcttcacgttgtgagggggcaatcctccatcatcctgggatttcattctgggacacagagtttgagcagcaataaggctgggtccacattgcccctcaacagcattagtggacatgattgtcagacttgcaatttccgcagacaccttctgtgaacatttttcaacatcatctacatgagtgagagacccgttcgacatgtaagaatactgcttgactttggacctgcctttgtcgtggttcctgcctttctcatagatcccctgccaggcccaggatgataggaggcaatgaagtcaagggccgagccccattcattgaaagctgactctggggtctcgggtataattccatcacataaaatcccctcaacaactcaccagactatattccaatctccatggaacctgattcttgcacacagcctctttcaggaatggagtcagaagagcagtcttcagagaccacctcagtttggaaaagcctcctccttcagtggttcccagccatggagtcatcgtgaaggggctccatggtcaataattttacggtactgcacttggttatcacagacagactttttcatgatagcatgccatctctgtctatatcattttcctctgcttaggcaggctgacaactctgacagccaggggcccgaatctacctggcaaatgtgcatgctctactctcagtgcaaaaggcctgtttgggagttctgactagtgtcacaataaatgccgccattgcctagtgacaagtccctgtggatt

SEQ ID NO: 466812 - DNA, 863 bp, Homo sapiens
agaggaagtcacatcgagaaacagcccagtgaatgagctcctccacaatgaaaaggctgtgcagatgaaatgaaacagaagctagattaccaggcaaaggccagacatggattctcatcctataggtattatgcagccattcgatagaagtgggagaaaaagagtttctttgttggcagtggtaatgggaattttcagttttaaaatatcaagcttcccagttattaaaacatgacactgtttagaaggaaacactcaggcaatggagtcccatgaagatcattctctgtgaactgggaaagcttaagtgtggaagttgttgaaccagtcacaggaaactctaggtggatgaggaacatagaagtcagaaaaagaagaaactgtggaggccacatcccacccagaatcaattcattccattgcattggtctccgaatatgaaagccctcaaatcgggagtttgccaggatggccccaatttgcaccccaaatgtccgttgcccgttgtagtattcccacctgaacaccatgccattgtgtatactgcttgtgcaattaagggaatgaggggatgaagttggaaacacgtgctttaaacactgtctttatttttattgcaggtgtagttacagggccccaaccacctttcaccagattgtatactcacctgtatctgaccttattgctactcacactctaggtcccaggataaaatcccaacatgatggaggagtgccccctcattatgtgaagcacctgctgggcttggaaccaaattcagtgtaagttcaagtggccctgtggagaggactgctagtgtctccccctgtatttgctgcaggaaaataaaacagtgaaaaatg

SEQ ID NO: 466813 - DNA, 1720 bp, Homo sapiens
gcgatagttcactgctgacgcacctctacagaagtctcattcaccaagctgaagagacttgttgctaggtaatggtgacatttatgctgatgcaagccagagttcacaatgaggcctggtgccctgaggatagtgcatgcacattccaacaacccaatgaaagagaccctccacaagaagaatgccatgcagatgaaatgaaacagaggctagattacaaggaaaaagacaaacacggctgcctgcttttcatcctgcaggaattatgcagcacctcgatagaaatgggagaacaagagttttcttattggtggctgaaaatatttgttgtggaagttgttgagccagacccagaacacaggcaagagttcaatgctaacgcacctccacgaaagtctccgtctctgccaagcctcagggacttctcagtatgcaacagtcacagtcattgtgatgctagcaaggtctcacaatcagtcctggtgccctgagcagttaccatgacaaggcaagtacaaggaggagcagtgtcctcacgcattggactggcctccaatgggtgtagttacagggccccaaccacctttcaccagattgtatactcacctgtatctgaccttattgctactcacactctaggtcccaggataaaatcccaacatgatggaggagtgccccctcattatgtgaagcacctgctgggcttggaaccaaattcagtgatgaaatcccaagatgatggaggagtgaaccctgacgacaggaagtacctgctcacctatgaacaaaatttgaggaatatggatgtatcctgtggatccctcagagaagacaggcaagagtccaccaccaaggcacctctatggaggtctccttcttggccacgcagccaggactgatctctatgtaatggtgacattcattgtgatgctagccagagctcatagtcaggcctggtgccctgaggcgtgcatgtgcatttgagggcatgcttgctggcctggctttcacagatgttagcctgtggaagcagaagaaaatggtacacatagagctggctcggtatccagaaataggctgcctgcaataatgcactgcgggaccctacaatgctcgaagttagggcgacttcaagccgtctccctggtcagctcctgcaggagtaggaggcattcagagactgaggtggtcgctgaaatctgttcttctgattcccttttggaaagaggctgtgtgcaagaatccagtcccatggggattggaatgtagtctggatcgtgggactatcctgtggatcccacagagaagagagaggacagtccaccactgatgcacctccacagaggtctccttctccgccaaacctcacggaattgtgacattcatggcgaatgtgcgggaccccatccatccctcaccagcttgtatcctcagctttatctgaagttaaaagtatctttcccataatgaaatccaaagatgatggaagagtgccccctcacggtgtggaggtcctgcttggctagcaactgaatatgaagtaaattcaagggaccctgcggaccggactgctagtgtttctaaatggggtgtacactggacaataaaacactgaaagatttctgttcctgaatttcctgtgctcctcttctttctagaagtgtggctttgtttgtttgtttgttttgtttttgtggggggaggttatttggaccatggc

SEQ ID NO: 466814 - DNA, 1880 bp, Homo sapiens
agaggaagtcacatcgagaaacagcccagtgaatgagctcctccacaatgaaaaggctgtgcagatgaaatgaaacagaagctagattaccaggcaaaggccagacatggattctcatcctataggtattatgcagccattcgatagaagtgggagaaaaagagtttctttgttggcagtggtaatgggaattttcagttttaaaatatcaagcttcccagttattaaaacatgacactgtttagaaggaaacactcaggcaatggagtcccatgaagatcattctctgtgaactgggaaagcttaagtgtggaagttgttgaaccagtcacaggaaactctaggtggatgaggaacatagaagtcagaaaaagaagaaactgtggaggccacatcccacccagaatcaattcattccattgcattggtctccgaatatgaaagccctcaaatcgggagtttgccaggatggccccaatttgcaccccaaatgtccgttgcccgttgtagtattcccacctgaacaccatgccattgtgtatactgcttgtgcaattaagggaatgaggggatgaagttggaaacacgtgctttaaacactgtctttatttttattgcaggtgtagttacagggccccaaccacctttcaccagattgtatactcacctgtatctgaccttattgctactcacactctaggtcccaggataaaatcccaacatgatggaggagtgccccctcattatgtgaagcacctgctgggcttggaaccaaattcagtgatgaaatcccaagatgatggaggagtgaaccctgacgacaggaagtacctgctcacctatgaacaaaatttgaggaatatggatgtatcctgtggatccctcagagaagacaggcaagagtccaccaccaaggcacctctatggaggtctccttcttggccacgcagccaggactgatctctatgtaatggtgacattcattgtgatgctagccagagctcatagtcaggcctggtgccctgaggcgtgcatgtgcatttgagggcatgcttgctggcctggctttcacagatgttagcctgtggaagcagaagaaaatggtacacatagagctggctcggtatccagaaataggctgcctgcaataatgcactgcgggaccctacaatgctcgaagttagggcgacttcaagccgtctccctggtcagctcctgcaggagtaggaggcattcagagactgaggtggtcgctgaaatctgttcttctgattcccttttggaaagaggctgtgtgcaagaatccagtcccatggggattggaatgtagtctggcacccttcagatccttttggaaccttacggatttcgcggtttattcctggggtttgcttgacgtatcttccagctggctcttgtctgctctcccctaggatcgtgggactatcctgtggatcccacagagaagagagaggacagtccaccactgatgcacctccacagaggtctccttctccgccaaacctcacggaattgtgacattcatggcgaatgtgcgggaccccatccatccctcaccagcttgtatcctcagctttatctgaagttaaaagtatctttcccataatgaaatccaaagatgatggaagagtgccccctcacggtgtggaggtcctgcttggctagcaactgaatatgaagtaaattcaagggaccctgcggaccggactgctagtgtttctaaatggggtgtacactggacaataaaacactgaaagatttctgttcctgaatttcctgtgctcctcttctttctagaagtgtggctttgtttgtttgtttgttttgtttttgtggggggaggttatttggaccatggc

SEQ ID NO: 466815 - DNA, 1976 bp, Homo sapiens
gcgatagttcactgctgacgcacctctacagaagtctcattcaccaagctgaagagacttgttgctaggtaatggtgacatttatgctgatgcaagccagagttcacaatgaggcctggtgccctgaggatagtgcatgcacattccaacaacccaatgaaagagaccctccacaagaagaatgccatgcagatgaaatgaaacagaggctagattacaaggaaaaagacaaacacggctgcctgcttttcatcctgcaggaattatgcagcacctcgatagaaatgggagaacaagagttttcttattggtggctgaaaatatttgttgtggaagttgttgagccagacccagaacacaggcaagagttcaatgctaacgcacctccacgaaagtctccgtctctgccaagcctcagggacttctcagtatgcaacagtcacagtcattgtgatgctagcaaggtctcacaatcagtcctggtgccctgagcagttaccatgacaaggcaagtacaaggaggagcagtgtcctcacgcattggactggcctccaatgggtgtagttacagggccccaaccacctttcaccagattgtatactcacctgtatctgaccttattgctactcacactctaggtcccaggataaaatcccaacatgatggaggagtgccccctcattatgtgaagcacctgctgggcttggaaccaaattcagtgatgaaatcccaagatgatggaggagtgaaccctgacgacaggaagtacctgctcacctatgaacaaaatttgaggaatatggatgtatcctgtggatccctcagagaagacaggcaagagtccaccaccaaggcacctctatggaggtctccttcttggccacgcagccaggactgatctctatgtaatggtgacattcattgtgatgctagccagagctcatagtcaggcctggtgccctgaggcgtgcatgtgcatttgagggcatgcttgctggcctggctttcacagatgttagcctgtggaagcagaagaaaatggtacacatagagctggctcggtatccagaaataggctgcctgcaataatgcactgcgggaccctacaatgctcgaagttagggcgacttcaagccgtctccctggtcagctcctgcaggagtaggaggcattcagagactgaggtggtcgctgaaatctgttcttctgattcccttttggaaagaggctgtgtgcaagaatccagtcccatggggattggaatgtagtctggatcgtgggactatcctgtggatcccacagagaagagagaggacagtccaccactgatgcacctccacagaggtctccttctccgccaaacctcacggaattgtgacattcatggtatcaagcagctgtctgataaaagctggataagaagagtttccttcttggctactgttacagaaatttatggttttaaaacaatcaaagttgcccagtcattaaaacccaatagtatttagaagaaaacactcatgaaatggattcccttgagggtcgtcttccattaagtggtaaacatttaatgtggaatatgtacagccagacccaagaaaccttaggctgatgaggtacatggatgtcaggaaaataagaggcgaatgtgcgggaccccatccatccctcaccagcttgtatcctcagctttatctgaagttaaaagtatctttcccataatgaaatccaaagatgatggaagagtgccccctcacggtgtggaggtcctgcttggctagcaactgaatatgaagtaaattcaagggaccctgcggaccggactgctagtgtttctaaatggggtgtacactggacaataaaacactgaaagatttctgttcctgaatttcctgtgctcctcttctttctagaagtgtggctttgtttgtttgtttgttttgtttttgtggggggaggttatttggaccatggc

SEQ ID NO: 466816 - DNA, 822 bp, Homo sapiens
catatacaagtaaacatttattaacagtaaaatattatttttatttttgcatattctcaaatacacatttacaatagtatcacacttcctatatgaattcttcatagttattttaagtattttacaatttgtacagaggaagggacatacaatatctaataggctatttttcaaccaaataataatttatgtccttgtaagattttgtacctctttaaaactttcaacttcaacatccacttttttagctttgctaatcaaattaagaattaaaaccagcctgcaaataataacagtatataacattaagcacaatttcatttctttctttatacaaatgttctatatttacttgaccaaatgcttaattaccttttaaaggtttcaataccgtggttaaaaacaaaacaactgtgtatacctccagactatatgaaaaatatgaaatatgtaaagtgtcacgttttttaccttagtttatttttaaaagataaatagctaactatctgtattaattttaaagaatgttttaaaactcttaaactttcacttaaatacttccttttatattacttcagggagaaaacaaattggaaggagatttaaaggattctcaaatacaaactgaagttttcaagaacaggatcatgaaggacagtaaaaatcaggtagggacatgtataaaggctaagaaggcctaacagattcttaaaatccattacatggttttggatggtactaggtttaaattcatatatgactaaagcactttagaactagatcaaattaatctaacatttcagaggctgccaatcaccaaat

SEQ ID NO: 466817 - DNA, 859 bp, Homo sapiens
aagttgtcctgatagcatgcctggagtcacgggtctcccccaggctggggccccagacccacaggcaaaggagacagcaaacctgtcgtcttcactcctggctggctcaccaaaatgtggctggaatcaggagaccggagagaccaatgaggggaacaggacgattgtatttaggtggccaccagctcagcagattaatacccagaggctgagcaatgagcaaagaaagggcttgacttttattcatgtgaccaaaggatgggaaaaacaggaccttacaaaatccttgcaaacttgcagaaatagttacaaaaatagttatacaagcagaacaaagaatgatggcatgggtagagaatttcaggaagacactgataagaacttgtttctcttgtccctgtttttggaacccatttcttcagggcccctacctggccttgcaggtaatgttatcacagctgtagctggactttggagtgagtcagcctggtcagggaaggacttgtttttctttttacttgtttttcttatatttcctgcttcatgagcaagaaacaacaagctttaccttcacagtagaagagtccagcagaacaaagttggaagcagagggagtgaatctaaacctatggacagattcatcttggaaaccctaagtgaggctaaagggagaaaacaaattggaaggagatttaaaggattctcaaatacaaactgaagttttcaagaacaggatcatgaaggacagtaaaaatcaggaattgccaaactttgtcacaatggctgtacaacatcagtgagccgaagtcataccactgcattacagcccgggcgacagagaaagactccatctcaaaaa

SEQ ID NO: 466818 - DNA, 1156 bp, Homo sapiens
aagttgtcctgatagcatgcctggagtcacgggtctcccccaggctggggccccagacccacaggcaaaggagacagcaaacctgtcgtcttcactcctggctggctcaccaaaatgtggctggaatcaggagaccggagagaccaatgaggggaacaggacgattgtatttaggtggccaccagctcagcagattaatacccagaggctgagcaatgagcaaagaaagggcttgacttttattcatgtgaccaaaggatgggaaaaacaggaccttacaaaatccttgcaaacttgcagaaatagttacaaaaatagttatacaagcagaacaaagaatgatggcatgggtagagaatttcaggaagacactgataagaacttgtttctcttgtccctgtttttggaacccatttcttcagggcccctacctggccttgcagaagagtccagcagaacaaagttggaagcagagggagtgaatctaaacctatggacagattcatcttggaaaccctaagtgaggctaaagtcctgtcaaccatcatctacatactgtctccctgaatttgactattccagggacttcatatagacagaatcatgctgtatttgttcttttatgtctggcttattttacttaacactgtttttactgtaagtccagttgtagcatatgtcagaattgtattctattttaaggctgaataacattccattttaagtatatttcatattttgtttatccgttcatctcttaatggaaatgtgaattgtttccaccttttgcagttgtgcatactcttgccataaatatttatgtccaaatatctgtgagccaggctttcaattatttggggtatatatgtaatcttggaattgctgaatcattttccacatcagctgcaccattttgtactttcactagcaattcataatatccattttctccacatttttcccaacacttatttgctcttaaaaaatttctgtgtactatttaccaatgatctaaaacgcaacatattgtagtgtaaacctaaaaaaacaaacacagagactctttaaaagaaaaggtgtttatttggaaaaggaaaattgcaagcaatgcacaagctatagtaaactaggtgcacattcagagcagtaaaggaag

SEQ ID NO: 466819 - DNA, 1370 bp, Homo sapiens
aagttcatgtccttttcagggacatgaatggagctggaaacaattattctcagcaagctaacacaggaacagaaaagcaaacactacctattctcatgcataagtgggaatggaacaatgaggacacaatggggcctgagagcatgcccaaggccttggggacccttggaccctggaagaagggcggaagtggggtaggtgggggcggtatttggagccactgcccctctggcagccactgctgctccccatggatggcttggagtctcagccttcagcagaatcagcaggctttccgcaaacagctaccaccagagggtgcacggagcctacgcactgagcatgcagagcccgcaaacaaactctctgaggagcagggtgtcctcacagtgcctcggatagcacttccttctcctcaagacacaccggagagaggccgtggtttcagggtacctggggacacctgaggcacgttcgtagtgaagactaagcctccttcatctcaggacccgcccaagagtggccgcagctttggcccacctggggtcgcgtccaccatgaagatgaagtctctttctcttctggacatgtccaggagtggccgttgctacaagacatctggtgctacgaccagaaagactacaacaaacgcaataaattagcacacaagtgcttcttcactcctcccagaattaggaaccagggcctgaaatggaaaatgcagatttcaatttcgaagccttcatctgtgcctgggagaatgaaatctcacactatctctttggctggagtgcagtggtgcaatcgtaggacactgcaaccccctgcctcccaggttcaagtatttattcttcctcagcttcttgaatagctgagaatacagatgcacaccaccacacctgatggatttttagcatattggccacacttgtctcaagctccagacctcaagtactctgcctgccttggcctccaaaagtactggaattacatgtgtgaatcaccatgcttggcccctgattgaaattctaattcaaaaaaatccctcttgcaaaaccttattttctatattatatttttgatgagtttctttatatgtctcataattaaagcaaatggtatcattttaatgtattttcttatacttgaaaatgaatttatttttattaatctgtaattaaaatagtaggtatatttagaatgttaatttgctgtgtgtaaacatgattagaaatttctttaaaaaactaatttggataattaattacattagttgattgtacttgtgttattttcctcaggattttcttttcttttcttttattattattataatttaagctttagggtacatgtgcacattgtgcagg

SEQ ID NO: 466820 - DNA, 1040 bp, Homo sapiens
cggacgcgtgggtcgacccacgcgtccgcaaactctctgaggagcagggtgtcctcacagtgcctcggatagcacttccttctcctcaagacacaccggagagaggccgtggtttcagggtacctggggacacctgaggcacgttcgtagtgaagactaagcctccttcatctcaggacccgcccaagagtggccgcagctttggcccacctggggtcgcgtccaccatgaagatgaagtctctttctcttctggacatgtccaggagtggccgttgctacaagacatctggtgctacgaccagaaagactacaacaaacgcaataaattagcacacaagtgcttcttcactcctcccagaattaggaaccagggcctgaaatggaaaatgcagatttcaatttcgaagccttcatctgtgcctgggagaatgaaatctcacactatctctttggctggagtgcagtggtgcaatcgtaggacactgcaaccccctgcctcccaggttcaagtatttattcttcctcagcttcttgaatagctgagaatacagatgcacaccaccacacctgatggatttttagcatattggccacacttgtctcaagctccagacctcaagtactctgcctgccttggcctccaaaagtactggaattacatgtgtgaatcaccatgcttggcccctgattgaaattctaattcaaaaaaatccctcttgcaaaaccttattttctatattatatttttgatgagtttctttatatgtctcataattaaagcaaatggtatcattttaatgtattttcttatacttgaaaatgaatttatttttattaatctgtaattaaaatagtaggtatatttagaatgttaatttgctgtgtgtaaacatgattagaaatttctttaaaaaactaatttggataattaattacattagttgattgtacttgtgttattttcctcaggattttcttttcttttcttttattattattataatttaagctttagggtacatgtgcacattgtgcagg

SEQ ID NO: 466821 - DNA, 3692 bp, Homo sapiens
actgcagaagtgggtacaggacaggtcaggtcatggctcaaagtcagttccccagaggccaaggcaaggttctttcccatgatgtcccactgtggcacccatctcaggaatcctgccagaacgtgggcagtcatggtcagccaaccgaccgtagaagctcaggtgtgtccagaattggtgggttcttggtctcactgacttcaagaatgaagccgcggaccctcacgtggcttcgtggtctcgctggctcaggagtgaagctgcagaccttcgcggtgagtgttacagctcataaaagcaagtgtggacccaaagaatttattgcaaagaatgaaagaacaaagctgccacagtgtggaaagggacctgagggggttgccaatgctggctcgggcagcctgcttttattctcttatctgacccaacccacatcctgctgattggtagagccgaggggtgtgttttgacagagcactgattggtgcgtttacaatccctgagctagatacaaaagttctccatgtccccatcagattagttagatacagagtatggacacaaaggttctccaaggccccaccagagcagctagatacagagtgtcagttggtgcactcacaaaccctgagctagacacagggtgctgattggtgtgtgtacaaaccttgagttagatacagagtgccgattggtgtatttacaatccctgagctatatataaaggttctccatgtccccaccagactcaggagactagctggcttcacccagtggatcgcgcactggggctgcaggtggagctgcctaccagtcccacgccatgcgcttgcactcctcagaccttgggtggtcgatgagactgggcgccgtggagtagggggcggcgctcctgagggaggctcgggccgcacaggagcccacggagggggtggggggctcaggcatggagggctgcagttacggacccctgccccgcggaaaggcagctaaggcccggcgagaaattgagcacagcgccggtgggctggtactgctggaggacccagtacaccctccgcagccactggcccgggtgctaagcccctcattgcacgcggctggcagggccggcaggctgctctgagggcagggcccgccaagcccacgcccacctggaactccagctggcccgcaagcgccgcgcgcagcccgggttcccactcgcgcctctccctccatacctccctgcaagctgagggagccggctacggccttggccagcccagaaaggggctcccacagtgcagtggtgggccgaagggcttctcaagtgccgccaaagtgggagcccaggcagaggaggcacggagagcgagcgagggctgtgaggactgccagcacgctgtcacctctcacagggaaacaccctgcaactttgcaagagcacggagagtgtggggcagggctaccccgcaggcctttggtctggcaccctcccttcctggtcctctgtctggtgttggcgggcaccttcgcagctgtggtggtcttggcggcgggtggaggcaggccaagacagcctgctctgaccagggacaggcacagaaaaagtggggaggggattgccggcggggtgttgtggtgtgaggcagctacttgctcagggttcctgagctgtgggaggccctcatgtgctgggtgctggacaggctctgctgctgtccgtgtgtgcggtgtcctcttctcttggtctcactgaggggtgggcgtgtccacccgagggaaccgctgtgaatagaagtagctgcagggctgtgcctgactctctccatgagactctagtggtttcatgggaggttgtatatgctcatggcctaaacatccttggatgcagcactggcagagggaagaaatcgtgtctgaggagctggtgcctgccttgcagaggacagcagccccgtgcacggtgaacccgagtattgagcaccttgtgtttctaggataagcctgctggacacaggtaccgggagcaggggtatttccatggctggcctgggcgcgcagattccccttcctccagggattttcccagtgaaatgtgtccttcaactttctgctgtttatgaagggtcctttgaggtgctattctcccttgtgagtgctgtgcttggctttctgtccctataacgtgccctcagggtgcccgcaattaagctgcccttctatctgcatgaatctgtccttggttcccctcgttgtcccccatgtcctgaatcctggctgagccccggtgcctaccaccttgtttcccccaaccccgctcctgggagctcggcgcccacccacctgtcagccatcccgaattggcagctgcaaggatatggctctgacccagaagccgtggatgccctgcggcctgggacattcactggagcccagctccaagtgaaggacgtccagcgagttggttgctggccggggcgtcctggggccagggccaggctgtgcctgcgggtcctcctgctgccgctccacattggcctcctccttggccaccacctctatctctgccatgatgtcatcccccactagccactagcatgcctcctcccccagggttgcctccctgctctgcgcacaggctgccctttcctgcagcacctcccccttaacatggtgccctccttgaggctcccacagactaaggcctacactgcccatctcatgtccttggcacccctagactctagaggaagctcccggaagggcccctgggccttgcccttctgagaaacatgtgccacacccacgtggatacagggttcctggggagccccgcagggcccacagtccgccacactcaccatggggcccagatacccagcagggttagctgtacacagtagccctggagtcggaggccgaggccctgggcttccagagcctcactggcaggcacgacggccactgcggcgcttgcgggaggatctgtgccagcgaggcagtgcacacgggttatcgcattggcaaccatggcggctggcctcccgtgtgcccaggggcacaggatgagaggtcctttggaacgcccctcttatttatttttatctaaatatagatttttctttgaccatttgcagcacaatggtagaagcagatcatccgggcaagcttttcattggtggcctcaatagggaaaccaatgaaaagatgcttaaagcagtatttgagaaacatggtcccatatcagaagttcttttgataaaggatcgaaccagcaaatccagaggctttgcatttattacttttgagaaccctgcagatgttaagaatgctgccaaagatatgaatggagagaaatcatccaagctcccaagaaaccagggattatgctccaccatctagaggctatgcatactgtgataatggtcactctagtcgggatgaacattcctctagaggatatagtgatagtggtggctacgacgaaacccgtggtagagatcattctgatcgtacaagtggaagttcttacaaaaatgaatttcagggatatgggacctctcatggtgcaccacctgcaagagggcctcggatgtcttatggtggaagcagccaccctgattataacaatacacgagatacatagggcagaagtcaagaaagttactcaagaagctgcggtgatttttacttttgtggtcatgagcaca

SEQ ID NO: 466822 - DNA, 1076 bp, Homo sapiens
acatcacacactagggctggtctgaggtttcatcctctggctccttgctttcctccataaaacccatctaaaatgaccttctgggctactgactgctcactatccctgcgtgtcaactctttagctgtgcacaattatgcaagaacagccctcctcacttccctgaaaagacctgaatgaagccagggtctcaggtttgaggtcatagatctggttctggaggacagaagttgaagatcagaatgccagcatggtcgagctctaggagctatgaaatatctgagatgagcaagtgattcacaaggagacagaagcagtatgacctttaccctgtgacccggttcaattatttcaggctctcattaaccaggcgagctcctctttctctcagagctgcaaacaaggaaactgaatgtcacaccaggtggccagcatttctgtgaagggcagaaaccggggcagccaaacagctggcagaggccagctagacaaagactcccttttcttacagctggaatgaggggtggggagatttcatggtgtcctgtacaggttggatgttaatctgatgtggtgctcttggagaagcttgcctgagtcaggtgctttctcatcctgtggtgtgtgcttccccttcaagctgcagaagtccctgaagaggccctgcgtggctgctgtggctgccctgagactcgttctgcctcctcttccctccacagctctcccagcttctacccacagctgtgctccaggtaaacaaccaggggcctccaggggtagagaacctagccagacaggttctgctgcctgtagacttgatgtccttcccccacaacatgccatgcttgccaggctggaagggggtctccagatacttgggaaatctgggcctgtaattgggaaatacatgggtaccaagcctaatccacattcagacccgatgggaactgcagcagggactcgccctctgtgcaactctgggtgtaccacttcagaaggaccatctgatcccatgtgtcattggagatactacatgtgggcaggttccagtggttgcttcagctgaaccttcccaa

SEQ ID NO: 466823 - DNA, 1952 bp, Homo sapiens
ttattccagtgacataacgccatggtgtttgccaacaggaccctggtggtgaaatcaatgacagacaaagacgccggagattacctgtgtgtagctcgaaataaggttggtgatgactgcgtggtgctcaaggtggatgtgatgatgaaaccggccaagattgaacacaaggaggagaacgaccacaaagtcttctacaggggtgacctgaaagtggactgtgtggccactggacttcccaatcccgagatctcctggagcctcctggatgggagtctggtgaactccttcatgcagtcagatgacagtggtggacgcaccaagcactatgtggtcttcaacaatgggacactctacttcagtgaagtggggatgagggaggaaggagactacacctgctttgctgaaaatcaggttgggaaggatgagatgagagtcagagtcaagatggtgacacctgccaccatctggaacaagacttacttggcagttcaggtaccctatggagatgtggtcactgtaacctgtgaggccaaaggagaacccatgcccaaggtgacttggttgtccccagccaacagggtgatccccacctcctctgagaagtatcagatataccaatatggcactctccttattcagaaagcccagtgctctgacagcggcaactacacctgcctggtcaggaacagtgccggagaggataggaagacagtgtggattcacgtcaacctccagccacccaagatcaatggtaaccccaaccccatcaccaccgtgtgggagatagcagccgggggcagtcggaaactgattgactgcaaagctgaaggcatccccaccccgagggtgttatgggcttttcccgagggtgtggttctgccagatccatactatggaaaccggatcactgtccatggcaacggttccctggacatcaggagtttgaggaagagcgactccgtccagctggtatgcatggcacgcaacgagggaggggaggcgaggttgatcgtgcagctcactgtcctggagcccatggagaaacccatcttccacgacccgatcagcgagaagatcacggccatggcgggccacaccatcagcctcaactgctctgccgcggggaccctgacacccagcctggtgtgggtccttcccaatggcaccgatctgcagagtggacagcagctgcagcgcttctaccacaaggctgacggcatgctacacattagcggtctctcctcggtggacgccggggcctaccgctgcgtggcccgcaatgccgcgggccacacggagaggctggtctccctgaaggtgggactgaagccagaagcaaacaagcagtatcataacctggtcagcatcatcaatggtgagaccctgaagctcccctgcacccctcctgcagctgggcagggacatttctcctggacactccccaatggcatgcatctggagggcccccaaaccctgggacgcgtttctcttctggacaatggcaccctcacggttcgtgaggcctcggtgtttgacaggggtacctatgtatgcaggatggagacggcgtacggcccttcggtcaccagcatccccgtgattgtgatcgcctatcctccccggatcaccagcgagcctaccccagtcatctacacccgtcccgggaacaccgtgaaactgaactgcatggctatggggattcccaaaggtgacatcacgtgggagttaccggataagttgcatctgaaggcaggggttcaggctcgtctgtatggaaacagatttcttcacccccagggatcactgaccatccagcaggccagacggagagacgctggcttctacaagtgcacggcaaaaaacattctcagcagtgactccaaaacaacttatatccatgtcttctgaaatgtggattccagaatgattgctcaggaactgacaacaaa

SEQ ID NO: 466824 - DNA, 1237 bp, Homo sapiens
ttattccagtgacataacgccatggtgtttgccaacaggaccctggtggtgaaatcaatgacagacaaagacgccggagattacctgtgtgtagctcgaaataaggttggtgatgactgcgtggtgctcaaggtggatgtgatgatgaaaccggccaagattgaacacaaggaggagaacgaccacaaagtcttctacaggggtgacctgaaagtggactgtgtggccactggacttcccaatcccgagatctcctggagcctcctggatgggagtctggtgaactccttcatgcagtcagatgacagtggtggacgcaccaagcactatgtggtcttcaacaatgggacactctacttcagtgaagtggggatgagggaggaaggagactacacctgctttgctgaaaatcaggttgggaaggatgagatgagagtcagagtcaagatggtgacacctgccaccatctggaacaagacttacttggcagttcaggtaccctatggagatgtggtcactgtaacctgtgaggccaaaggagaacccatgcccaaggtgacttggttgtccccagccaacagggtgatccccacctcctctgagaagtatcagatataccaatatggcactctccttattcagaaagcccagtgctctgacagcggcaactacacctgcctggtcaggaacagtgccggagaggataggaagacagtgtggattcacgtcaacctccagccacccaagatcaatggtaaccccaaccccatcaccaccgtgtgggagatagcagccgggggcagtcggaaactgattgactgcaaagctgaaggcatccccaccccgagggtgttatgggcttttcccgagggtgtggttctgccagatccatactatggaaaccggatcactgtccatggcaacggttccctggacatcaggagtttgaggaagagcgactccgtccagctggtatgcatggcacgcaacgagggaggggaggcgaggtgggcggatcacgaggtcaggagatcgagaccatcctggctaacatggtgaaaccccgtctctactaaaaatataaaaaattagccaggcgtggtagcgggcgcctgtagtcccagctactcgggaggctgaggcaggagaatggcgtgaacccgggaggcggagcttgcagtgagccgagatcacgccactgcactccagcctgggcgacagagcgagactccgtctc

SEQ ID NO: 466825 - DNA, 8337 bp, Homo sapiens
  misc_feature (1530)..(1530): n is a, c, g, or t
  misc_feature (1534)..(1534): n is a, c, g, or t
  misc_feature (1536)..(1536): n is a, c, g, or t
  misc_feature (1538)..(1538): n is a, c, g, or t
  misc_feature (1540)..(1540): n is a, c, g, or t
  misc_feature (1542)..(1543): n is a, c, g, or t
  misc_feature (1548)..(1549): n is a, c, g, or t
tggtgttgctcacttcaaaaatgaagctgcagaccttagtgatgtgtccagagtgtcttccttctggcaggttcatgttcttgttcacttcactaatgaagctgcaaaccttactggttcgtggtcttgctcacttccttaatgaagctgcagaccttactgatgtgtccagtgtttcttccttctggcaggttcatggtcttgctcacttcaagaatgaagctgcaggccttactgatgtgtccagagtttcttctttctgggagtttcgtggtcttcctcacttcaagaatgaagctgcagaccttactgatatgtccagcgtttcttccttctggcaggttcatggtcttgctcatttcaagaatgaagctgcagacttttacgatgtgtccagagtttctttcttctggcaggttcatggtgttgctcacttcaagaatgaagctgcagaccttactgatgtgtccagagattcttccttctggcagtttcctggtcttcctcacttcaagaatgaagctgcagactttactgatgtgtccagggtttctgtcttctggcaggttcatggtcttgctcaattcaagaatgaagctgccgatattagtgatgtgtccagagttacatccttctggcaggttcatggtgttgctcacttcaagaatcaagctgcagaccttactgatgtttccagagtttcttccttctggcaggttcgtggtcttgctcacttctttaatgaagctgcagaccttactgatgtgtccagagtgtcttccttctggcaggttcgtggtcttgctcacttcactaatgaagctgcagaccttactgatgtgtccagcgtttcttccttctggcaggttcatggtcttcctcacttcaagaatgaagctgcagaccttactggtccagagtttgtttcttcagatgtgtccagagtttcttccttctggcagtttcgtggtcttcctcacttcaagaatgaagctgcagaccttactggtgagtgttacagcactttaaggtgttatgtccagagtttgttccttcagatgtgtccagagtgtcttccttctggcaggttcatggtcttgctcacttcactaatgaagctgcagaccttactggttcatggacttcctcacttcaagaatgaagctgccgaccttagtgatgtgtccagcgtttcttccttctggcaggttcatggtcttcctcacttcaagaatgaagctgcagaccttactgatgtttccagagtttcttccttctggcaggttcgtggtgttgctcacttctttaatgaagctacagaccttactgatgtgtccagagtttcttccttctggcagtttcgtggtcttcctcacttcaagaatgaagctgcagaccttactggtgagtgttacagcactttaaggtgttatgtccagagtttcttccttcagatgtgtccagagtgtcttccttctggcaggttcatggtcttactcacttcaagaatgaagctgcagaccttactgntgangntncngnncttanngatgtttccagagtttcttccttctggcaggttcgtggtcttgctcacatctttaatgaagctgcagaccttactgatgtgtccagagtttcttccttctggcagtttcgtggtcttcctcacttcaagaatgaagccgcagaccttagtgttgagtgttacagcacagtgtcttccttctggcaggttcatggtcttgctcacttcaagaatgaagctgcagaccttactgatgtgtccagaatttcttccttccggcagtttcgtggtcttcctcacttcaagaatgaagctgcagaccttagtgttgagtgtgtgtccagggtttctgtcttctggcaggttcatcgtcttgctcacttcaagaatgaagctgccgacctttgtgatgtgtccagagtttcttccttcttggaggttcgtggtcttgttcacttccttaatgaagctgcagaccttaccgatgtgtccagagtgtcttccttctggcagcttcatggtcttgctcacttcactaatgaagctgcagaccttactgatgtgtccagaggttcttccttctggcaggttcatggtgttgctcacttcaagaatgaagctgcagaccttagtgatgattccagagtttcttccttcttgcaggttcgtggtcttgctcacttccttaatgaagctgcagaccttactgatgtgtccagagtttcttctttctggcagtttcgtggtcttcctcacttcaagaatgaagctgcagaccttactgatgtgtccagggtttctatcttctggcaggttcatggtgttgctcacttcaagaatgaatctgccgaccttagtgatatgtccagcgtttcttccttctggcaggttcatggtcttgctcatttcaagaatgaagctgcagacttttacgatgtgtccagagtttctttcttctggcaggttcatggtgttgctcacttcaagaatgaagctgcagaccttactgatgtgtccagagattcttccttctggcagtttcctggtcttcctcacttcaagaatgaagctgccgaccttagtgatgtttccagagtttcttccttctggcaggttcgtggtcttgctcacatctttaatgaagctgcagaccttactgatgtgtccagagtttcttccttcttgcagtttcgtggtcttcctcacttcaagaatgaagctgcagaccttactggtcatggtcttgcctcatccaagaatgaagctgcagaccttactgatgtgtccagagtttcttccttcttgcaggttcgtggtcttgctcacttccttaatgaagctgcagaccttactgatgtgtccagagttttttccttctggcaggttcgtggtcttgctcacttccttaatgaagctgcagaccttactgatgtgtccagagtttcttccttcttgcaggttcgtggtcttgctcacttccttaatgaagctgcagaccttaatgatgtgtccagagtttcttccttctggcatgttcatggtgttgctcacttcaagaatgaagctgcagactttagtgttgagtgttacagcacttataggtgttatgtccagtgtttgttccttcagatgtgcccagagtttcttccttcttgcaggttcgtgttcttgctcacttccttaatgaagctgcagaccttactggttcgtgttcttgctcacttctttaatgaagctgcagaacttactgatgtgtccagagtttcttccttctggcagtttcgtggtcttcctcacttcaagaatgaagctgcagaccttagtgatgtttccagagtttcttccttctggcaggttcgtggtcttgctcacttctttaatgaagctgcagaccttactgatgtgtccagggtttctgtcttctggcaggttcatggtcttcctcacttcaagaatgaagctgccgaccttagtgatgtttccagagtttcttccttctggcaggttcgtggtcttgctcacatctttaatgaagctgcagaccttactgatgtgtccagagtttcttccttctggcagtttcgtggtcttcctcacttcaagaatgaagccgcagaccttagtgttgagtgttacagcacagtgtcttccttctggcaggttcatggtcttgctcacttcaagaatgaagctgcagaccttactgatgtgtccagaatttcttccttccggcagtttcgtggtcttcctcacttcaagaatgaagctgcagaccttagtgttgagtgtgtgtccagggtttctgtcttctggcaggttcatcgtcttgctcacttcaagaatgaagctgccgacctttgtgatgtgtccagagtttcttccttctggcaggttcctggtcttgctcacttctttaatgaagctgcagaccttactgatgtgtccagagtttcttccttctggcagtttcgtggtcttcctcacttcaagaatgaagctgcagaccttagtgttgagtgttatagcaccaggttcatggtcttcctcacttcaagaatgaagctgcagaccttactggttcgtggtgttgctcacttctttaatgaagctgcagaccttactgatgtgtccagagtttcttccttctggcagtttcgtggtcttcctcacttcaagaatgaagctgcagaccttactgatgtgtccagggtttctgtcttctggcaggttcatggtcttgctcacttcaagaatgaagctgcagactttagtgatgtgtccagagttgcttccttctggcaggttcgtggtcttgctcacttccttaatgaagctgcagaccttactgatgtgtccagtgtttcttccttctggcaggttcatggtgttgctcacttgaagaatgaagctgcagaccttcctgatgtttccagagtttcttccttcttgcaggttcgtggtcttgctcacttccttaatgaagctgcagaccttaatgatgtgtccagtgtttcttccttctggcaggttcatggtcttgctcacttcaagaatgaagctgcagaccttactgatgtgtccagagtttcttccttctggcagtttcgtggtcttcctcacttcaagaatgaagctgcagaccttagtgttgagtgttacagcacagtgtctttcttctggcaggttcatggtcttgctcacttcaagaatgaagctgcagaccttactgatgtgtccagggtttctgtcttctggcaggttcatggtcttgctcacttccagaatgaagctgcagactttagtgatgtgtccagagtttcttccttctggcaggttcgtggtcttgctcacttccttaatgaagctgcagaccttactgatgtgtccagtgtttcttccttctggcaggttcatggtgttgctcacttcaagaatgaagctgcagaccttactgatgtgtccagagtttcttccttcttgcaggttcgtggtcttgctcacttccttaatgaagctgtagaccttaatggtgagtgttacagcacttcaaggtgttatgtccagagttttttccttcagatgtgtcctgagtgtcttccttctggcaggttcatggtcttgctcacttcactaacgaagctgcagaccttactggttcgtggtctggctcacttccttaatgaagctgcagaccttaatgatgtgtccagggtttctgtcttctggcaggtacatggtcttgctcacttcaagaatgaagctgccgaacttagtgatgtgtccagagtttcttccttcttgcaggttcgtggtcttgctcacttccttaatgaagctgcagaccttactgatgtgtccagtgtttcttccttctggcaggttcatggtcttgctcacttcaagaatgaagctgcaggccttactgatgtgtccagagtttcttctttctgggagtttcgtggtcttcctcacttcaagaatgaagctgcagaccttactgatatgtccagcgtttcttccttctggcaggttcatggtcttgctcatttcaagaatgaagctgcagacttttacgatgtgtccagagattcttccttctggcagtttcctggtcttcctcacttcaagaatgaagctgcagactttactgatgtgtccagagtgtcttcattctggcatgttcacggtcttgctcacttcactaatgaagctgcagaccttactgatgtgtccagagtttattccttcttgcaggttcgtggtcttgctcacttccttaatgaagctgcagaccttaccgatgtgtccagggtttgtgtcttctggcaggttcatggtcttgctcacttcaagaatgaagctgccgaccttagtgagtttgttccttctgatgtgtccagagtgtcttccttctggcagcttcatggtcttgctcacttcactaatgaagctgcagaccttactgatgtgtccagagtttattccttcttgcaggttcttggtcttgctcacttccttaatgaagctgcagaccttaccgatgtgtccagggtttctgtcttctggcagtttcatggtcttgctcacttcaagaatgaagctgccgaccttagtgatgtgtccagagtttcttccttcttgcaggttcgtggtcttgctcacttccttaatgaagctgcagaccttaccgatgtgtccagtgtttcttccttctggcaggttgattgtcttgctcacttcaagaatgaagctgcagaccttactgatgtttccagagtttcttccttctggcaggttcgtgatcttgctcacttctttaatgaagctgcagaccttactgatgtttccagagtttcttctttctggcagtttcttggtcttcctcacttcaagaatgaagctgcagacattactgagtttgttccttctcgtgtttccagagtttcttccttctggcaggttcgtggtcttgctcacttctttaatgaagctgcagaccttactgatgtgtccagagtttcttccttctggcagtttcgtggtcttcctcacttcaagaatgaagctgcagaccttactggtgagtgttacagcacttatagttgttatgtccagagtttgttccttcggatgtgtccagagtgtcttccttctggcaggttcatggtcttcctcacttcactaatgaagctgcagaccttactggttcgtggtcttgctcacttccttaatgaagctgcagaccttaccgagtttgttccttcggatgtttccagagtttcttccttctggcaggttcgtggtcttgctcacttctttaatgaagctgcagaccttaatgatgtgtccagagtttcttctttctggcagtttcgtggtcttcctcacttcaagaatgaagctgcagacattactgatgtgtccagagtttcttccttctggcaggttcatggtgttgctcacttcaagaatgaagctgcagaccttactggtatttccagagtttcttccttctggcaggttcgtggtcttcctcacttctttaatgaagctgccgaccttactgatgtgtccagagtttcttccttctggcagtttcgtggtcttcctcacttcaagaatgaagctgcagaccttactgatgtgtccagggtttctgtcttctggcatgttcatggtcttgctcacttcaagaatgaagctgccgaccttagtgatgtgtccagagtttcttccttcttgcaggttcgtggtcttgctcacttccttaatgaagctgcagaccttaccgatgtgtccagtctttcttccttctggcaggttcatggtcttgctcacttcaagaatgaagctgcagaccttactgatgtttccagagtttcttccttctggcaggttcgtggtcttgctcacttctttaatgaagctgcagaccttactgatgtgtccagagtttcttctttctggcagtttcgtggtcttcctcacttcaagaatgaagctgcagacattactgatgcgtccagagtttcttccttctggcaggttcatggtgttgctcacttcaagaatgaagctgcagaccttactggtttttccagagtttcttccttctggcaggttcgtggtcttgctcacttctttaatgaagctgcagaccttactgatgtgtcaagagtttcttccttctggcagtttcgtggtcttcctcacttcaagaatgaagctgcagaccttactgatgtctccagagtttcttccttctggcaggttcgtggtcttgctcacttcaagaatgatgctgcagaccttagtggtgagtgtttcaacactaaaaggtgttatgtccagagtttgttccttcagaagtatccagggtttcttccttctggcaggttcatggtcttgctcactttaagaatgaagctgcagaccttactggttcatggtcttgttcacttcaagaatgaagctgcagaccttagtgatgtgtccagagtttcttccttctggcaggttcatggtctttctcacttcaagaatgaagctgcagaccttactggtcttctgattctccgctagtttggtaaggataattgcctacagctccctagaggcaattatctcaattttctcaaaggacattatctcctttttttatgtttgcatattattctgcagaaaatttgttatcacagtttcttcatctattctatcatcaatggtcctttaggttgattcaatgtatttgttattgcaaaacaaaaaaaattgtatttcaccttactaagcttcataaataaaagtct

SEQ ID NO: 466826 - DNA, 1169 bp, Homo sapiens
tgtctcacatagtaaaccaaatatgttgctcctagtttacaaaagagctgaatattttagggaattctctctcattttaacacattgcttgcaggagtatacattggttatggccactttggaaaattatctggcaagttttactaaaataattcacatgcataccataaatccagcaatttctttcctagaattaagcccagcaaagatgtgtacacgtgtttaccaaaagatatgtaccaaaatgttcataacagcactattcatagtagtccaactggaagttgccctaataggcaagcagcttagatccaggcaagggaagacagaaccgtctttaaccagagaagcagaaacagttgtagcacagctcatagagaaagtgttggagcatggagtaaattcaactgcctgggtagcgcgccagctggaggaaggcagcaattggataactggatttgtgtcaggaaaatgagagagaggaggaagggagtgagagagacagacagagggagggagagaaagagagattgagctttcttcttcctcccttctatttggccttggaataccctgcagacaaagatggacttcctttagccgtgtcctctggcccaggctaccatcaccccccaaagccctgagcttgaaactggggtcaaggaagccttccacatgatcaatcagttacccaacctctttccctgttgtggctctgccctcctctggggtcttggagttctcaccataaacagcaattgtcgccacaaatgaagaatgttcacgtttgttttacaacttcttaatgcaccgcattcagtcttcctgtaaacttgactgcttagtccttaaagtatattggtggagcaatgtctgcatgccttcgtcaacacatctattggcctgtttgtcccagcatcccagttggaatgggaacccttctaagaaaagcctttatcctttactcacctacaaactcactgggcacccccggaattgtggtcctgggcgtatagcaggtgtctagtcactcttttctggttgtgccagtaattggggcctgattacaattctgtttcatccagtgcacctcaatggagagaaaccagcaagaaactcatgctttctgccccatctccttcctttcttctgtgtgtaaagtggagaaa

SEQ ID NO: 466827 - DNA, 1989 bp, Homo sapiens
tgcttagtgtcatttctcgtgtgtatacacctacaagtagaattaaggtggagcctacagaggcaggcaggcctccttgagctgtggtgggctccacccagttggagcttcccggctgctttgtttacctaagcaagcctgggcaatggcgggctcccctccccaagcctcgctgccgccttgcagtttgatctcagactgctgtgctagcaatcagcgagacctcactggcgtaggactctccaagccaggaagtctgtcccaggaagttttcaaacctctcttggccagagaacatcagtgggagtgattggaggccctggatgggaagtcccgccaagctggaacagctgagccatccaaacagcaaggatgacaaccttccctttctcctaagaactctgccccattcaagcttggcccaacactgttgccaggggctggctggaattccaagctgatttcaaacatttaggttcaagggatgcagatgcaggtttgttacatggataaactgcaagttgtgtagatttggtgcacagattatcttgttacccaaataatgagcacagtatgctgtaagcagttttctttgctcagcctcttctggccctccaccctgaagtagatcctgtgtccattattgtcttatttccatgtgtactcagttttaagcttatacatgtaagtgagaacatgctatttggttctctcttcctgtgttaatttgcttaggataatgccttccagctgcatccatgttgctgcaaaggacataattttattctttttttatgctgtctggtattccattgtgcatatatttatttttatgtatgtactttttaaattcagcttactgttaatggacacctgggttaatttcatgtctttgctagtacaaatagtgcagtaatgaacatatgtgtatatgtatttctatcatagaataatttccatttctttgagtatatgctgagcagtgggattgctgggtcaaagttagttttgttctaagttacttgggaaatcgtcaaacaaatttccacaatgcctaaacatgagcagaactacagttcccataagccctgtggacacctcctgtgggagatcagctgtgcccagtgcctgagctcatccacacctgttcttcttgctgcaactttgcacctgatgggcaacaccttggagctgatgggcaatgaagcccacaataacagaaagtgctgtaatattgtctgtgctgccttctctcctttgtacatccagcattttgagagtacgcaggatcaagaacttagttcattctgcctgcttggaagcactctagaccctatagtcttcagcacactgctgcggggcccacacagagtttgcctctggcagcacccaaaagcattcaccctggctcctgtacctgctcacctgtatgccccatcctacatattgtggcatgcagcagatccaactgagtggcattcaccactaccggtgccagtctggcctctccaaatacaaaaaccagacctttttttaataccaggtagctcctacagcttcaggctcctggctggtaacaaggcactgaaactcaatcttctcctagttccaagctagaaaccatagctataaaaatcaggcctttcaattaaacgaggtctccacacatgtcacagcattaggtggaatcccagcagtcctgaaaaacagattttccttatcacaagactaaagaagaaaagaagcttgtggaagtcatggaacagcataaaaaagacaaatacttgagttatagatgctttaaaaaggagaataaaaggattgaaagtttacttaaataatagctgaaaactttccaaatataaacatacttataaaaaggaataaatatccagatatagaaaataaaatgtctttagactgcaccctaacaaggccattccaagacatattataataaaactgtcaaagacaaaggatgcttaaagc

SEQ ID NO: 466828 - DNA, 916 bp, Homo sapiens
tgtactcacaaccagacaacttactcagtctgtgacccaggaaacggccagcgttataatgagagtgccacaggttgaggagacagtgaaggcaaatgccaagcaaggaagatacagccatagcccagccccagcaagcagggaatgcctagtgcagatgaccacaggtatctggcaggcagagactgaattcacagagagccttgacagggctgtttcagtattccaggcagatgatgaggaagacccctcttgcagccacaggacagggagtgggaatgtgccagcgctggttactgggtggatggaagatagagcaaatgtggatgtgaggctatgtatagagatcaggagtagaataaaagttatggaaagggtccacatccgagtaattgctaaaaccctaggaggggccgccgtccacttgcaggactcccgctactgggttatggtctccatgactgatgtggcttcggcaagtcgtgaccatacgggggaatcaaacccaggtcaaagagtcaccaaagtgagggtgggagaatgtggaactacactgaaggacacctggctactcttaagaaatccccatggtccagcattacctggaaagaagctaaagctattatccagcaatacccagcttgcattcctcatcttttacaggaagagttaatccttgaggattggaacctaaggatctttggcaaatggatgtcacacatgtttcctcatttgggagactaacttacgtacatgtatgtgtaaacaccttttctcacttcgtctgggctacgtgccaattaggagagtcttctgcctgtgttaaatgtcaacttttgcagtgttttgtgttgatgggcagtccagcttctattaaaatggacaatgccctaggctaccctaatgaagctgtagc

SEQ ID NO: 466829 - DNA, 2683 bp, Homo sapiens
taacgtgcaaccattaccgccatccgtttccataactcttttcatcttgttatacaggaagcatggtgccagcatctgcttctggtgagctcagcaaactttcagtcgtagtggaaggcaaagcaggaccagacaactcatggcaagagagggagcacaagagaggggatgagctggcagctgctgtagtcggattcactggcattgactgccacctggttggggaggagtcctatatctttgcagattccatctcagagatgagacattgtcccccttctctcagttcagccctgttttgtgtgcttttgtgttcatggcaccaaatccacaccctgcatcactcagagaatgagtccccgttccagaatcctcagggaatccccagaagtcactctggccatattgacttcagccacacattcatgcttgcatcaatcctggtcagagcaatagagagacagtatcttctttacccccagagtctgcacttccaggcacttccacgggaagggaggtgtggaatgaatgcaagacagatctccctggaacccgctgcaaaaaatgagtgtgggatggaaaaagagagcaccaaaggacagtgtgacaataaaaagtctaattttattctgcagctagttcaggcaataccaaaagtggatctgaggtggtataattgaattaagtcaaagtggttctatcaaacaataagatgtttgtgccatcagctatagactgtgagttcttggatgtggcagtttatttttctgagtctcagttttttcagttgtaagataataattactgttgtgtagggttttattgatgattaataaatatagtgttttataaagtccctactgtaatatctggcaaaaaaaaaaataggcacaaagtgaatggtagaattaatcatcaaaatgacaatttattgctatcatttttagtacattttgggtactcccaaagtgctagttactatattttagagttgttttgataaatataaaagatagtgtctctaaacaatgtagaataagtgggtagaaaattaatgttagaattaataacaatatattctatttaatattacataacatgtagttagtatttatgcataataatttattgttaatttcacattttatataattccaaggtgctaatttgaagaacaatgcttccctaaatatttaaatttaatgatggtagcttataaggtttgtcttcttactatgtggttctatatcacagtcattgcaaaaggacaataaattaacagtgctttagtgatggttataattcactattactacttgtcaatagttattaataaaaggttaactcttcatatgtgttcatttgtttacagtgctgtatacttcctgccttttgatactaaacaccttgtgaatacaatgatctaacttttgggaaagcaaagtacagatggccataactggattctggggatggggtctacccctggcaatgccttgcctgcttgtactttcagttatgttctaaagggcttatcttcagcaatcttattcctataagctgcttttaaaaacttagagatgtcaggcagtgggtcagatgagagctgtgcagcatggcagtatttagagtatttctgttttgaattgttttgtaccactcaaaacttcaatatatttctcacatcatagccttccacagtcacatatgcaaattcatattcataatcaaacttgtggattattcatctctgacactattattaattcctatggcattcttatttttagttccaagtgttctcttacttaaaagcctttgttgtcatcaattgttaattttagcattataatccgtgtgattgtttctctagtatttcctaagcattttttctgggttcttgttcacctttcaacccttttaatacatcccagaacacttaaacttttgcttaagtctcaaaagcacatacaattatttgaccaaataagtacatgattagaaattcataggtctcttaaaaatattttatgtcctatattaaatgtcaaataagagatagaagtttgtgattagataatattagaaacttggacttacttttataagttaagtaaactaatgttcagatgcatacaattcttactaaatacccctacctgtaacttttaagcattgccatttatcaattaacagttattttattaagcaatcattgtatgcctggatattcgtttgctgacatcttcatgtgcaaatcattccttctaaatcttaagaatacacacataagtgatatattccccttatatgttatagatgacatgaggaatgatttgcatttaggatgcatgatcaagtgcattagctcttcttgcaatttggtcaccagtgaaaagaaatttggggaattttgacactgggatgtaataaaatgggttatcaaaagacatgcttttttttaaaaaaaaagaaaatattttagaatgaggtatgccttacttacaaaacgaatgaggttgtctgtttccaaatgaggggttttaaaacatgtagactagcagtcaccaaggtgaaatgttttttaaaaggatcataatataaaaaatgacaccaaggcatagagtttaagagatatcaagtatgtgtgagcaagggtacatgaaataaatagtttgacttt

SEQ ID NO: 466830 - DNA, 692 bp, Homo sapiens
cactttgcatttcctaagaccatgaaagagaaaaagaaccagaggcaaaaatgtggtattagtaataatgaattggagagcatggaggcaggggaagatggaaatattccgggttgggagaagtttcctgagagggtttcaaggaaagtttggtccgggccggtgagtggcttagagaccatcagtgaaatacatatggcaagtgaagccgtggtaatgggtgatgtcacaccaaagagaggacagagtcataaggaaaaagatgaaaagcagacaaatagaggagggccctcccgggcccagactaatgccagcctcagtgcctttctcaacacagtctcatacttttcatgctcccattttcctcataattttacaggactccgttttctctcccctactagaatctacctggataactctcccatttattagtagtttgtgccagcttttccaggcagtgcttatttttcttggaaaagatagaagagtcagagttgaagggccaacccaaggatgaaggcactgcccgcccgcctgtggtgggcatgtggatgaggaatccgtgcctgcacatagcactcaagatccaccacactgacttctttaagggaaataaaatggagctctctgccccagaaattgttcatcatatggttgtgcatatttatatagagactgttatattttta

SEQ ID NO: 466831 - DNA, 1306 bp, Homo sapiens
gcgatagttgatagtcccttcatggtcgccaaaatgtgtccagaattggttcctaccagtgggttattggtctcactgacttcaagaatgaagctgcagaccctcacgatcccatccttctatggtcatgctctggttctccatcacaactgccagaaggactggactgaccctcctcagatgacagaactgaagggagccaaagtcctatttgtcctacagtggatccaaacaaaggccctctatcccctgtatggcctgcattccaaggatggattggggattcagatgtccttcatagataaggagtggatctccagagttctctcacagcagtgctggcatagacactactcaggtttgcgtggttctaacaactcagagtccgtgacactcttgtccttggatgcccttcatctcatgccccatgacttgagacagatagatgttctagcagattctctccagatatggaaaactgcagatgactggaagttcctgcaagtaaaaatctcccagatgaatttgcagagcaagcccgcacctcccacacaaaaggacaagagaactgatcctcttttctcatcacgtctgtcagtttatattcttcaacccccacaaagaagtgagcaaatcatcattcttcctttgaccaagaaaaacaatgcctttctttacatctactagtagaagcaacattatgaaataaaaatgaaaaacatccaagcagtcacaatgtttaaataagaattgttggtgcactgtctccatcagttgagtaaaagtttaaaattgtttcctgcttgccggttcacacctctcaccctcttctttccacatgcaaacacgcatttttcattttcacttaaatcttataagagggaaactcaggcattgagaagactgttcggtgtgtggtaacaccctggactacaatctaaagatggaccctgctcgctcaatctctagtttaattacctttgcttaaaatttacattcctatcaaccttcatggagccatacatttgttcctacaacctacatgacatctctgctccaaagagttcaaatgttgccccatatatgcagaacatttattgacttgaatttatgatgccaggagtgatagtaaatcagcgagaagtgggagaaaaactgttaagaaccctcacaacaatgaaagccagtttgccacattaatatttatctaatcagtggtttccttgctgcttcccaaggtctctagtccactattaaaatttgcctatttaacaattattttctatatgtctgttatgtaaggtat

SEQ ID NO: 466832 - DNA, 1450 bp, Homo sapiens
gttattctaaagagaaggcatctgatcctttaaagaccccactgctaatgcagaggcctgtcatcagcccattagcttttctgcaggacacttggagagtcccaggccatgagacactgtataggacctcgtggattatttacgggttcactcgcatagtgctgtttatgcttcatccatgagcccaccgatagcagagcaaatcatcagatcactaaaacttatcatgggactggatgggaccactcaagccaccgagcctcaacccatccattgcagcagatctcaaaagagtgagctattccgctggcttcccatctacccttctcatgaagtttccagcccctgcagcctgtcccccgcctgtcctctgcctccttgctccatggatcctgctccctctaaagccactcctgcctctttccctatcactatttgccctaatcccacactctgttctttttatagttcccgctgcacaagtaccctcacctgtttcctttccaaaacagcttgcggaccctctacccccagagatttctgcatgacatgcttgctgcattctaacaagccccaggtgctgctgctagtccagggaccagcctttgagaatcactgctgcataatgaccctgtagtcactctttccctcccatcagacattaatggcttgtggatttcttgtagatagaaaccattaaatctccataacagacagagttttgttcttcttgttgcccaggctatagtgcaatggcaagatctcggctcattgcaacctccacctcccggtgctgggattacaggcgtgagccaccgtgcccggcctgaatgtagtatctttcttctgttttcttttcctgctctttaaaaaacaaccttcaacctctgattatttattccaacaacagctcttcagtagggtaaaagtcttaacagttcttcaaacgaacaatattcttttgtatttttcttcagagatagcaaatgttataaatggcctactctgatttaaaaacctaagttccgatgatgatgaaacattaactcttaaatatacattttgatttatagcaataataacaattgtaacaacagcaattaagaacagcatctggtgaattcttggcaatgtttcctggtctcaaaacagtaagaacaatttgaagtctgttctttagaatgccctactcagctgcataatgtttagaaaattaaagagtctgtattttaaatatttttaggtaattattgcgggacattgtcttatggtgtcctgatgtacgtggggtgtgcatgtgtgtgtgtgtgtgtgtgcatgtgtctttgtgtgtgtgagaaggacagagagaaatgtatgtttcactgaaacatttgaaacgaccaatttcactttattgtgcctgtaaaatgttagttttaaaataaataaaaataatatgaaaataatt

SEQ ID NO: 466833 - DNA, 987 bp, Homo sapiens
aactttcacttaggcattgaagactctgcaaaattcctgccaagttagcttcctccccatgagggattgccacattttcttgtctatatgtgaagaggagcaagtgattagggataaaaataaacaaagcaatttaaaagaccagccttctgaatatgaaggctttacactatttgttatcaagattaaacctcatactatccttgatgcattattcacctacagtagcacattatttgctacgaaccgattatcaattctctgtgaagccagccatttttttcctgctggaggaaaccacttctcagaggatgccaaacaagggcagattcctcactcccccagactcttgatatctggaggtttatctagtccaggggctggcaaacagaaccacaagccaacagtggcctgctggatgtttctgaatggtttcagcatcttcaagatccaggaagaattccacggccacaccttctagcaggaagttacctagatggctgcctcgttcttattctccctttgtttaaaaccaacactcctggtaatcaaagcctgtttcataaccaaccagcttatgtctaatattcattagccactcaactaaaatatacatagaaattgctaaatacatttctacatttataagtccttcaaggagcaaacggctaaacaaactgtggtacattcatcatagaacaccactaggaataaaaaggaacactattcatacacacaacaacttggataaacctcaagaaaattatgctgaatgaaaattaccagtatgaaagaaatatatgctgcatgattccatgtatatagaattcctgaaatgacacagttagagtgacagtgaacagcgtgggagccagttgggattctttaaaaggcctgctgtgttgctgagtgtcctagaagaatgtagcattgcagtggttccggctgaaccaataaatcatgacctgaaaacaccagccattgtgc

SEQ ID NO: 466834 - DNA, 1170 bp, Homo sapiens
cctgactcacaagaagagaactgaatgcccagttcttacccttttgtcaaaggtcacgaccaggtgactccacgtttcctagaagacgaccacttgtggctggaaactcaccatcccccattgtgggaacatcaagatcagatgccctcaaaacaggcagcagccacaaaaggtgctgtccagcagtttctgctgccaagacaatttggatctgctttccatccaattcaacctcagttcctcctcatcctctccggctttccaatgatcccgtgtgatcctgaaaatccctgtggtaaatttccatctggcctaagaggaaaagggggaagagtggattggagagatgtgatgtgggaagaacccaacccatattgctggtttgaagatgtgggaagggggcctgagccaagggatgcagtagtctctagaaggtggggatggccctcagcttacagtcaacaagcaaatggagaccacagtcctacaaccacaagaaactaaattctgccaacaaccccaatgagcaggaaaccaatgctccctgagagactccagaaagaaatacagcctgctgacatcctaatttcagcctgaaaggccatttgagcacacagcaagaaggcaactgtctacaagccaggaagagagccttcactagatactgaccatgctgacatcttgatcttggacttcccagactccagaactgcacacatcaaggaaaggctgtgtgaggacacagggagaaagcatcatctacaaaccaggaagagagcccttactagaaacctaaccctaccagcaccttgaccttggacttctaccctacagaactgtgagaaataaatttctgttgtttaagccatcaagtctgtgatattttatgatggcagcctgagaagactgataaaaagctaaaacacatttaaatgaaaaaaaaaatatttatttatataatgtaaatatcttccagcttgatagcctctgtgggtgactgcattttggctgccacaatatctcccctcccacatgtacatctaccacgtgacattgagtatctcccatcccacacgtttatctaccacgtgacattgaattgtcaccaatcaagatgtacaatctgtgactttccctttggaattgcacaaacttatgtctcattagtaa

SEQ ID NO: 466835 - DNA, 2570 bp, Homo sapiens
agttccggggatcctgttatgggtctaagttccagggcagatatttgcagaaaggaatccgaagacctagccatgggcccaattcccaagaccgatgcaatgctgccagcaagggggctgagctcacacaaactatccacagcagctgcagctgaaatcagttcaaaggatacggaaataatgacaaagaaacaagggactattaatatttatcaagcagatttgaaaaacaatcacacagatgttttaaaggtgaaaaatataacagcctgggtgactgagcaagaccctatctctaaaaagagaggagacgagaggcgaggcgaggagaggagaggaaaggaaaggaaaagagaaggaaggaaggaagaaaggaaggagaaaggaaggaaaggaagaaaggaaaaaagaaaagaaaagaaaattcttatggataacttgcagcagcctccctctccatcagcatttgcttgcttcaccttgcacttttattaaaaatatcttttgagagcaaatgttaaatatagacattttcagacaaataaaaactgagaaagcataaactgggtggtgtttgtttaaataatataggagagagctatatagtgaaactgaaataaccctattaattatataaacatatatattatatgcactcttatgtcatactttgattgcttggttcagcccacgaggccactctgagccttcacatcccctcctttcaggcaagaatacccgataaccagtagattccatgaatctcctgattcactcagccatcactaacggcaaaaggagaactggatcataaaagcctaaagaatttggagagcttcaaggaagatataacacagatttgagtccaaaatatatttttacaggagaatactgaatggaatatttattgttaagcatctgagacagctttgtttctggattatccccagcagggattacagaaagcttatgagatttgtatattaaatcatcacaaaaattttttcagtatgtataaggagatgtatttcttaatagaagggaaaccagtaggaaataataattaaacatgatccttcactcatgatgtatggtggttccaatatccttctgccactcaaggaatatctgactggtaagggaagaatacctcaagcgagcatgcgtacagctccagtaaacacactgcggatgctcccctcccaagggcttgcaggccactgcacatgtacacagcctaccccacggaagaatcaggggagaaggaccacaagactccggaaacatgccaacatataaaacttcaaatcaaaaggtcaaaccaaggacttgatctctcaggtcactctcttggccctcttgcaagtgtactttacttcctttcattcctgctctaaagctttttaataaactttacattgaactttagacaactcttggtctaaaacttgcctcagtctctccttctgccttatacctcctcagtcaaattctttcttctgaggaggcaagaattgaagttgctgcagacctgtatggattcgctgccaataacacatgtatatttatgcttgtatgtgctcttcttaaagaaaagaagtttacccaaagtgttaggtgctaagacgtcttccctaaactccacctgattggccttcaaaccacaagctgactttcatgtctttcggggtggtgtttggttatgaataagttctttagtggtgatttctgagattttggcacaccaaaaagaaggatatttgtggcaattgaaccatctcagtcttcctcgtataaatattaagccaaagagcgtgcagaggaatgtcttacccataaggaatgggtaaggaatgtcttacccataaggaatgggtaaggaatgtcttacccataaggaatgggtaaggaatgtcttacgcataaggaatgggtaaggaatgtcttacccataaggaatgggtaaggaatgtcttacccataaggaatgggtaaggaatgtcttacccataaggaatgggtaaggaatgtcttacccataaggaatgggtaaggaatgtcttacgcataaggaatgggtaaggaatgtcttacccataaggaatgggtaaggaatgtcttacccataaggaatgggtaaggaatgtcttacccataaggaatgggtaaggaatgtcttacccataaggaatgggtaaggaatgtcttacccataaggaatggaacatagcacttttagatgtgtaattcatctaggaatatgtatatgtgtgtgtgttatacccatgagagaggtattcaaaatctttgggaattttgacactgcatcaacccataaggccaaaacccaggacaatgttgtggaatgtattattttttcacaaccctatcttttctctgaggtcacttttaacagaatatacttttatattctgttaaattcacttttaacagaatatactattctacaacttactgactttgggcttggccatgtgtcttgctttggtcaatggagtgtgagaagatataatctataccttggctgtccaaaggttttgaatgtgctc

SEQ ID NO: 466836 - DNA, 2046 bp, Homo sapiens
cgccgggatgggccccaagaggcgacagctgacgttccgggagaagtcacggatcatccaggaggtggaggagaatccggacctgcgcaagggcgagatcgcgcggcgcttcaacatcccgccgtccacgctgagcacgatcctgaagaacaagcgcgccatcctggcgtcggagcgcaagtacggggtggcctccacctgccgcaagaccaacaagctgtctccctacgacaagctcgagggcttgctcatcgcctggttccagcagatccgcgccgccggcctgccggtcaagggcatcatcctcaaggagaaggcgctgcgcatagccgaggagctgggcatggacgacttcaccgcctccaacggctggctggaccgcttccgccggcgccacggcgtggtgtcctgcagcggcgtggcccgcgcccgcgcgcgaaacgctgccccccgcaccccggcggcgcctgccagtccggccgcggtgccctcggagggcagtggcgggagcactactggttggcgcgctcgggaggagcagccgccgtcggtggccgagggctacgcctcgcaggacgtgttcagcgccaccgagaccagtctatggtacgacttcctgcccgaccaggccgcggggctgtgcggaggcgacggacggccgcgtcaagccacccagcgcctgagcgtcctgctatgcgccaatgccgacggcagcgagaagctgcccccgctggtggccggcaagtcggccaagccccgcgcaggccaagccggcctgccctgcgactacaccgccaactccaagggtggtgtcaccacccaggccctggccaagtacttgaaggccttggacacccgaatggctgcagagtctcgccgggtcctgctgttggccggccgcttggctgcccagtccttggacacctcgggcctgcggcatgtgcagctggccttcttccctcccggcaccgtgcatccgctggagaggggagtggtccagcaggtgaagggccactaccgccaggccatgctgctcaaggccatggccgcgctagagggccaggatccctcaggcctgcagctgggtctcacggaggccctgcactttgtggctgccgcctggcaggcagtggagccttcggacatagccgcctgctttcgtgaggctggctttgggggtggccctaatgccaccatcaccacttccctcaagagtgagggagaggaagaggaggaggaggaggaagaagaggaggaggaagagggtgaaggagaggaagaggaggaggaaggggaggaggaggaggaggaagggggggaaggagaggaattgggggaggaagaggaggtggaggaggagggtgatgttgatagtgatgaagaagaggaggaagatgaggagagctcctcggagggcttggaggctgaggactgggcccagggagtagtggaggccggtggcagcttcggggcttatggtgcccaggaggaagcccagtgccctactctgcatttcctggaaggtggggaggactctgattcagacagtgaggaagaggacgatgaggaagaggatgatgaagatgaagacgacgatgatgatgaggaggatggtgatgaggtgcctgtacccagctttggggaggccatggcttactttgccatggtcaagaggtacctgacctccttccccattgatgaccgcgtgcagagccacatcctccacttggaacacgatctggttcatgtgaccaggaagaaccacgccaggcaggagccagcccctccctccctacccctcctcactgaggccctcaggccccagcagttccaaccaagggagggcctgggcttgagcatggctggcagctctgggccccaaaccggttttcccacctcacctgaggctggcacatcacttctgtgtttccttcccatccccggcccacctttaccaccaagtttctcctctccaacactgggaatgttaatgggggagtatccagttcatctcttgtccctggcctgccctggttatggcccctt

SEQ ID NO: 466837 - DNA, 3114 bp, Homo sapiens
cgccgggatgggccccaagaggcgacagctgacgttccgggagaagtcacggatcatccaggaggtggaggagaatccggacctgcgcaagggcgagatcgcgcggcgcttcaacatcccgccgtccacgctgagcacgatcctgaagaacaagcgcgccatcctggcgtcggagcgcaagtacggggtggcctccacctgccgcaagaccaacaagctgtctccctacgacaagctcgagggcttgctcatcgcctggttccagcagatccgcgccgccggcctgccggtcaagggcatcatcctcaaggagaaggcgctgcgcatagccgaggagctgggcatggacgacttcaccgcctccaacggctggctggaccgcttccgccggcgccacggcgtggtgtcctgcagcggcgtggcccgcgcccgcgcgcgaaacgctgccccccgcaccccggcggcgcctgccagtccggccgcggtgccctcggagggcagtggcgggagcactactggttggcgcgctcgggaggagcagccgccgtcggtggccgagggctacgcctcgcaggacgtgttcagcgccaccgagaccagtctatggtacgacttcctgcccgaccaggccgcggggctgtgcggaggcgacggacggccgcgtcaagccacccagcgcctgagcgtcctgctatgcgccaatgccgacggcagcgagaagctgcccccgctggtggccggcaagtcggccaagccccgcgcaggccaagccggcctgccctgcgactacaccgccaactccaagggtggtgtcaccacccaggccctggccaagtacttgaaggccttggacacccgaatggctgcagagtctcgccgggtcctgctgttggccggccgcttggctgcccagtccttggacacctcgggcctgcggcatgtgcagctggccttcttccctcccggcaccgtgcatccgctggagaggggagtggtccagcaggtgaagggccactaccgccaggccatgctgctcaaggccatggccgcgctagagggccaggatccctcaggcctgcagctgggtctcacggaggccctgcactttgtggctgccgcctggcaggcagtggagccttcggacatagccgcctgctttcgtgaggctggctttgggggtggccctaatgccaccatcaccacttccctcaagagtgagggagaggaagaggaggaggaggaggaagaagaggaggaggaagagggtgaaggagaggaagaggaggaggaaggggaggaggaggaggaggaagggggggaaggagaggaattgggggaggaagaggaggtggaggaggagggtgatgttgatagtgatgaagaagaggaggaagatgaggagagctcctcggagggcttggaggctgaggactgggcccagggagtagtggaggccggtggcagcttcggggcttatggtgcccaggaggaagcccagtgccctactctgcatttcctggaaggtggggaggactctgattcagacagtgaggaagaggacgatgaggaagaggatgatgaagatgaagacgacgatgatgatgaggaggatggtgatgaggtgcctgtacccagctttggggaggccatggcttactttgccatggtcaagaggtacctgacctccttccccattgatgaccgcgtgcagagccacatcctccacttggaacacgatctggttcatgtgaccaggaagaaccacgccaggcaggcgggagttcgaggtcttggacatcaaagctgagtcactggacctagctgtgcccccaacctagattggcagcaccaccccagggcagaggactctctgggcacccgctgtgcatggagccagagtgcagagccccagatcctttagtaatgcttcccctggtcctgcaacaggcccggtcacctcggccgggcccggggctgaggtcagcctcactgcctgcttattgcctctttctcagaatcctctttcctccccatttggccctgggctcaggggaccaggtggggcgggtggggagctgtccggtgctaccacaccgtgccctcagtggactaaccacagcagcagccagggatgggccctggaggttcccggccggagagtgcctctcccctctgccatccacgtcaggtctttggtggggggaccccaaagccattctgggaagggctccagaagaaggtccagcctaggccccctgcaaggctggcagcccccacccccaccccccaggccgccttgagaagcacagtttaactcactgcgggctcctgagcctgcttctgcctgctttccacctccccagtccctttctctggccctgtccatgtgactttggcccttggttttctttccagattggaggtttccaagaggccccccaccgtggaagtaaccaagggcgcttccttgtgggcagctgcaggccccatgcctctcctccctctctggcagggccccatcctgggcagaggggcctggggctgggcccagagtccagccgtccagctgctcctttcccagtttgatttcaataaatctgtccactccccttttgtgggggtgaacgttttaaacaggcagttaaacgttccaatatctacacttaacccactacgacatgattaccttcactgttaccctacacaatcaatccttagggggccccgttaaccaaaaactccctaaggttgtgcgtttacaatattaccgccttactctaacattactatgatttcaaaaccttggagattcccaattaaagacctttctagaaaatccttgttttaacagatgtaaacagacttacagggcatcccccatttgtcctaataaaccctaacccctgtcctaaccgcataaatttccttttgccaccctttattttaatggtttaaaattcctgttgtgaatattggatatcctctcctcttctttttttaacccccatagtgacaaaatttggttgttttaattaatttaaccaaatgtgacctctttgtaaggtcctttgtaccactttggaatggatattcccttcatggagttttttcccc

SEQ ID NO: 466838 - DNA, 3137 bp, Homo sapiens
cgccgggatgggccccaagaggcgacagctgacgttccgggagaagtcacggatcatccaggaggtggaggagaatccggacctgcgcaagggcgagatcgcgcggcgcttcaacatcccgccgtccacgctgagcacgatcctgaagaacaagcgcgccatcctggcgtcggagcgcaagtacggggtggcctccacctgccgcaagaccaacaagctgtctccctacgacaagctcgagggcttgctcatcgcctggttccagcagatccgcgccgccggcctgccggtcaagggcatcatcctcaaggagaaggcgctgcgcatagccgaggagctgggcatggacgacttcaccgcctccaacggctggctggaccgcttccgccggcgccacggcgtggtgtcctgcagcggcgtggcccgcgcccgcgcgcgaaacgctgccccccgcaccccggcggcgcctgccagtccggccgcggtgccctcggagggcagtggcgggagcactactggttggcgcgctcgggaggagcagccgccgtcggtggccgagggctacgcctcgcaggacgtgttcagcgccaccgagaccagtctatggtacgacttcctgcccgaccaggccgcggggctgtgcggaggcgacggacggccgcgtcaagccacccagcgcctgagcgtcctgctatgcgccaatgccgacggcagcgagaagctgcccccgctggtggccggcaagtcggccaagccccgcgcaggccaagccggcctgccctgcgactacaccgccaactccaagggtggtgtcaccacccaggccctggccaagtacttgaaggccttggacacccgaatggctgcagagtctcgccgggtcctgctgttggccggccgcttggctgcccagtccttggacacctcgggcctgcggcatgtgcagctggccttcttccctcccggcaccgtgcatccgctggagaggggagtggtccagcaggtgaagggccactaccgccaggccatgctgctcaaggccatggccgcgctagagggccaggatccctcaggcctgcagctgggtctcacggaggccctgcactttgtggctgccgcctggcaggcagtggagccttcggacatagccgcctgctttcgtgaggctggctttgggggtggccctaatgccaccatcaccacttccctcaagagtgagggagaggaagaggaggaggaggaggaagaagaggaggaggaagagggtgaaggagaggaagaggaggaggaaggggaggaggaggaggaggaagggggggaaggagaggaattgggggaggaagaggaggtggaggaggagggtgatgttgatagtgatgaagaagaggaggaagatgaggagagctcctcggagggcttggaggctgaggactgggcccagggagtagtggaggccggtggcagcttcggggcttatggtgcccaggaggaagcccagtgccctactctgcatttcctggaaggtggggaggactctgattcagacagtgaggaagaggacgatgaggaagaggatgatgaagatgaagacgacgatgatgatgaggaggatggtgatgaggtgcctgtacccagctttggggaggccatggcttactttgccatggtcaagaggtacctgacctccttccccattgatgaccgcgtgcagagccacatcctccacttggaacacgatctggttcatgtgaccaggaagaaccacgccaggcaggcgggagttcgaggtcttggacatcaaagctgagtcactggacctagctgtgcccccaacctagattggcagcaccaccccagggcagaggactctctgggcacccgctgtgcatggagccagagtgcagagccccagatcctttagtaatgcttcccctggtcctgcaacaggcccggtcacctcggccgggcccggggctgaggtcagcctcactgcctgcttattgcctctttctcagaatcctctttcctccccatttggccctgggctcaggggaccaggtggggcgggtggggagctgtccggtgctaccacaccgtgccctcagtggactaaccacagcagcagccagggatgggccctggaggttcccggccggagagtgcctctcccctctgccatccacgtcaggtctttggtggggggaccccaaagccattctgggaagggctccagaagaaggtccagcctaggccccctgcaaggctggcagcccccacccccaccccccagcccacccccccccccccccccgcgccgccttgagaagcacagtttaactcactgcgggctcctgagcctgcttctgcctgctttccacctccccagtccctttctctggccctgtccatgtgactttggcccttggttttctttccagattggaggtttccaagaggccccccaccgtggaagtaaccaagggcgcttccttgtgggcagctgcaggccccatgcctctcctccctctctggcagggccccatcctgggcagaggggcctggggctgggcccagagtccagccgtccagctgctcctttcccagtttgatttcaataaatctgtccactccccttttgtgggggtgaacgttttaaacaggcagttaaacgttccaatatctacacttaacccactacgacatgattaccttcactgttaccctacacaatcaatccttagggggccccgttaaccaaaaactccctaaggttgtgcgtttacaatattaccgccttactctaacattactatgatttcaaaaccttggagattcccaattaaagacctttctagaaaatccttgttttaacagatgtaaacagacttacagggcatcccccatttgtcctaataaaccctaacccctgtcctaaccgcataaatttccttttgccaccctttattttaatggtttaaaattcctgttgtgaatattggatatcctctcctcttctttttttaacccccatagtgacaaaatttggttgttttaattaatttaaccaaatgtgacctctttgtaaggtcctttgtaccactttggaatggatattcccttcatggagttttttcccc

SEQ ID NO: 466839 - DNA, 1754 bp, Homo sapiens
  misc_feature (12)..(12): n is a, c, g, or t
  misc_feature (22)..(22): n is a, c, g, or t
aacggctaggtngaggctgggnttgaatcggccgaggaggagagctcctcggagggcttggaggctgaggactgggcccagggagtagtggaggccggtggcagcttcggggcttatggtgcccaggaggaagcccagtgccctactctgcatttcctggaaggtggggaggactctgattcagacagtgaggaagaggacgatgaggaagaggatgatgaagatgaagacgacgatgatgatgaggaggatggtgatgaggtgcctgtacccagctttggggaggccatggcttactttgccatggtcaagaggtacctgacctccttccccattgatgaccgcgtgcagagccacatcctccacttggaacacgatctggttcatgtgaccaggaagaaccacgccaggcaggcgggagttcgaggtcttggacatcaaagctgagtcactggacctagctgtgcccccaacctagattggcagcaccaccccagggcagaggactctctgggcacccgctgtgcatggagccagagtgcagagccccagatcctttagtaatgcttcccctggtcctgcaacaggcccggtcacctcggccgggcccggggctgaggtcagcctcactgcctgcttattgcctctttctcagaatcctctttcctccccatttggccctgggctcaggggaccaggtggggcgggtggggagctgtccggtgctaccacaccgtgccctcagtggactaaccacagcagcagccagggatgggccctggaggttcccggccggagagtgcctctcccctctgccatccacgtcaggtctttggtggggggaccccaaagccattctgggaagggctccagaagaaggtccagcctaggccccctgcaaggctggcagcccccacccccaccccccaggccgccttgagaagcacagtttaactcactgcgggctcctgagcctgcttctgcctgctttccacctccccagtccctttctctggccctgtccatgtgactttggcccttggttttctttccagattggaggtttccaagaggccccccaccgtggaagtaaccaagggcgcttccttgtgggcagctgcaggccccatgcctctcctccctctctggcagggccccatcctgggcagaggggcctggggctgggcccagagtccagccgtccagctgctcctttcccagtttgatttcaataaatctgtccactccccttttgtgggggtgaacgttttaaacaggcagttaaacgttccaatatctacacttaacccactacgacatgattaccttcactgttaccctacacaatcaatccttagggggccccgttaaccaaaaactccctaaggttgtgcgtttacaatattaccgccttactctaacattactatgatttcaaaaccttggagattcccaattaaagacctttctagaaaatccttgttttaacagatgtaaacagacttacagggcatcccccatttgtcctaataaaccctaacccctgtcctaaccgcataaatttccttttgccaccctttattttaatggtttaaaattcctgttgtgaatattggatatcctctcctcttctttttttaacccccatagtgacaaaatttggttgttttaattaatttaaccaaatgtgacctctttgtaaggtcctttgtaccactttggaatggatattcccttcatggagttttttcccc

SEQ ID NO: 466840 - DNA, 1713 bp, Homo sapiens
  misc_feature (12)..(12): n is a, c, g, or t
  misc_feature (22)..(22): n is a, c, g, or t
aacggctaggtngaggctgggnttgaatcggccgaggaggggagtagtggaggccggtggcagcttcggggcttatggtgcccaggaggaagcccagtgccctactctgcatttcctggaaggtggggaggactctgattcagacagtgaggaagaggacgatgaggaagaggatgatgaagatgaagacgacgatgatgatgaggaggatggtgatgaggtgcctgtacccagctttggggaggccatggcttactttgccatggtcaagaggtacctgacctccttccccattgatgaccgcgtgcagagccacatcctccacttggaacacgatctggttcatgtgaccaggaagaaccacgccaggcaggcgggagttcgaggtcttggacatcaaagctgagtcactggacctagctgtgcccccaacctagattggcagcaccaccccagggcagaggactctctgggcacccgctgtgcatggagccagagtgcagagccccagatcctttagtaatgcttcccctggtcctgcaacaggcccggtcacctcggccgggcccggggctgaggtcagcctcactgcctgcttattgcctctttctcagaatcctctttcctccccatttggccctgggctcaggggaccaggtggggcgggtggggagctgtccggtgctaccacaccgtgccctcagtggactaaccacagcagcagccagggatgggccctggaggttcccggccggagagtgcctctcccctctgccatccacgtcaggtctttggtggggggaccccaaagccattctgggaagggctccagaagaaggtccagcctaggccccctgcaaggctggcagcccccacccccaccccccaggccgccttgagaagcacagtttaactcactgcgggctcctgagcctgcttctgcctgctttccacctccccagtccctttctctggccctgtccatgtgactttggcccttggttttctttccagattggaggtttccaagaggccccccaccgtggaagtaaccaagggcgcttccttgtgggcagctgcaggccccatgcctctcctccctctctggcagggccccatcctgggcagaggggcctggggctgggcccagagtccagccgtccagctgctcctttcccagtttgatttcaataaatctgtccactccccttttgtgggggtgaacgttttaaacaggcagttaaacgttccaatatctacacttaacccactacgacatgattaccttcactgttaccctacacaatcaatccttagggggccccgttaaccaaaaactccctaaggttgtgcgtttacaatattaccgccttactctaacattactatgatttcaaaaccttggagattcccaattaaagacctttctagaaaatccttgttttaacagatgtaaacagacttacagggcatcccccatttgtcctaataaaccctaacccctgtcctaaccgcataaatttccttttgccaccctttattttaatggtttaaaattcctgttgtgaatattggatatcctctcctcttctttttttaacccccatagtgacaaaatttggttgttttaattaatttaaccaaatgtgacctctttgtaaggtcctttgtaccactttggaatggatattcccttcatggagttttttcccc

SEQ ID NO: 466841 - DNA, 2850 bp, Homo sapiens
cgccgggatgggccccaagaggcgacagctgacgttccgggagaagtcacggatcatccaggaggtggaggagaatccggacctgcgcaagggcgagatcgcgcggcgcttcaacatcccgccgtccacgctgagcacgatcctgaagaacaagcgcgccatcctggcgtcggagcgcaagtacggggtggcctccacctgccgcaagaccaacaagctgtctccctacgacaagctcgagggcttgctcatcgcctggttccagcagatccgcgccgccggcctgccggtcaagggcatcatcctcaaggagaaggcgctgcgcatagccgaggagctgggcatggacgacttcaccgcctccaacggctggctggaccgcttccgccggcgccacggcgtggtgtcctgcagcggcgtggcccgcgcccgcgcgcgaaacgctgccccccgcaccccggcggcgcctgccagtccggccgcggtgccctcggagggcagtggcgggagcactactggttggcgcgctcgggaggagcagccgccgtcggtggccgagggctacgcctcgcaggacgtgttcagcgccaccgagaccagtctatggtacgacttcctgcccgaccaggccgcggggctgtgcggaggcgacggacggccgcgtcaagccacccagcgcctgagcgtcctgctatgcgccaatgccgacggcagcgagaagctgcccccgctggtggccggcaagtcggccaagccccgcgcaggccaagccggcctgccctgcgactacaccgccaactccaagggtggtgtcaccacccaggccctggccaagtacttgaaggccttggacacccgaatggctgcagagtctcgccgggtcctgctgttggccggccgcttggctgcccagtccttggacacctcgggcctgcggcatgtgcagctggccttcttccctcccggcaccgtgcatccgctggagaggggagtggtccagcaggtgaagggccactaccgccaggccatgctgctcaaggccatggccgcgctagagggccaggatccctcaggcctgcagctgggtctcacggaggccctgcactttgtggctgccgcctggcaggcagtggagccttcggacatagccgcctgctttcgtgaggctggctttgggggtggccctaatgccaccatcaccacttccctcaagagtgagggagaggaagaggaggaggaggaggaagaagaggaggaggaagagggtgaaggagaggaagaggaggaggaaggggaggaggaggaggaggaagggggggaaggagaggaattgggggaggaagaggaggtggaggaggagggtgatgttgatagtgatgaagaagaggaggaagatgaggagagctcctcggagggcttggaggctgaggactgggcccagggagtagtggaggccggtggcagcttcggggcttatggtgcccaggaggaagcccagtgccctactctgcatttcctggaaggtggggaggactctgattcagacagtgaggaagaggacgatgaggaagaggatgatgaagatgaagacgacgatgatgatgaggaggatggtgatgaggtgcctgtacccagctttggggaggccatggcttactttgccatggtcaagaggtacctgacctccttccccattgatgaccgcgtgcagagccacatcctccacttggaacacgatctggttcatgtgaccaggaagaaccacgccaggcaggcgggagttcgaggtcttggacatcaaagctgagtcactggacctagctgtgcccccaacctagattggcagcaccaccccagggcagaggactctctgggcacccgctgtgcatggagccagagtgcagagccccagatcctttagtaatgcttcccctggtcctgcaacaggcccggtcacctcggccgggcccggggctgaggtcagcctcactgcctgcttattgcctctttctcagaatcctctttcgccgccttgagaagcacagtttaactcactgcgggctcctgagcctgcttctgcctgctttccacctccccagtccctttctctggccctgtccatgtgactttggcccttggttttctttccagattggaggtttccaagaggccccccaccgtggaagtaaccaagggcgcttccttgtgggcagctgcaggccccatgcctctcctccctctctggcagggccccatcctgggcagaggggcctggggctgggcccagagtccagccgtccagctgctcctttcccagtttgatttcaataaatctgtccactccccttttgtgggggtgaacgttttaaacaggcagttaaacgttccaatatctacacttaacccactacgacatgattaccttcactgttaccctacacaatcaatccttagggggccccgttaaccaaaaactccctaaggttgtgcgtttacaatattaccgccttactctaacattactatgatttcaaaaccttggagattcccaattaaagacctttctagaaaatccttgttttaacagatgtaaacagacttacagggcatcccccatttgtcctaataaaccctaacccctgtcctaaccgcataaatttccttttgccaccctttattttaatggtttaaaattcctgttgtgaatattggatatcctctcctcttctttttttaacccccatagtgacaaaatttggttgttttaattaatttaaccaaatgtgacctctttgtaaggtcctttgtaccactttggaatggatattcccttcatggagttttttcccc

SEQ ID NO: 466842 - DNA, 2474 bp, Homo sapiens
cgccgggatgggccccaagaggcgacagctgacgttccgggagaagtcacggatcatccaggaggtggaggagaatccggacctgcgcaagggcgagatcgcgcggcgcttcaacatcccgccgtccacgctgagcacgatcctgaagaacaagcgcgccatcctggcgtcggagcgcaagtacggggtggcctccacctgccgcaagaccaacaagctgtctccctacgacaagctcgagggcttgctcatcgcctggttccagcagatccgcgccgccggcctgccggtcaagggcatcatcctcaaggagaaggcgctgcgcatagccgaggagctgggcatggacgacttcaccgcctccaacggctggctggaccgcttccgccggcgccacggcgtggtgtcctgcagcggcgtggcccgcgcccgcgcgcgaaacgctgccccccgcaccccggcggcgcctgccagtccggccgcggtgccctcggagggcagtggcgggagcactactggttggcgcgctcgggaggagcagccgccgtcggtggccgagggctacgcctcgcaggacgtgttcagcgccaccgagaccagtctatggtacgacttcctgcccgaccaggccgcggggctgtgcggaggcgacggacggccgcgtcaagccacccagcgcctgagcgtcctgctatgcgccaatgccgacggcagcgagaagctgcccccgctggtggccggcaagtcggccaagccccgcgcaggccaagccggcctgccctgcgactacaccgccaactccaagggtggtgtcaccacccaggccctggccaagtacttgaaggccttggacacccgaatggctgcagagtctcgccgggtcctgctgttggccggccgcttggctgcccagtccttggacacctcgggcctgcggcatgtgcagctggccttcttccctcccggcaccgtgcatccgctggagaggggagtggtccagcaggtgaagggccactaccgccaggccatgctgctcaaggccatggccgcgctagagggccaggatccctcaggcctgcagctgggtctcacggaggccctgcactttgtggctgccgcctggcaggcagtggagccttcggacatagccgcctgctttcgtgaggctggctttgggggtggccctaatgccaccatcaccacttccctcaagagtgagggagaggaagaggaggaggaggaggaagaagaggaggaggaagagggtgaaggagaggaagaggaggaggaaggggaggaggaggaggaggaagggggggaaggagaggaattgggggaggaagaggaggtggaggaggagggtgatgttgatagtgatgaagaagaggaggaagatgaggagagctcctcggagggcttggaggctgaggactgggcccagggagtagtggaggccggtggcagcttcggggcttatggtgcccaggaggaagcccagtgccctactctgcatttcctggaaggtggggaggactctgattcagacagtgaggaagaggacgatgaggaagaggatgatgaagatgaagacgacgatgatgatgaggaggatggtgatgaggtgcctgtacccagctttggggaggccatggcttactttgccatggtcaagaggtacctgacctccttccccattgatgaccgcgtgcagagccacatcctccacttggaacacgatctggttcatgtgaccaggaagaaccacgccaggcaggattggaggtttccaagaggccccccaccgtggaagtaaccaagggcgcttccttgtgggcagctgcaggccccatgcctctcctccctctctggcagggccccatcctgggcagaggggcctggggctgggcccagagtccagccgtccagctgctcctttcccagtttgatttcaataaatctgtccactccccttttgtgggggtgaacgttttaaacaggcagttaaacgttccaatatctacacttaacccactacgacatgattaccttcactgttaccctacacaatcaatccttagggggccccgttaaccaaaaactccctaaggttgtgcgtttacaatattaccgccttactctaacattactatgatttcaaaaccttggagattcccaattaaagacctttctagaaaatccttgttttaacagatgtaaacagacttacagggcatcccccatttgtcctaataaaccctaacccctgtcctaaccgcataaatttccttttgccaccctttattttaatggtttaaaattcctgttgtgaatattggatatcctctcctcttctttttttaacccccatagtgacaaaatttggttgttttaattaatttaaccaaatgtgacctctttgtaaggtcctttgtaccactttggaatggatattcccttcatggagttttttcccc

SEQ ID NO: 466843 - DNA, 648 bp, Homo sapiens
aattcaagcttctaacgatgtacggggactcctccctctctggcagggccccatcctgggcagaggggcctggggctgggcccagagtccagccgtccagctgctcctttcccagtttgatttcaataaatctgtccactccccttttgtgggggtgaacgttttaaacaggcagttaaacgttccaatatctacacttaacccactacgacatgattaccttcactgttaccctacacaatcaatccttagggggccccgttaaccaaaaactccctaaggttgtgcgtttacaatattaccgccttactctaacattactatgatttcaaaaccttggagattcccaattaaagacctttctagaaaatccttgttttaacagatgtaaacagacttacagggcatcccccatttgtcctaataaaccctaacccctgtcctaaccgcataaatttccttttgccaccctttattttaatggtttaaaattcctgttgtgaatattggatatcctctcctcttctttttttaacccccatagtgacaaaatttggttgttttaattaatttaaccaaatgtgacctctttgtaaggtcctttgtaccactttggaatggatattcccttcatggagttttttcccc

SEQ ID NO: 466844 - DNA, 2033 bp, Homo sapiens
tacgctaggtagaggctgggtgtgtatcggagagggcgctggcaggcagtggagccttcggacatagccgcctgctttcgtgaggctggctttgggggtggccctaatgccaccatcaccacttccctcaagagtgagggagaggaagaggaggaggaggaggaagaagaggaggaggaagagggtgaaggagaggaagaggaggaggaaggggaggaggaggaggaggaagggggggaaggagaggaattgggggaggaagaggaggtggaggaggagggtgatgttgatagtgatgaagaagaggaggaagatgaggagagctcctcggagggcttggaggctgaggactgggcccagggagtagtggaggccggtggcagcttcggggcttatggtgcccaggaggaagcccagtgccctactctgcatttcctggaaggtggggaggactctgattcagacagtgaggaagaggacgatgaggaagaggatgatgaagatgaagacgacgatgatgatgaggaggatggtgatgaggtgcctgtacccagctttggggaggccatggcttactttgccatggtcaagaggtacctgacctccttccccattgatgaccgcgtgcagagccacatcctccacttggaacacgatctggttcatgtgaccaggaagaaccacgccaggcaggcgggagttcgaggtcttggacatcaaagctgagtcactggacctagctgtgcccccaacctagattggcagcaccaccccagggcagaggactctctgggcacccgctgtgcatggagccagagtgcagagccccagatcctttagtaatgcttcccctggtcctgcaacaggcccggtcacctcggccgggcccggggctgaggtcagcctcactgcctgcttattgcctctttctcagaatcctctttcctccccatttggccctgggctcaggggaccaggtggggcgggtggggagctgtccggtgctaccacaccgtgccctcagtggactaaccacagcagcagccagggatgggccctggaggttcccggccggagagtgcctctcccctctgccatccacgtcaggtctttggtggggggaccccaaagccattctgggaagggctccagaagaaggtccagcctaggccccctgcaaggctggcagcccccacccccaccccccaggccgccttgagaagcacagtttaactcactgcgggctcctgagcctgcttctgcctgctttccacctccccagtccctttctctggccctgtccatgtgactttggcccttggttttctttccagattggaggtttccaagaggccccccaccgtggaagtaaccaagggcgcttccttgtgggcagctgcaggccccatgcctctcctccctctctggcagggccccatcctgggcagaggggcctggggctgggcccagagtccagccgtccagctgctcctttcccagtttgatttcaataaatctgtccactccccttttgtgggggtgaacgttttaaacaggcagttaaacgttccaatatctacacttaacccactacgacatgattaccttcactgttaccctacacaatcaatccttagggggccccgttaaccaaaaactccctaaggttgtgcgtttacaatattaccgccttactctaacattactatgatttcaaaaccttggagattcccaattaaagacctttctagaaaatccttgttttaacagatgtaaacagacttacagggcatcccccatttgtcctaataaaccctaacccctgtcctaaccgcataaatttccttttgccaccctttattttaatggtttaaaattcctgttgtgaatattggatatcctctcctcttctttttttaacccccatagtgacaaaatttggttgttttaattaatttaaccaaatgtgacctctttgtaaggtcctttgtaccactttggaatggatattcccttcatggagttttttcccc

SEQ ID NO: 466845 - DNA, 3040 bp, Homo sapiens
cgccgggatgggccccaagaggcgacagctgacgttccgggagaagtcacggatcatccaggaggtggaggagaatccggacctgcgcaagggcgagatcgcgcggcgcttcaacatcccgccgtccacgctgagcacgatcctgaagaacaagcgcgccatcctggcgtcggagcgcaagtacggggtggcctccacctgccgcaagaccaacaagctgtctccctacgacaagctcgagggcttgctcatcgcctggttccagcagatccgcgccgccggcctgccggtcaagggcatcatcctcaaggagaaggcgctgcgcatagccgaggagctgggcatggacgacttcaccgcctccaacggctggctggaccgcttccgccggcgccacggcgtggtgtcctgcagcggcgtggcccgcgcccgcgcgcgaaacgctgccccccgcaccccggcggcgcctgccagtccggccgcggtgccctcggagggcagtggcgggagcactactggttggcgcgctcgggaggagcagccgccgtcggtggccgagggctacgcctcgcaggacgtgttcagcgccaccgagaccagtctatggtacgacttcctgcccgaccaggccgcggggctgtgcggaggcgacggacggccgcgtcaagccacccagcgcctgagcgtcctgctatgcgccaatgccgacggcagcgagaagctgcccccgctggtggccggcaagtcggccaagccccgcgcaggccaagccggcctgccctgcgactacaccgccaactccaagggtggtgtcaccacccaggccctggccaagtacttgaaggccttggacacccgaatggctgcagagtctcgccgggtcctgctgttggccggccgcttggctgcccagtccttggacacctcgggcctgcggcatgtgcagctggccttcttccctcccggcaccgtgcatccgctggagaggggagtggtccagcaggtgaagggccactaccgccaggccatgctgctcaaggccatggccgcgctagagggccaggatccctcaggcctgcagctgggtctcacggaggccctgcactttgtggctgccgcctggcaggcagtggagccttcggacatagccgcctgctttcgtgaggctggctttgggggtggccctaatgccaccatcaccacttccctcaagagtgagggagaggaagaggaggaggaggaggaagaagaggaggaggaagagggtgaaggagaggaagaggaggaggaaggggaggaggaggaggaggaagggggggaaggagaggaattgggggaggaagaggaggtggaggaggagggtgatgttgatagtgatgaagaagaggaggaagatgaggagagctcctcggagggcttggaggctgaggactgggcccagggagtagtggaggccggtggcagcttcggggcttatggtgcccaggaggaagcccagtgccctactctgcatttcctggaaggtggggaggactctgattcagacagtgaggaagaggacgatgaggaagaggatgatgaagatgaagacgacgatgatgatgaggaggatggtgatgaggtgcctgtacccagctttggggaggccatggcttactttgccatggtcaagaggtacctgacctccttccccattgatgaccgcgtgcagagccacatcctccacttggaacacgatctggttcatgtgaccaggaagaaccacgccaggcaggcgggagttcgaggtcttggacatcaaagctgagtcactggacctagctgtgcccccaacctagattggcagcaccaccccagggcagaggactctctgggcacccgctgtgcatggagccagagtgcagagccccagatcctttagtaatgcttcccctggtcctgcaacaggcccggtcacctcggccgggcccggggctgaggtcagcctcactgcctgcttattgcctctttctcagaatcctctttcctccccatttggccctgggctcaggggaccaggtggggcgggtggggagctgtccggtgctaccacaccgtgccctcagtggactaaccacagcagcagccagggatgggccctggaggttcccggccggagagtgcctctcccctctgccatccacgtcaggtctttggtggggggaccccaaagccattctgggaagggctccagaagaaggtccagcctaggccccctgcaaggctggcagcccccacccccaccccccagccctttctctggccctgtccatgtgactttggcccttggttttctttccagattggaggtttccaagaggccccccaccgtggaagtaaccaagggcgcttccttgtgggcagctgcaggccccatgcctctcctccctctctggcagggccccatcctgggcagaggggcctggggctgggcccagagtccagccgtccagctgctcctttcccagtttgatttcaataaatctgtccactccccttttgtgggggtgaacgttttaaacaggcagttaaacgttccaatatctacacttaacccactacgacatgattaccttcactgttaccctacacaatcaatccttagggggccccgttaaccaaaaactccctaaggttgtgcgtttacaatattaccgccttactctaacattactatgatttcaaaaccttggagattcccaattaaagacctttctagaaaatccttgttttaacagatgtaaacagacttacagggcatcccccatttgtcctaataaaccctaacccctgtcctaaccgcataaatttccttttgccaccctttattttaatggtttaaaattcctgttgtgaatattggatatcctctcctcttctttttttaacccccatagtgacaaaatttggttgttttaattaatttaaccaaatgtgacctctttgtaaggtcctttgtaccactttggaatggatattcccttcatggagttttttcccc

SEQ ID NO: 466846 - DNA, 1833 bp, Homo sapiens
ggggatgaggaggagtggcgggggggtgtgaaggatagtgaatgggtggatggtgagagtgggtggaggatgaggtgtgagtgtagatgttgtgagtaaagaaggatggtgagaagaagtagatgatgcttggatggagattggaagagtttttggtaagggagtagtggaggccggtggcagcttcggggcttatggtgcccaggaggaagcccagtgccctactctgcatttcctggaaggtggggaggactctgattcagacagtgaggaagaggacgatgaggaagaggatgatgaagatgaagacgacgatgatgatgaggaggatggtgatgaggtgcctgtacccagctttggggaggccatggcttactttgccatggtcaagaggtacctgacctccttccccattgatgaccgcgtgcagagccacatcctccacttggaacacgatctggttcatgtgaccaggaagaaccacgccaggcaggcgggagttcgaggtcttggacatcaaagctgagtcactggacctagctgtgcccccaacctagattggcagcaccaccccagggcagaggactctctgggcacccgctgtgcatggagccagagtgcagagccccagatcctttagtaatgcttcccctggtcctgcaacaggcccggtcacctcggccgggcccggggctgaggtcagcctcactgcctgcttattgcctctttctcagaatcctctttcctccccatttggccctgggctcaggggaccaggtggggcgggtggggagctgtccggtgctaccacaccgtgccctcagtggactaaccacagcagcagccagggatgggccctggaggttcccggccggagagtgcctctcccctctgccatccacgtcaggtctttggtggggggaccccaaagccattctgggaagggctccagaagaaggtccagcctaggccccctgcaaggctggcagcccccacccccaccccccaggccgccttgagaagcacagtttaactcactgcgggctcctgagcctgcttctgcctgctttccacctccccagtccctttctctggccctgtccatgtgactttggcccttggttttctttccagattggaggtttccaagaggccccccaccgtggaagtaaccaagggcgcttccttgtgggcagctgcaggccccatgcctctcctccctctctggcagggccccatcctgggcagaggggcctggggctgggcccagagtccagccgtccagctgctcctttcccagtttgatttcaataaatctgtccactccccttttgtgggggtgaacgttttaaacaggcagttaaacgttccaatatctacacttaacccactacgacatgattaccttcactgttaccctacacaatcaatccttagggggccccgttaaccaaaaactccctaaggttgtgcgtttacaatattaccgccttactctaacattactatgatttcaaaaccttggagattcccaattaaagacctttctagaaaatccttgttttaacagatgtaaacagacttacagggcatcccccatttgtcctaataaaccctaacccctgtcctaaccgcataaatttccttttgccaccctttattttaatggtttaaaattcctgttgtgaatattggatatcctctcctcttctttttttaacccccatagtgacaaaatttggttgttttaattaatttaaccaaatgtgacctctttgtaaggtcctttgtaccactttggaatggatattcccttcatggagttttttcccc

SEQ ID NO: 466847 - DNA, 2720 bp, Homo sapiens
cgccgggatgggccccaagaggcgacagctgacgttccgggagaagtcacggatcatccaggaggtggaggagaatccggacctgcgcaagggcgagatcgcgcggcgcttcaacatcccgccgtccacgctgagcacgatcctgaagaacaagcgcgccatcctggcgtcggagcgcaagtacggggtggcctccacctgccgcaagaccaacaagctgtctccctacgacaagctcgagggcttgctcatcgcctggttccagcagatccgcgccgccggcctgccggtcaagggcatcatcctcaaggagaaggcgctgcgcatagccgaggagctgggcatggacgacttcaccgcctccaacggctggctggaccgcttccgccggcgccacggcgtggtgtcctgcagcggcgtggcccgcgcccgcgcgcgaaacgctgccccccgcaccccggcggcgcctgccagtccggccgcggtgccctcggagggcagtggcgggagcactactggttggcgcgctcgggaggagcagccgccgtcggtggccgagggctacgcctcgcaggacgtgttcagcgccaccgagaccagtctatggtacgacttcctgcccgaccaggccgcggggctgtgcggaggcgacggacggccgcgtcaagccacccagcgcctgagcgtcctgctatgcgccaatgccgacggcagcgagaagctgcccccgctggtggccggcaagtcggccaagccccgcgcaggccaagccggcctgccctgcgactacaccgccaactccaagggtggtgtcaccacccaggccctggccaagtacttgaaggccttggacacccgaatggctgcagagtctcgccgggtcctgctgttggccggccgcttggctgcccagtccttggacacctcgggcctgcggcatgtgcagctggccttcttccctcccggcaccgtgcatccgctggagaggggagtggtccagcaggtgaagggccactaccgccaggccatgctgctcaaggccatggccgcgctagagggccaggatccctcaggcctgcagctgggtctcacggaggccctgcactttgtggctgccgcctggcaggcagtggagccttcggacatagccgcctgctttcgtgaggctggctttgggggtggccctaatgccaccatcaccacttccctcaagagtgagggagaggaagaggaggaggaggaggaagaagaggaggaggaagagggtgaaggagaggaagaggaggaggaaggggaggaggaggaggaggaagggggggaaggagaggaattgggggaggaagaggaggtggaggaggagggtgatgttgatagtgatgaagaagaggaggaagatgaggagagctcctcggagggcttggaggctgaggactgggcccagggagtagtggaggccggtggcagcttcggggcttatggtgcccaggaggaagcccagtgccctactctgcatttcctggaaggtggggaggactctgattcagacagtgaggaagaggacgatgaggaagaggatgatgaagatgaagacgacgatgatgatgaggaggatggtgatgaggtgcctgtacccagctttggggaggccatggcttactttgccatggtcaagaggtacctgacctccttccccattgatgaccgcgtgcagagccacatcctccacttggaacacgatctggttcatgtgaccaggaagaaccacgccaggcaggcgggagttcgaggtcttggacatcaaagctgagtcactggacctagctgtgcccccaacctagattggcagcaccaccccagggcagaggactctctgggcacccgctgtgcatggagccagagtgcagagccccagatcctttagtaatgcttcccctggtcctgcaacaggcccggtcacctcggccgggcccggggctgaggtcagcctcactgcctgcttattgcctctttctcagaatcctctttcgccgccttgagaagcacagtttaactcactgcgggctcctgagcctgcttctgcctgctttccacctccccagtctcctccctctctggcagggccccatcctgggcagaggggcctggggctgggcccagagtccagccgtccagctgctcctttcccagtttgatttcaataaatctgtccactccccttttgtgggggtgaacgttttaaacaggcagttaaacgttccaatatctacacttaacccactacgacatgattaccttcactgttaccctacacaatcaatccttagggggccccgttaaccaaaaactccctaaggttgtgcgtttacaatattaccgccttactctaacattactatgatttcaaaaccttggagattcccaattaaagacctttctagaaaatccttgttttaacagatgtaaacagacttacagggcatcccccatttgtcctaataaaccctaacccctgtcctaaccgcataaatttccttttgccaccctttattttaatggtttaaaattcctgttgtgaatattggatatcctctcctcttctttttttaacccccatagtgacaaaatttggttgttttaattaatttaaccaaatgtgacctctttgtaaggtcctttgtaccactttggaatggatattcccttcatggagttttttcccc

SEQ ID NO: 466848 - DNA, 1828 bp, Homo sapiens
cgccgggatgggccccaagaggcgacagctgacgttccgggagaagtcacggatcatccaggaggtggaggagaatccggacctgcgcaagggcgagatcgcgcggcgcttcaacatcccgccgtccacgctgagcacgatcctgaagaacaagcgcgccatcctggcgtcggagcgcaagtacggggtggcctccacctgccgcaagaccaacaagctgtctccctacgacaagctcgagggcttgctcatcgcctggttccagcagatccgcgccgccggcctgccggtcaagggcatcatcctcaaggagaaggcgctgcgcatagccgaggagctgggcatggacgacttcaccgcctccaacggctggctggaccgcttccgccggcgccacggcgtggtgtcctgcagcggcgtggcccgcgcccgcgcgcgaaacgctgccccccgcaccccggcggcgcctgccagtccggccgcggtgccctcggagggcagtggcgggagcactactggttggcgcgctcgggaggagcagccgccgtcggtggccgagggctacgcctcgcaggacgtgttcagcgccaccgagaccagtctatggtacgacttcctgcccgaccaggccgcggggctgtgcggaggcgacggacggccgcgtcaagccacccagcgcctgagcgtcctgctatgcgccaatgccgacggcagcgagaagctgcccccgctggtggccggcaagtcggccaagccccgcgcaggccaagccggcctgccctgcgactacaccgccaactccaagggtggtgtcaccacccaggccctggccaagtacttgaaggccttggacacccgaatggctgcagagtctcgccgggtcctgctgttggccggccgcttggctgcccagtccttggacacctcgggcctgcggcatgtgcagctggccttcttccctcccggcaccgtgcatccgctggagaggggagtggtccagcaggtgaagggccactaccgccaggccatgctgctcaaggccatggccgcgctagagggccaggatccctcaggcctgcagctgggtctcacggaggccctgcactttgtggctgccgcctggcaggcagtggagccttcggacatagccgcctgctttcgtgaggctggctttgggggtggccctaatgccaccatcaccacttccctcaagagtgagggagaggaagaggaggaggaggaggaagaagaggaggaggaagagggtgaaggagaggaagaggaggaggaaggggaggaggaggaggaggaagggggggaaggagaggaattgggggaggaagaggaggtggaggaggagggtgatgttgatagtgatgaagaagaggaggaagatgaggagagctcctcggagggcttggaggctgaggactgggcccagggagtagtggaggccggtggcagcttcggggcttatggtgcccaggaggaagcccagtgccctactctgcatttcctggaaggtggggaggactctgattcagacagtgaggaagaggacgatgaggaagaggatgatgaagatgaagacgacgatgatgatgaggaggatggtgatgaggtgcctgtacccagctttggggaggccatggcttactttgccatggtcaagaggtacctgacctccttccccattgatgaccgcgtgcagagccacatcctccacttggaacacgatctggttcatgtgatacacggatatgtccccgcgtcaagacacgcgggcactgtatgatctgtgacctcaatctaacacctccctgtcata

SEQ ID NO: 466849 - DNA, 687 bp, Homo sapiens
tccacttcccgtgttcctcaaagagaaggtggatcctttcctgtgggctctgcatggtcttgaatataatcatggccaaaccttatgaatttaactggcagaaggaagttccctcctttttgcaagaaggagcagtttttgacagatacgaggagtcctttttcacttttccagatacttttttcttaactgtcaaacattttctgtctctcaatctaaagaagaaaacttcaaaattcaagtccctcctcatcctggagctgtttggctcccctttcacctcaaactctcctactcagactctcctgagatcctcccttttgcataagcctgaaagtcaaagtatgtccttaaaacacacaaaatctaaaaagagctttattcttaagaaggagactgccatcatagataagtgttcaccaacagaactttccacaatgatagaaatggtctacatttgtgttgccgttatggcagccacatgtggctgttcagcatttgaaatgtggctactgggactgagggacttaagtttttaatcttacataatttaaattcaaattcatataggtacatgggcctagtggctttcttattggatggcatagataatcaactcaaactacaaccagattttaaaattccattctcccttcttgacactaagaagcattctcagtgcattcc

SEQ ID NO: 466850 - DNA, 1300 bp, Homo sapiens
ctctctctctctctctctctctctctctctctctctctctctctctctctctctctccatgctaggatgtgccaggagacgaaaaccatggcagagaggtggctggaaaggtgaacaaagacactgcccccggccacatcttctgagctgtggaaaggcgagcaaaaacatgctgcagagcagccagctttccccggtcactgcatgttttaaagaggtgacagacgaggtctctatctccaccctccccttggcttcttcgaacattcagaggcggtctctgaaccataaacatgaaaatgctatccctgaaggctggagtaaatcttctaataacctcaacgtgggaagtgacaccacatcagaaaccagcttttctctctccaaagaagcaccaagggagcatctggaccaccaggctgcacaccaacccttccccagaccgcgattccgacaagagacggggcacccttcattgcaaagagatttccccagatcctttctccttgatctaccaaactttccagatctttccaaagctgatatcaatgggcagaatccaaatatccaggtcaccatagaggtggtcgacggtcctgactctgaagcagataaagatcagcatccggagaataagcccagctggtcagtcccatcccccgactggcgggcctggtggcagaggtccctgtccttggccagggcaaacagcggggaccaggactacaagtacgacagtacctcagacgacagcaacttcctcaacccccccagggggtgggaccatacagccccaggccaccggacttttgaaaccaaagatcagccagaatatgattccacagatggcgagggtgactggagtctctggtctgtctgcagcgtcacctgcgggaacggcaaccagaaacggacccggtcttgtggctacgcgtgcactgcaacagaatcgaggacctgtgaccgtccaaactgcccagagaagaagaaagagaaggaggaggaagaagagaaggggaagggcatggaggaagagaaggaggaggaggagggggaggaggaggaagaggaggaggaagctgcaaccaagaccatatgtgacccacaaaacctaaaatatgtaccctctgaccctttaaaaaaggcttagtaactcctggtgtatagtcttactgtgtatttcccattgccaggtagaataccagcctaaaataatatcttagagcctttcaagaaaccacacattccaaatggctttggctgaaaaaaatttcagagacagaaaatctgatccttacac

SEQ ID NO: 466851 - DNA, 926 bp, Homo sapiens
gaagataccgcgatgcccaactggccacgccaccaggtctggccttgcgtatccgcctccaaggatccaaagccggcctggggctgtccaatcgagtccgtggagagcccggagctactccatcgccgcccctgccccaaggcggtcgcgccctcacccctcgccgcactccgcccccaaccacccccgcgtgcccccgccagcctctggcccctgcactcagctagggggctgtgttccaactcccacctccatccccacggtggcgcagccgaggaaacctttcttgaccaaggccaagcccaagcccaagcccaatcctgcctgagcaaaaggaagggcggagctacccggtggaacggcctagccgctagcgtggctactccaacctggggcccgagcccctggagctggcggccgcggactgcgtccctggggacactggaggggactccagggacagcgtgggtgggcctttcccccgcacgcgcctctgtcactctctttccgggccagagccggggcagcgctctaaattaaggtcgacctccagcgctgggtgaagtcttgagtccgcccgggagccctaggtgagggtggtcgcggtttggcgggggctagcgggtcagcccctatttctgcccccaccccgattgcctctcgatgtcggcccccgcgctccctccctcgccggcgctccctccctcgctcgcgctccctgtacgtcgccgcgtttaccagcgcgttttgttcccctgtcggattcccggccgaggggctgtaaccgtgttctcctccgatggacgctaatcaagtaatttccccatcccagccccatcaaattgctctttagctgttgaaccgcggagttttgctcgccttttcacatgctaatcacgcccattcagcggctctcggtggggctg

SEQ ID NO: 466852 - DNA, 908 bp, Homo sapiens
gaagataccgcgatgcccaactggccacgccaccaggtctggccttgcgtatccgcctccaaggatccaaagccggcctggggctgtccaatcgagtccgtggagagcccggagctactccatcgccgcccctgccccaaggcggtcgcgccctcacccctcgccgcactccgcccccaaccacccccgcgtgcccccgccagcctctggcccctgcactcagctagggggctgtgttccaactcccacctccatccccacggtggcgcagccgaggaaacctttcttgaccaaggccaagcccaagcccaagcccaatcctgcctgagcaaaaggaagggcggagctacccggtggaacggcctagccgctagcgtggctactccaacctggggcccgagcccctggagctggcggccgcggactgcgtccctggggacactggaggggactccagggacagcgtgggtgggcctttcccccgcacgcgcctctgtcactctctttccgggccagagccggggcagcgctctaaattaaggtcgacctccagcgctgggtgaagtcttgagtccgcccgggagccctagaagagactggggcagcatgaatgtgctggaagattagaggctgctgatgctgaaggaaggagaaacgaggaggaagtgtccctgtggacaagtcatctcccttcatttaagccaggccagtagtccgggagacattctgaatgatgcattatcctaggcaccagaaagtatctaacattctcatggacagcagggaaaaatgagcacatgagacaggggaagattccagcacctgtgaacatgtttgtgcaggtttccagtcagtacatggatatccctcaagcctttgaatccagtctcctgtgttgtgattggacc

SEQ ID NO: 466853 - DNA, 743 bp, Homo sapiens
tgctgggaaatggtgcagaatgcttttgctacactcaagattctcctgagattgatcttgaagcaaaatgctgtggtttcagccacagcatccggcgaaggtgtcctgggtcattggaaccctcctgacctgtacaggctgcaagccactgataacttcatcagatgggcagacatgaatcaggggtcaggaagggacacgctgacacttaaagacacaacatttcctgatgctgtgtttttggtgacaaagactgtggattttgtcttgctcatactctttttctggctttattcacttacctgctctgataaattctgctgccatcctgagagctgcaccacggagaggcccacatggcaaggaactgagggctacctttactgtagcctgtgagagaccatgggccaagggatccaggacatcttctacagtagtggtaatcctccatatttcagctgacacctctatgtgagctgtggtcatcttagtgtcgagagagtcccctctgcccacatgaaaaccagtcagagacgagctgttttgaatcaagtctcctgctcttgtagacttttagtttgaccttggaatgttcaagcagacctctgcatttaatccaagattgaggcaagttttctctctgcctaggtttatcttgtctgtctgtgaacaaaagagaggatagcaaagtaccttgtttggatttgtctataaatgtgaccttcctaaactggctaacaggg

SEQ ID NO: 466854 - DNA, 607 bp, Homo sapiens
tgattgtcaatattatttgtcattttttacatttaggttaggaattttagtaacataacaacacttcagtttagtatatgttaatttgaaatataaatatacatatgttcttttccacatattatccaaaggctgcgagcttggagtggaagaataaggagaatcaagatactggttttaaatttctttttacattgtttcgaaagtattatcttcctcatttatttccatcatttactaagttaacaaacatctacaaacctgtacttggtaagtactgttggagccgtgtatagaggatatccaaaggaaagctatgcagtctctttcaaagtgacctttgattattttaaagtaaaatagtcattttatttttgtattgaatggtaactttattattaaatgtttaaagtttcttaataagtgattttaattatttgtaccaactaagatatacctcagcttacagcagtaaaagggaaccgtggctcctatactcagaaataatttgaaatgtatttatgatatttttggtataattacattgtcatcttttaatgtaaaaatctctgcatttcctgaagtctttccttgtgggtggtggggt

SEQ ID NO: 466855 - DNA, 974 bp, Homo sapiens
cacctggctatagactggtctggtatgattaactttattttacagagggataatgtggatgcaaatgatcttaagcagttttttgagaccaactattctcagatatatttcatcttctatgaaaattttatagcactggaaaatagtttgaaattaaaagatatgccaaagagaagctgtacagtgcttcctttaagtgaaaagataagatgtgaaggaatcaggctgtttcttctgtggcttcaagcacttcagacaaactgtgcagaagagcaggttctgatttttgcttgcctggtgcctggtttcccagcagtcatgtcatccaggggcccttgcacactggagacactcatcaatcccagccctagtgtagctgatgtaaagatatatccagaagaaatcactccactcctaccagccatatcaggggagaagattgctgaggaccaaacctgcttttttcttcaaatactgttgaagtatatggttattcaggctgcgagcttggagtggaagaataaggagaatcaagatactggttttaaatttctttttacattgtttcgaaagtattatcttcctcatttatttccatcatttactaagttaacaaacatctacaaacctgtacttggtaagtactgttggagccgtgtatagaggatatccaaaggaaagctatgcagtctctttcaaagtgacctttgattattttaaagtaaaatagtcattttatttttgtattgaatggtaactttattattaaatgtttaaagtttcttaataagtgattttaattatttgtaccaactaagatatacctcagcttacagcagtaaaagggaaccgtggctcctatactcagaaataatttgaaatgtatttatgatatttttggtataattacattgtcatcttttaatgtaaaaatctctgcatttcctgaagtctttccttgtgggtggtggggt

SEQ ID NO: 466856 - DNA, 1052 bp, Homo sapiens
acagaagcgtctttccaggtccataaataaagcaaagactggctggagagggtaaggcatggtctctggacacctgggctgtgcactgcagcagtgcgatgagggacagctggatgctgacgagcctcggcccgctttcctgacctggctcccaggatgctgcagtcagtcttcaccttccagtcaggagacctggagagtgttctctcgggagtctgtccagccaaagaagaaagagttaaaggtactgaaatcagcagtttcccagaaacatggcccatctggagtctcctacagtggagctgcagatgctgagtgtggaatgagaagttccaacacaggaggttaccgagtggcagcagactctggaaaagacctgttgcatttggctgtgcaggatgtacactgctcaacttctgatcatgccattcttttcattttctctgtggatgacatagaaatagagagaaatcaggacaatttagagcccctctgaaggctcctggggagacctccttaggaaattaaaatcaatagaaaacctcatgcagtaagaagaaatttagacaattgatagcatttgtgattgagtgaacgataaatacacagaaatctaagcaaatcaaaagaaaacaatgattaactttggagtattaataactacaaaaattaaatcataataagatctgaggagtatttacatattcataataattcaagcactgatgatttatctctaactacaaattttgaaataattatgttgggagagccagggttatgggaaagtggcgtgtgtgcagaggggtgatataaaagtcaagatgtagcaataaaaacatattcttcaagaaaggttagcatatgccaaaacagtcagctaagatccatgaagggggctgatgagtaggggcaatgatattttataacaaaacttgaattgttacgctctttaaactgtatgtatttgtaactttgctaaaaatagaaactagtaaaagttttaaaagttctttcaactctgggaaagtcatttaatctctcttagcctc

SEQ ID NO: 466857 - DNA, 1835 bp, Homo sapiens
ttcaaccattgtggaagtcgggacacggatgaagctggaaatcatcattctcagcaaactatcgcaaggacaaatgagaacaggatgcccacttttatcactcgtattcaaaatagttctgggcatccaagccagaacaatcaggcaagagaacgacatgaaagacatccaaattgaaaaagaggaagatacaatatcaaatataaaaatcaggggctttatgtatgtcaataatgaactagctaaaaaagaaatcaagagggtaatctcatttgtaataggtaagaaatacctaggaatatatttaacaaaggaagtgaaagatctctacaaggaaaactgtaaagcatgggtgaaagaaattgaagaggacacatacaaatggaaaggcattccatgcacaaggatcagaagaaacctaatgttgttaaaatgactatgctgcccaaagcagtctgcaaattcaagaccttcttctcagagctctgacttagcttctgatgtagctggcagaatttcttctctctcattcccaccaaagtatatatctgttgaattgttgaactggattatgtcagaagcattaattggaaatcatcactctgtagagaacaacaaaaacacaaaatctcatgaccaaggaagagcaaaagaacttgtcgggatttctcgacctcacctctcagaatgttgacaatgaactacaaccaaaacacaaccatggcaacaaattagatatttgttgaatcaggccaagacacagaaatatactgcatgccaaaatgtaaaggtgacatgagtgatcaaaagagagggaaagtgaaaggtcaagggagaaactctcagcatgtaggtacagaaccatttccatgaggtcagctacattccaaagtggctgcggcactggatgggagctgttgggacatgctgcacagcccaagacagtctttgaagatggctggatgcatgaccttgtcatatacgtaaaacatccacagactaactggaaaaggacttcacctcagccaaagtgagtgcattgcagaataagtgcagagagcttaccttggtttttaaagatattgcaatccgttttaattggggatctcattgcaatgtgctcctatgtcttgagacagggccttcaagaggatcaatatttccaggatgttggtattagcatccattgttcgctggctagatcttttccaacagagcatgtgactctcatcattacagcagaggaatgcatttatcaaagttaaggaagtcgtttgccattcggatggcccaagaagcataaatatttatcattgagccttgtgagaactctctattataaaaagattggctaatttcttaaaactactccttcaataaggacccaggttatgtgccatggtatctgtagctttctggctgggtcagggtgacccgcacacaaccctggcaggacgcccttggacacagtatttgcatccctttggtgtgccaaggtatcaagcattcacagttcacattgaaaccactaaacgaagagctgtgcaaacaggtcatcagtttctccagaggggaataatcttacaactgttacgaagggtcaaaggtaactttcattttgagatgctaattactccaagaatttgatgcaggaggcagctggttaaaatgaatgagtgctgaagcgttgaaggggaaaatcaaatagatggttataataaaagtgcaatatgcaacctaataagtatgcagagaataagggacaatattgttaataaacatctattagtcaagatgatctttgtagagctgggctctttaatattataactgct

SEQ ID NO: 466858 - DNA, 1684 bp, Homo sapiens
ctgtggttcattaaggggtgaagttgggtatatccagcgttgttttaaataaaagtgaagaaaatggaaaatattagagtgtacgaggtggaggaccaggaatgggaaggaaaggccatcactgtgttctcatttcgcaatgtctcctcccagagccagactaggaagcaagtcctctgtgtggttgttcattgtgtttttaatatacatacaaaaccctgaatggtcaatttttgtgttgtagatggagacgagagatctggacttctgaacatctaccggaaaagataaaatgtgcaagcccttcagaacgctggggaggttgggctgaactgcagtgggagaggagaagagatgctggcgtgaagggctggggcagaagatcaggggaaaattgcggatgatctgaatgatagcagtgaccaccagcaacctacagagctgcccaaccaggaaattgtcagatggaagcaacgcttgcaggcaaagaaggctgaagcaggccaaggcaggaatgaaacagtcataaatgttggagtgaagcgactgacctccccggtccacaccccggcccagcgtcctgcatctgctggaggatggtggagaccatgtggaggatggggacttggcagtggaggagaacatggaagcaggatatggcagtcccctagcgtcccagccacaagtcctctgaagagtgtggatgacgatggtgacttaggtgcatccttcgaatgtcctgagggggagactggagaagcagacacgcaattgtgggaagaaatcaaaggcataaagaactcacagcacaagtccaaagtctgatcagcgagcaggcctctctgcagggtgcaagggcacagctggagagggagctcccgaagctacagccgacgcttcctgttctgcctgatctccaccgagaacacatgatggggcctcatgggagtccacagaggaggacgcctactgcctggaccttgagcagagacttcacaaggtgcacacatacatgaaccacatgtcacaacccacaaccactacaagaagatggcccaagacctggcccagaaattgaagaaagacacttccagttttcagagggagatcctctgccacaagagaacagcccaggaaagctagatggccgctgcgaccactgagatagaactccaggtgctgcagaaagaaaatgactacagcaggcagaagccggctgactgcaaggccaagttgcagcctttcctgaatgccaccattggcaacgggggctcagtggcgctaggagctctgcgaggtgctggagacctcacctgcgagtggttttacccacagagtaagggagctggggtgtttatccacaacttccttccatcattgtgcttccacaagtctgactctgccttgtcactgattgactttgccttccaaaatgagatgacatgtttattgtctaacatcatcactgattacgacaacaatcactcacaacaactggtgtggtcacacaacatctcaccccagatgggctttggcggctatgtctgtgataatgagaactcgaattttcctgttcagagtaaaggctctataagtttaaggaattggagcagtttaagagcagggacaaatggttaaccagttaaataagccaaacaaggtgtcagaagatcaaattctggtt

SEQ ID NO: 466859 - DNA, 1616 bp, Homo sapiens
caaacacaaagcccttccctcccctcctcctctttcctctcctctcccctcccctcccctcctttctcccccttcctcctcttgctcctcccgggcggggaaacccagccccgcgctcgtctttggggccaccggtcgcccccgcctccgggacctgcggggagggcccgcgagagatggagacgagagatctggacttctgaacatctaccggaaaagataaaatgtgcaagcccttcagaacgctggggaggttgggctgaactgcagtgggagaggagaagagatgctggcgtgaagggctggggcagaagatcaggggaaaattgcggatgatctgaatgatagcagtgaccaccagcaacctacagagctgcccaaccaggaaattgtcagatggaagcaacgcttgcaggcaaagaaggctgaagcaggccaaggcaggaatgaaacagtcataaatgttggagtgaagcgactgacctccccggtccacaccccggcccagcgtcctgcatctgctggaggatggtggagaccatgtggaggatggggacttggcagtggaggagaacatggaagcaggatatggcagtcccctagcgtcccagccacaagtcctctgaagagtgtggatgacgatggtgacttaggtgcatccttcgaatgtcctgagggggagactggagaagcagacacgcaattgtgggaagaaatcaaaggcataaagaactcacagcacaagtccaaagtctgatcagcgagcaggcctctctgcagggtgcaagggcacagctggagagggagctcccgaagctacagccgacgcttcctgttctgcctgatctccaccgagaacacatgatggggcctcatgggagtccacagaggaggacgcctactgcctggaccttgagcagagacttcacaaggtgcacacatacatgaaccacatgtcacaacccacaaccactacaagaagatggcccaagacctggcccagaaattgaagaaagacacttccagttttcagagggagatcctctgccacaagagaacagcccaggaaagctagatggccgctgcgaccactgagatagaactccaggtgctgcagaaagaaaatgactacagcaggcagaagccggctgactgcaaggccaagttgcagcctttcctgaatgccaccattggcaacgggggctcagtggcgctaggagctctgcgaggtgctggagacctcacctgcgagtggttttacccacagagtaagggagctggggtgtttatccacaacttccttccatcattgtgcttccacaagtctgactctgccttgtcactgattgactttgccttccaaaatgagatgacatgtttattgtctaacatcatcactgattacgacaacaatcactcacaacaactggtgtggtcacacaacatctcaccccagatgggctttggcggctatgtctgtgataatgagaactcgaattttcctgttcagagtaaaggctctataagtttaaggaattggagcagtttaagagcagggacaaatggttaaccagttaaataagccaaacaaggtgtcagaagatcaaattctggtt

SEQ ID NO: 466860 - DNA, 1331 bp, Homo sapiens
tggatagaatttctcccccttctcttgcactaggagtaagtgagcgtcactagaagcatccagatatgaaggcttcaaatcctacctaaactgcagaccaatctctgaaagcaactttgttcaattgcagcctgactaggaatttatacttttgaaaactcattgacttctggatttttaaaaaataatataaacatttaagaagctaccaaaatatgcgaagcctgaatagggaggtatcagaaccacaacaaatggaatgaaacctaccactaccacctgcctggcacaaagaaataatttacaattcacggggaatttcctgtgtttcattttgtctgaagaactgtaactggacttgaatgaactaagtgtctaattgttgcattatttttcttgtagagattttagtgttttattactttctccagtttacttcaatagtgaattaggttccctctaccatctgaaatgttacagttcgataaaataggtaaattaataaagtctaaagtgcttccaagctgagcagagacctttctggctgccataacaaagtaccatagaccgggaggcttaaacaacaggctaaaagtcagagatcaaggtgccagcagctttgggtctgaaggacacaggcgctgagagggagcgtctcaggtaaagaagaagaggggaagctgctggggggcggtggggggcgggggtaatgtgagtctgcagggccccaggatgccacagccccgccggagcagtccctggggaagcagcgtttcctgtccctcgtggcctcctctgctacccaggataggctgcatcctcctgcgcaatgcccaccatatgctggatgctctgcgggccatggaaaactccagcatttaacatggtgggtgtgatacccgacacagaaatcactattaaacaacaaatggcatttgtgaatattcaattgcaatgttgtaagaaggaacatgaaaggcaagatttggaaacaggtttggtttgggcaacctggaaggctcctggaggaagtaacattgaacaagcctctcacgcgggacttgcctgtaattacctccaatgtggaaagaaaaagaactttcacatcctgactctaaaattctctcttcgccccgtgtgtcagtacataaactttaattcagacattggcagtactgtcagcagctcatatgtcatcagcggagggctcggaggctccgcgtgccagggagcaggcggcttctattgccttcctggaggtcgggatccccctggtttgctgaaacctcaaaggcaagtctttctcgagggcgagaacagaacctgaaaga

SEQ ID NO: 466861 - DNA, 2064 bp, Homo sapiens
agtctgtgcctatgccttctagaacacgctctgatacccgataattcccttccaaaatgtcactaagttaattcacagggctctttttctgacaccaactcgatgaagcaggcactgtttattattccccaaacacaaagacacagggatctggagactggaagcactggcggctgcaagtggcagggctggcggggtgtgaagccggagaggagtctttctgcagtcaggcctcccaaatcccgggatggaatcaaggagcctttggctgtcccacccctcctcctccaagcccccaaatccaagtctgttatatcccgtcagctctgcgggcctgcctgtgactttcagcccaagggggcgggcacttcgtgtcacgccacgttgtccacatcatcgaccctccctccccttctccccttccttccttccctccctctcttcctcccattgagtgccagttctgtgccaagctttgctgttcaaaatgttacgagtggagaagtcagggaaggatggaattataggtgtttcttcttcatacctttctgtttggctgattttttttcaaatgagcacgcaggcccggttcctcaaacccacttccaatgtggcattgctgggttggtttggtccaaggaaagccctgtctccttaactcccagcccccacgcctcctccgccggcccccaaatccaggccgccctgccccctccggaaaggggagttgggggcgagcgccgaaatctgagtggctctttcaagcctccgttgccatagaaaccggccgcacaggccgatgctgtccattacaccatcctctagcctcgcagccaatggactccgagctccatcgccagaggccccgccccccagctctggggagtccaccaatcagcaggtcccgtgacttagagccctgccctcggcccagggacaccaccaatgcgcttcgaccctgccctccttctcttcggtgtaacaagaagactcgatatttttttttttttttttaggaattctccagatcagaaggaattggcagtaaggcctctgtcagctgcaccctgaataatctttggctgctattttatttaaggagagcaaaactgtttcaattacgcaacaatatataccattctctactaaaacaattttaggaaatgaaaatacgcatggtatatttgttccaattaataattttttaatgatacattatttattaattagagttcacagtttattcagatttccttcgtttttacccaacgttctttttctactccatctttttctactccaggatccatccagcatgcctcatcgcactagctgtcgtgtctctctgggctcctcttggctgtggcggtttctcacatagcaacatgacatcactgttggtgctgcgtcaggtttctctactggaaaagataaggtcttgccatgttgcccagactgatacaactcccggcctcaagccatcctcctgccttggcctcccaaagtgttgggattacaggcgtgagccaccacacctggccttggggtatcatttcttttaagccttctcaactgacagaacaaagaaatatatctgtatataccaatgtgtatatatatacacacatatctatatttccatttgtaaccatctgtatatatattaagctaaacatgagttcctgtttatatttaccacttgaatccagggatcatttggcttgcttcctgcttgcttatctctaaattcccactccaataacgggaaacctggttcccatcatccacatccaccatccatttacttaattgttcaagtccagtatacatgtgtaggattatcaaaattgttaacccatacccctgtgggaaactttatcaagtagagtacattcttctgaacactttcttttgcctttagtgttccagcagactccacttgtttcttttttctttttcttttttttttttttttgagacagagcctcactctgttgcccaggttggagtgctggagtgcagcggggccatcacagctcacagcagccttgacttcccagtctt

SEQ ID NO: 466862 - DNA, 1539 bp, Homo sapiens
agtctgtgcctatgccttctagaacacgctctgatacccgataattcccttccaaaatgtcactaagttaattcacagggctctttttctgacaccaactcgatgaagcaggcactgtttattattccccaaacacaaagacacagggatctggagactggaagcactggcggctgcaagtggcagggctggcggggtgtgaagccggagaggagtctttctgcagtcaggcctcccaaatcccgggatggaatcaaggagcctttggctgtcccacccctcctcctccaagcccccaaatccaagtctgttatatcccgtcagctctgcgggcctgcctgtgactttcagcccaagggggcgggcacttcgtgtcacgccacgttgtccacatcatcgaccctccctccccttctccccttccttccttccctccctctcttcctcccattgagtgccagttctgtgccaagctttgctgttcaaaatgttacgagtggagaagtcagggaaggatggaattataggtgtttcttcttcatacctttctgtttggctgattttttttcaaatgagcacgcaggcccggttcctcaaacccacttccaatgtggcattgctgggttggtttggtccaaggaaagccctgtctccttaactcccagcccccacgcctcctccgccggcccccaaatccaggccgccctgccccctccggaaaggggagttgggggcgagcgccgaaatctgagtggctctttcaagcctccgttgccatagaaaccggccgcacaggccgatgctgtccattacaccatcctctagcctcgcagccaatggactccgagctccatcgccagaggccccgccccccagctctggggagtccaccaatcagcaggtcccgtgacttagagccctgccctcggcccagggacaccaccaatgcgcttcgaccctgccctccttctcttcggtgtaacaagaagactcgatatttttttttttttttttaggaattctccagatcagaaggaattggcagtaaggcctctgtcagctgcaccctgaataatctttggctgctattttatttaaggagagcaaaactgtttcaattacgcaacaatatataccattctctactaaaacaattttaggaaatgaaaatacgcatggtatatttgttccaattaataattttttaatgatacattatttattaattagagttcacagtttattcagatttccttcgtttttacccaacgttctttttctactccatctttttctactccaggatccatccagcatgcctcatcgcactagctgtcgtgtctctctgggctcctcttggctgtggcggtttctcacatagcaacatgacatcactgttggtgctgcgtcaggtttctctactggaaagtcagtcttcttttgccccttttcatactgtactctttggaaggaagtcactatgctcgggccacacttaagtgaggagttatgctctatctccttaaggttggaatagct

SEQ ID NO: 466863 - DNA, 1687 bp, Homo sapiens
aggggttggaggaagggtaggggacgcgagcctgcttccatctgacgctggacgcttgtccctgccccgcgttgccttttaaattttagctcattccgagacacctgccgtcagacatttatgcagtgtgtgattctttctaaaacaactccctggaagagaggacatttaattcaacaatttattggccacctactgtgcaccaggcagtgaacttggaactggggctactgggttacagcagtgaccaagacagaggtccctgttcttaaggagcaagtgagggcaacagaaaagagcagtcagctgtcatgcgagggcactcaagcagccctgtggaaagctctacgtggtgagaaactgaagcctcctgccaacaccaacaaggaactgagacctacttccaacagccatctgagtgatcgatccatcctggaatcagatcctccagccccagtcaagtcttcagatgactgcagccctgaccagcatctcaactgcaacctcgtgaatgaccctgagccagaaccatgcaactaaactctgcgtggattcatgacccacagaaactgtgagatggtagctgtttgctttgttaagcctctaagtctggaaagaatgtcttaagcagtagcagacaatgaacacaagattattattcagctgttgaattggaagaggaggggaagaaaaaattttcagatcacaaaatattcattgtgtaaaacttcaaaaattctgaaatttaaggaaaaaatatcatttgttgggaatttgttgggattcattgtctcagtgccaagagacacccactctttttttttttttgagacagagtcctgctctgttgcccaggctgaagggcagtggcacgatctcagctcaccacaacctctgcctcccgggttcaagtgattctcctccctaagcctcccaagtggctgggactacaggcatgcatcaccatgcccggctaatttttgtatttttagtagagacggggtttcactatgttggccggctgatctcaaactcttgaccccgtgatccgcccgcatcagcctcccaaagtgccgggattacaggcatgagccactgcgcccggccgagacactcactcttaacattttggtatattttttctctctgcacattttttatccagctgactttattttgtctcctgaaatcttcatttttaaattatagcttcagcatttaagaaaatgtgtctaacaaagtcttcgcaagcatacatttttcccatagttagtatacttagaatttatttgtcaagcaattttgaagggctttcactatgaaaaactttagggcttattgatattctctttaagtagaagtatgttttttattattacaaaagttatatatgtatatatatggtgtttgtgtttgtgtgtgtgtgtgtgtgtgtgtgtgtgtgtgtgtggagtctcgctctgtcaccaggctggagtgcagtggcgtgatctcagctcactgcaacttcctcctcccaggttcaagcgattctcctgcctcagcctcctgagtagctggaactacagaacattaaaaaaaaaaaaaaacagctttgttgagatgtaattcacataccacactattcagtcatttatagtttacaattcagtggctttcagtgcattcacagagttgtgtaactgtt

SEQ ID NO: 466864 - DNA, 1698 bp, Homo sapiens
gcggagggtgcggccagcgcggtacccgccccggcgaggcgctggggaggcccgggtggggagaagaaatggggcctgggggacggtaggagcctccgtgcggagaccactgttcaaggccacagacatttatgcagtgtgtgattctttctaaaacaactccctggaagagaggacatttaattcaacaatttattggccacctactgtgcaccaggcagtgaacttggaactggggctactgggttacagcagtgaccaagacagaggtccctgttcttaaggagcaagtgagggcaacagaaaagagcagtcagctgtcatgcgagggcactcaagcagccctgtggaaagctctacgtggtgagaaactgaagcctcctgccaacaccaacaaggaactgagacctacttccaacagccatctgagtgatcgatccatcctggaatcagatcctccagccccagtcaagtcttcagatgactgcagccctgaccagcatctcaactgcaacctcgtgaatgaccctgagccagaaccatgcaactaaactctgcgtggattcatgacccacagaaactgtgagatggtagctgtttgctttgttaagcctctaagtctggaaagaatgtcttaagcagtagcagacaatgaacacaagattattattcagctgttgaattggaagaggaggggaagaaaaaattttcagatcacaaaatattcattgtgtaaaacttcaaaaattctgaaatttaaggaaaaaatatcatttgttgggaatttgttgggattcattgtctcagtgccaagagacacccactctttttttttttttgagacagagtcctgctctgttgcccaggctgaagggcagtggcacgatctcagctcaccacaacctctgcctcccgggttcaagtgattctcctccctaagcctcccaagtggctgggactacaggcatgcatcaccatgcccggctaatttttgtatttttagtagagacggggtttcactatgttggccggctgatctcaaactcttgaccccgtgatccgcccgcatcagcctcccaaagtgccgggattacaggcatgagccactgcgcccggccgagacactcactcttaacattttggtatattttttctctctgcacattttttatccagctgactttattttgtctcctgaaatcttcatttttaaattatagcttcagcatttaagaaaatgtgtctaacaaagtcttcgcaagcatacatttttcccatagttagtatacttagaatttatttgtcaagcaattttgaagggctttcactatgaaaaactttagggcttattgatattctctttaagtagaagtatgttttttattattacaaaagttatatatgtatatatatggtgtttgtgtttgtgtgtgtgtgtgtgtgtgtgtgtgtgtgtgtgtggagtctcgctctgtcaccaggctggagtgcagtggcgtgatctcagctcactgcaacttcctcctcccaggttcaagcgattctcctgcctcagcctcctgagtagctggaactacagaacattaaaaaaaaaaaaaaacagctttgttgagatgtaattcacataccacactattcagtcatttatagtttacaattcagtggctttcagtgcattcacagagttgtgtaactgtt

SEQ ID NO: 466865 - DNA, 2084 bp, Homo sapiens
ggagggagaagggaatatgataatatgatgcccagtttccaaataggaagcaccgaggacacgcagactaggattcgattcccaggctcgcggtcccagctgtctctcccctgctcagcaccaagggccgcggggcacctcgcctgccagccaaaggtcctgagctgggcggacttcccgcttttcacaaaccgcaggcgacattcgaggatgccctgcccggtgcccgacttgggcgcgtcgccccacccaagcctggagaagcgtgcaggggcacggggcggagccagtcctgggggcgtggccgggtggccggcacgaggcgcgtggcggggaggggccgcgcgctcccggctcaccacgtgtgagccagttcgggcaccactgggcgtgtgccgcccctgggggaggtcaccttcacggcgtcgtgagcatgggcgatgggagggggcgctgaggcctcgcccttgggaagcaggagctgggaggtgcccggattagggtctttaagacatttatgcagtgtgtgattctttctaaaacaactccctggaagagaggacatttaattcaacaatttattggccacctactgtgcaccaggcagtgaacttggaactggggctactgggttacagcagtgaccaagacagaggtccctgttcttaaggagcaagtgagggcaacagaaaagagcagtcagctgtcatgcgagggcactcaagcagccctgtggaaagctctacgtggtgagaaactgaagcctcctgccaacaccaacaaggaactgagacctacttccaacagccatctgagtgatcgatccatcctggaatcagatcctccagccccagtcaagtcttcagatgactgcagccctgaccagcatctcaactgcaacctcgtgaatgaccctgagccagaaccatgcaactaaactctgcgtggattcatgacccacagaaactgtgagatggtagctgtttgctttgttaagcctctaagtctggaaagaatgtcttaagcagtagcagacaatgaacacaagattattattcagctgttgaattggaagaggaggggaagaaaaaattttcagatcacaaaatattcattgtgtaaaacttcaaaaattctgaaatttaaggaaaaaatatcatttgttgggaatttgttgggattcattgtctcagtgccaagagacacccactctttttttttttttgagacagagtcctgctctgttgcccaggctgaagggcagtggcacgatctcagctcaccacaacctctgcctcccgggttcaagtgattctcctccctaagcctcccaagtggctgggactacaggcatgcatcaccatgcccggctaatttttgtatttttagtagagacggggtttcactatgttggccggctgatctcaaactcttgaccccgtgatccgcccgcatcagcctcccaaagtgccgggattacaggcatgagccactgcgcccggccgagacactcactcttaacattttggtatattttttctctctgcacattttttatccagctgactttattttgtctcctgaaatcttcatttttaaattatagcttcagcatttaagaaaatgtgtctaacaaagtcttcgcaagcatacatttttcccatagttagtatacttagaatttatttgtcaagcaattttgaagggctttcactatgaaaaactttagggcttattgatattctctttaagtagaagtatgttttttattattacaaaagttatatatgtatatatatggtgtttgtgtttgtgtgtgtgtgtgtgtgtgtgtgtgtgtgtgtgtggagtctcgctctgtcaccaggctggagtgcagtggcgtgatctcagctcactgcaacttcctcctcccaggttcaagcgattctcctgcctcagcctcctgagtagctggaactacagaacattaaaaaaaaaaaaaaacagctttgttgagatgtaattcacataccacactattcagtcatttatagtttacaattcagtggctttcagtgcattcacagagttgtgtaactgtt

SEQ ID NO: 466866 - DNA, 941 bp, Homo sapiens
tgtcgtcatgtctggcgtggggcatgctggtgcacaaagagccgaaccaagctccacagcaggaactgacaccaagccaggccccaaggaggcctggctgcccaagtggcaggccacaaaccacgcatcgcctgacccaggctggggcagcagcgtctcggagaaaaacaggaaattgggacatacgcgctttccaccgcctggctacctagtatctggaaacatctactggacatgttggactcattttctcaagaatccactttacccttcagggaagccaggaaaagaacaagcttccaaccggtacaagtctggaggaatttcacagcctctcaaactacgcttcagtgcctacccacccctgcagctgaaccactttgaatattccttgatggtgcaagagacagtctcactattcccttcactggccttcctctgtgtccgagtccccggcgtgcagtggagcctcgctgggggaaatgacagcttggaccatgggcgcccgcggtctggacaagcgaggaagtttctttaagagaataacagaagagctctctgacaccacaaagactagacctgcgactagctttgaagaaactacattgctgaaatctggctataccgaatagatgaaccagtgggtgatgattcacttgacctcagctgagttccctcaactattggtctcttcttggcatttgaaaaagtattcaattttcaaaaattctgtctgccaagcaaaatttttcaatcattcagaactggtccaactgcacatctcaggcctcagggattcccagtaatggagttttcagatttttttgtttccagataagtggaaattcattcatctgcatgcacagtaacaatgtactgtggacagagattgcaggggcatgaaaaataatggatagaatcaaaaaccacattttagtcag

SEQ ID NO: 466867 - DNA, 605 bp, Homo sapiens
  misc_feature (19)..(19): n is a, c, g, or t
  misc_feature (32)..(32): n is a, c, g, or t
ggagacactctaacgccantaaattgggctantaacccgatcccattctttacccaggtatctgcagatttatggctaaaagaccaggaccccctggaagccgagaaatggagtccccggcgtgcagtggagcctcgctgggggaaatgacagcttggaccatgggcgcccgcggtctggacaagcgaggaagtttctttaagagaataacagaagagctctctgacaccacaaagactagacctgcgactagctttgaagaaactacattgctgaaatctggctataccgaatagatgaaccagtgggtgatgattcacttgacctcagctgagttccctcaactattggtctcttcttggcatttgaaaaagtattcaattttcaaaaattctgtctgccaagcaaaatttttcaatcattcagaactggtccaactgcacatctcaggcctcagggattcccagtaatggagttttcagatttttttgtttccagataagtggaaattcattcatctgcatgcacagtaacaatgtactgtggacagagattgcaggggcatgaaaaataatggatagaatcaaaaaccacattttagtcag

SEQ ID NO: 466868 - DNA, 625 bp, Homo sapiens
tgttttagcttacagggatcctaccctcccgggcctcaaaaccactcatgctgcagaaggatccctgaacctaggttcacgaaccaaccggggtcattcaaaggcccagcccagcagcagaggcccaacttgagaggccctctttggtcatgtctcacaggttggataagaaggtgcatcacgattgtgtttcagaaacagaaaacctgtcattatatttcagagaataacagaagagctctctgacaccacaaagactagacctgcgactagctttgaagaaactacattgctgaaatctggctataccgaatagatgaaccagtgggtgatgattcacttgacctcagctgagttccctcaactattggtctcttcttggcatttgaaaaagtattcaattttcaaaaattctgtctgccaagcaaaatttttcaatcattcagaactggtccaactgcacatctcaggcctcagggattcccagtaatggagttttcagatttttttgtttccagataagtggaaattcattcatctgcatgcacagtaacaatgtactgtggacagagattgcaggggcatgaaaaataatggatagaatcaaaaaccacattttagtcag

SEQ ID NO: 466869 - DNA, 2308 bp, Homo sapiens
tctgagcagatgagggtatgaactgacttaggttccctgaatgtgaccttggctgctgtatgaaggacgggcagccatttcctcatctgatagcaaactggtatggaccagagaaacgagaagcttcccactgccactctaagagctgagattccgagtcatatcaagcttcctgatgcaaaggaacaccggagcggggcgattgcctccctagagctgggccggccacccccacccctcgggctgctaaagcagcgggccgggcggaaggtcggggagccagagcccagggaagagcagaaggcgcgggggggcggggggggcacccaggagggaggacggggcagcgggctggtgacagcaccacccccgcgccgcctgcaatctgccaccgctgccaccgagccgaggggcgccagcaaggcatcccctgggtcaaggggcctcccgtgggctttccaaacagcctgtgctcatttccgcgggagccctcggggcgctgtgctgtggctgcattattaactcagtctcatttgggcaaataattaatcactttttattcaaatgctctagaaggattgttatctcttccttctcagtggatctcacaacctgatctttccttctaatacagtgtttgggaacaggtagaagtttatgttcttacctacatattgttctctgctggctcccagtgacctcaagttcagatataccctaccagggaaaactctaattttgctgcatctattgctgatgggtcttgtgtaatttatagtctgtccttgctgaattgtctttctttgggggtcttggtgttgaaattcctcctctgggacatggcaatgattcccattcaacctagagcctgagtgacccaccctacaggcctcttctacaaaatcaccacattctttactgagagtcctttggtggagtcataagtcagtttcctggggcatgcaggaaagtgaattctctgtaaagcattctcaggctaaggcaggcgaaataagctttcttggtatttaacactatcatgtgttcatttcttttcttttttgacatctccctgttggcataggactcatcttaaggtctttaaatgttctaggatctgctggtaaaagtgaggaataattttccctgttctggcattcctccaaaactgtctggttatttctcccactgtatcatcttggatgcttttggctctaaataacagaaaccctgactcaaactggattaaacaagaaagaacgtcattatagcacaaaatgaaaagtctagcattaggtttggttaattcaggggctcagcaatgtcagctgggacatgggttatttccatctcttcactatgaaatccacactgttgacttcattccaaagctgacttttctgcatagccagaagttggctgtaaatagtacagtaatacccccctatccaaaagggaattgttccaagacctctagtggatgcctaaaactgctgatagtaccaaatgctatatatactatctttgttcctatccatatatactatgataaagtttaatttataaattaggtaccataaagattaacaaccgtaagtaaaatatgggttagttgaacacaagcactataatactacaacagtcaatctggtagccgagaggactaaatgactaatgtgtggtagcatgtacaatatggatatggtgcacaatttaaaacttgtgaattgtttatttctcaaaatttccatggaatagtttcagactgtggttgaccataggtaaccgagatgcagaaatcaaaataaaatcatggagacggggggaatgactactgtatggagagcctgcttcctccatcaccaatgggaaagaaaaatagaaaacttctctgtaaccttgtatttaaaaacttttcctccatcttcattgggtcatctcagaacaagtaagaatggacagaggaataccatgtgctgactgacgaacgcctgggtttctgaaccaattgccatcaaggggattgggattaccataatttttgctgagactaagccccaccccagtaaccaaaggcttatgggtggaatgcaagctattggaagtatttgaagatgtgaccaaggaagctatgagaattggaaatgaggcagttgtttagaaacgggctgatgtgcttgtggtaaggtggaaggaggaaggcagatgaggaaaggaatgtgcaactgaagcaattagctgttactatgtaacgaaccatcccaaaacgtagtgacataaaacaacaaccatttgttatttctcatgc

SEQ ID NO: 466870 - DNA, 1012 bp, Homo sapiens
tctgagcagatgagggtatgaactgacttaggttccctgaatgtgaccttggctgctgtatgaaggacgggcagccatttcctcatctgatagcaaactggtatggaccagagaaacgagaagcttcccactgccactctaagagctgagattccgagtcatatcaagcttcctgatgcaaaggaacaccggagcggggcgattgcctccctagagctgggccggccacccccacccctcgggctgctaaagcagcgggccgggcggaaggtcggggagccagagcccagggaagagcagaaggcgcgggggggcggggggggcacccaggagggaggacggggcagcgggctggtgacagcaccacccccgcgccgcctgcaatctgccaccgctgccaccgagccgaggggcgccagcaaggcatcccctgggtcaaggggcctcccgtgggctttccaaacagcctgtgctcatttccgcgggagccctcggggcgctgtgctgtggctgcattattaactcagtctcatttgggcaaataattaatcactttttattcaaatgctctagaaggattgttatctcttccttctcagtggatctcacaacctgatctttccttctaatacagtgtttgggaacagaacaagtaagaatggacagaggaataccatgtgctgactgacgaacgcctgggtttctgaaccaattgccatcaaggggattgggattaccataatttttgctgagactaagccccaccccagtaaccaaaggcttatgggtggaatgcaagctattggaagtatttgaagatgtgaccaaggaagctatgagaattggaaatgaggcagttgtttagaaacgggctgatgtgcttgtggtaaggtggaaggaggaaggcagatgaggaaaggaatgtgcaactgaagcaattagctgttactatgtaacgaaccatcccaaaacgtagtgacataaaacaacaaccatttgttatttctcatgc

SEQ ID NO: 466871 - DNA, 901 bp, Homo sapiens
agagagaagatggaaagaaggaagggagcgaggaagaaaagaaacaagaaaggaaggaagaagaaaagaaaagaaagagagaagaaagaaaaagaaagagagcgacagaaagagagagagagagaaagacagacaaaggagggagaaagggagggacaaagagaagaaggaaggaaagaaagaaggaaccaaggaagaaaggaaagaagaaaggaaggaaggagaaaaaagaaaaaagaaggaaggaaggaagaaaggaagcaagaaagaaagaaaggaagggagggaaagaaaggagggagggagggagagaagggaggaaggaaggaagcaaggaggaggggagggagggaagagaagagggagggaggaccagacatgagcagatattactggatcttggacaagtgggtctctaaggaacatcaaagaccctgagaagccaaaagttatgaaatgcatcagcagtgggttgaagacaagacctctccttttcctgctgacatttcttccatgagcagtacccagacagccgacagaaagagcccaggagatcaatggtggtgttggatcaaaattgtagctcacaaggaaaatcctgtaaaggaaccatatttttctgtgttgcctgccaaaatgagaacatcatttgttaaataatgtgggacacaggtgccccggatgtactatttaatggagaaagaaaaagagagaaacaatggctgccagtatccgggaaaaatgcgactagcttcttaagcttcttcacccagaaattgttacaaatagaagggaatctgactttgagctatgagttgttgcttccccatgactgaattccccaagaactgagttattactgacctgtgatttgctcatcataaggtctcactgttaatta

SEQ ID NO: 466872 - DNA, 3207 bp, Homo sapiens
agagagaagatggaaagaaggaagggagcgaggaagaaaagaaacaagaaaggaaggaagaagaaaagaaaagaaagagagaagaaagaaaaagaaagagagcgacagaaagagagagagagagaaagacagacaaaggagggagaaagggagggacaaagagaagaaggaaggaaagaaagaaggaaccaaggaagaaaggaaagaagaaaggaaggaaggagaaaaaagaaaaaagaaggaaggaaggaagaaaggaagcaagaaagaaagaaaggaagggagggaaagaaaggagggagggagggagagaagggaggaaggaaggaagcaaggaggaggggagggagggaagagaagagggagggaggaccagacatgagcagatattactggatcttggacaagtgggtctctaaggaacatcaaagaccctgagaagccaaaagttatgaaatgcatcagcagtgggttgaagacaagacctctccttttcctgctgacatttcttccatgagcagtacccagacagccgacagaaagagcccaggaggtaactggggacatgagatgaaaactcaagatgcaagggtatcccatcttttggcttccttgggccacattggaagaagaagaattatcttgggccatgcaggaaatacactaacaataactgatgagctaaaaaaaatcaccaaaaaatctgataatgttttaagaaagtttacaaatttgtgttaggccacattcaaagcaatcctgggctgcctgtggcctatgggccacgggctggacacgcttgcaagggagaggacagataaagatacgtatgagagcatcctccttagagaaaggtcagtgttgaagtcatagggtaagggaactctttcaaaagaaagtaaaaaaaaaaaaaaaagatagcgaagtaaatcatgtgaagtctctacagagtaagggccaaagggaggacacagtagcttaaaatcacaatattgtttttgttcctatttttgtttttctcataaagctacaggtcagctggacagctcgctcttgggtcctcacaaagctactggtcagctgggcagctcagctgggtcctcatcaatgaaccagggttggctgattttagctgggctcactcaattttctagagtccactggtctgtctgctgcagtgtggctgatctaggacagccctggccttggtgacctggctctgctgcacgatgcagccatcctctagcaggctagcctatcacagcaaaacagaagcacaaaagagagatcaggaaaacgcatagcttcttaaggcctaggccctaaactggtgcatcacttacttcttggcaacattctggtggccaaaggaagtcacatgtccaaccccagactctaaaggagggaaaagagacccgatgccttaatgggagtaaagtcacattgcaaaaggcaaggatcccaaaaatgtttcaaaaaaaattggaggccatctttgcaatcaaagttagattattctcaatggtaaaagttggaaccacaatattattgttaccttcaaagagtacacctagctgaatcccccagtcaatgcaggaattcccccaaattaaacacacacacacacacacacacatacacataaaccctcaaagattcccacaacttgaccatttgacctagcttttctcactgggtaaaaaaagcaagagggaaaaaaaaaccactgcagctctctcccacccctgctgttcagccttcagtttatctggcctctgctatgagtcacagctgactgaagggtgggggtgggttgtgagtcatggcctaaaacaaagatagaatttgatgggggtggacgagcaggcgagagagaagacacggcaagttcaggcattctctcagtgtttagggtgatgtcttctttcctgcagctggggaagttgggcagagtgcccccgaaggaggagattccacacaggccctgtgtatctgagagttgagttgctgatttcagaggtgtttgtatcattgctctaaatgtgtttctgctcccctcccacccaagatgctggttcaacggaccatttcatcctaccattatacagaacccacaggagctagttacctggtcagtttgagaagttaatatttaaaaagactaatggttgcatatggcttccacaggaaagaaataataagctaatgttatctattgactcaatcccacatatatttacatttgacaacttaaaaaaaaaaccttcggctcaatgatagtttagctcaagtcactatgttaggatatatatttctttcatctatgactatttttgtctgcacagtaacctgcctcaagcacacaaatatttgtgtgtctggcctcaagcaattaacgtgtctcctaacatgagataaagattaaatgaaaattctgtcaccctgaaataaacctggaagcagaattcctgaatgtttgccaaataaggtgactatcagacttaagatgctgaactttgaaatgactgtcatagaaacaaaggcaaggcatggttggcgcccattcaacctggtcaataacatccttaattacaggacatggcatcattttgattcacagtggaataaaaggcatctatttgtatatttggaagtctgaatgaggatttcctgatgaagtcatttctgtcttacaacagcttcgcttgtaccagtagagttaaaactgggtcaccatttttatgcgagcgtatggatacacatacatccacactcgaaccccaaacacacacacacacacacacacacacttcatttcagagtctaattaaaactctattatacataattttcttccagatcaatggtggtgttggatcaaaattgtagctcacaaggaaaatcctgtaaaggaaccatatttttctgtgttgcctgccaaaatgagaacatcatttgttaaataatgtgggacacaggtgccccggatgtactatttaatggagaaagaaaaagagagaaacaatggctgccagtatccgggaaaaatgcgactagcttcttaagcttcttcacccagaaattgttacaaatagaagggaatctgactttgagctatgagttgttgcttccccatgactgaattccccaagaactgagttattactgacctgtgatttgctcatcataaggtctcactgttaatta

SEQ ID NO: 466873 - DNA, 416 bp, Homo sapiens
gccttgagccagctctggaagctctgctgtgagtggttaaggcctgagattcacaccaaggagcagatgttagacttgctgttgcttgagctgttcctggccattctgcccgaggagctcctggcctggatgcatgagtatcatccaaagaatggagaggaggcagtggttttgctggaggtaagaaagggtcctatacacttgggtagaacagcctggagagggtgtccaagctggtcctttgtgggatctctggggatcatgtacactgtcgccccttcagatgcccaaatgagcctgcttgtcctcaggtttcagcccaggcccatgtgcaggaagtgctttcttttttttcttttttttttattttttttttttttaggaggagaaaagagttttcatttggccccccgagg

SEQ ID NO: 466874 - DNA, 1151 bp, Homo sapiens
gccttgagccagctctggaagctctgctgtgagtggttaaggcctgagattcacaccaaggagcagatgttagacttgctgttgcttgagctgttcctggccattctgcccgaggagctcctggcctggatgcatgagtatcatccaaagaatggagaggaggcagtggttttgctggagattatgttatcagaatcaataaaatagaactgattcaagggcaggaacttactgtagatatggaatcccaagaaaagttacctggaaaatcaatgaaaggcttctgaatgagaagaaacccaagaacatgaaagatggacagaaatatatcagagagccgagtgcagtggctcacacttagaatcccaccactccaggtggagatgggcggatcacctgaggtcaggagtttgagaccagactagccaacatggtgaaaccccgtctctactaaaaatacaaaaattagccaggtgtggtggtgtaagcctgtaatcccagctacttgggaggctgagaggagaatcccttgaacctgggagcctcaggttgcactgagccaagatcacgtcactgcactccagcctgggcgacagagcgagactccgtcttatacaaacaaacaaacaaaaaacaaagaaatatatcagagaaacacaatcaactgagagaaaatatatgtgtgatgaatgtgggaaaacattcactcaaaactcaagccccattagacataaaataatctgtactggtaacacaccctcttcatgtaatgtatgtagcaaaacttttactcagagctcacaacttactgaccatcagagaatacatagccatataaaaccctatcagtgtgatgagtgtgaaaaaaaaatccacagtggaaagaaactatatgaatgtgacaagcgtggaaaggccttcagatacagttcagctcttgttggacaccagcgaatccacggtagagagaagccctatgagtgtgatgtgtgtgggaaagctttcagtaacagctcacatcttttgagacaccaaagaacccacactggagaaaagccctgcaaatgtgatgcatatggaaaagctttcaggcagagctcacacctcattttacatgagcaaatccacactggaaagaagccccggtgatg

SEQ ID NO: 466875 - DNA, 1257 bp, Homo sapiens
atttgcacatgtgaaactcaggagagaaatctggactttaaaattactttgttactatttttcttttcctctttttttccttttgaaacagggtcttgctctatcacccaggctgaagtgcagtagtgtgatcccacctcactgctgcctcagcttcctgggctcaagtgatcctcccatctcagcctcccaaatagctggttttacaggtgtgcaccactatgcctgctaatttcttattttttgtagagacaaggtcttactatgttatccaggctggtctccatttcccctgctcaagcgatcctcccgccttatcctacctaagtgctggaattataggcatgagccaccgggttaggctatttttctattttaacaatgatttctccctcctgagtaatagtcctgaaattttttattcctgaaatttaattcatgttaggttcaagatgtgccaaatcgatagaaattgcagatagctttggtggttcacatttggaatagattatagagaacactctctgggaaggtgaaatggtgttcacttctcagaaagaggctctgtgttgcaaagggatgcacagtttccgtgaattatcctaatcagcacttcaggcaagtcagctgtaaaacacactggacttcatgaagctctgagccaacttgtggccagtaggcactaaggtcagagacacatatggaaaagcacatgatgaagcctctggtattggagtagtgcctacagccctgcccaaggcctggatatggggattgaaggcaaagaagatcatggttctggagctcacgttgaggaaatggacctcactcagggaatggggcacattagagaaggtaaaacacatactgtacttacagcagaagtgaagggcttcaggaagttctctttgctttgctgagttcatgtgtgaattcttttgcactgcttcttcctgtctttggcaattgaaggagactaggttttccttgatttgacctgtcaccccatttctgtgctgttaccttcaatgtttttagtgtttacctttctaaccccagctatcttggtttgtttctagaatggagatttacagacagtcatctgggtggaggacacccttttgggatcagcactgaaagtgacgccatatcccactccaaaccagcacaactataaatactaagcagtgagtggtattctgaagactttgaaggaggagctatttctgaaaataaatttattttgttgaagaattt

SEQ ID NO: 466876 - DNA, 1900 bp, Homo sapiens
atttgcacatgtgaaactcaggagagaaatctggactttaaaattactttgttactatttttcttttcctctttttttccttttgaaacagggtcttgctctatcacccaggctgaagtgcagtagtgtgatcccacctcactgctgcctcagcttcctgggctcaagtgatcctcccatctcagcctcccaaatagctggttttacaggtgtgcaccactatgcctgctaatttcttattttttgtagagacaaggtcttactatgttatccaggctggtctccatttcccctgctcaagcgatcctcccgccttatcctacctaagtgctggaattataggcatgagccaccgggttaggctatttttctattttaacaatgatttctccctcctgagtaatagtcctgaaattttttattcctgaaatttaattcatgttaggttcaagatgtgccaaatcgatagaaattgcagatagctttggtggttcacatttggaatagattatagagaacactctctgggaaggtgaaatggtgttcacttctcagaaagaggctctgtgttgcaaagggatgcacagtttccgtgaattatcctaatcagcacttcaggcaagtcagctgtaaaacacactggacttcatgaagctctgagccaacttgtggccagtaggcactaaggtcagagacacatatggaaaagcacatgatgaagcctctggtattggagtagtgcctacagccctgcccaaggcctggatatggggattgaaggcaaagaagatcatggttctggagctcacgttgaggaaatggacctcactcagggaatggggcacattagagaaggtaaaacacatactgtacttacagcagaagtgaagggcttcaggaagttctctttgctttgctgagttcatgtgtgaattcttttgcactgcttcttcctgtctttggcaattgaaggagactaggttttccttgatttgacctgtcaccccatttctgtgctgttaccttcaatgtttttagtgtttacctttctaaccccagctatcttggtttgtttctagaatggagatttacagacagtcatctgggtggaggacacccttttgggatcagcactgaaagtgacgccatatcccactccaaaccagcacaactataaatactaagcagtgagtggtattctgaagactttgaaggaggagctatttctgaaaataaatttattttgttgaagaatttaaccattaagcgatcaggatatgtgtactgtggttattacttttgagctcaaagtaaggtattagtgattatttgttttaggttgggtcttgtgccgggtgctaggaatacaaaaataagtgaaaaaagcaccctaatctcgaggctcgcagactatttggtgacagggagaagagagtagatagaaaacaacaaatactgtgataaagccgctggatttgtagagtactttgcattgaagagggtttaacaatgactcacgaaaacaattgaaaaggctttggaggaggacgaaagcttggaggaaaagaatgagttcttgagccacatgatacagaagaatgagggaagggatccttgtcacaggatttagggcccacctggatattccaggctgatctcatcttgagatcataaacttagtaattacctgccaagacccttttttcaaataaggtccctcagaaagttatggaatgttaattctagcctctaaatctatagtttctcaggaagaattgctgatagtgtattcttttttaaagaacttttaatcaaatgagttaagtgtaaatgtttccttaagttagaatatcaaaataattcataggaattggagctgaaatcacttttctaattatat

SEQ ID NO: 466877 - DNA, 1627 bp, Homo sapiens
ccgccccgaggcgaggcctcggagctggttgctgctcacaggcagagaaacgctgaagtgttcctgaaaactcgtcaattacaggaaaagctgcatgactgcatctttagaggagatggtttcgctggttccaaggattctgttaatgagaaaactccacaggccagcattctgtaagctggctccagcagcccagttgacagtggctgaggccagttcctgatcatcctgaggaacaccagtcaactcacaaatccctgagagggaagcctccaggatcctagagtagatgaccagatgcccaggcgcaggatccacggaagtcaaagtcaagctttctaggccgacagctgtcctcagtcgcttggtcagatagtctaatctcagtttttcaggaatcaaggccagaggtgtgaacaaggtgtcagctctgaagggaaggtttttctaaggatggacccacaccagaaggtccctagcatatataatggggatactttacaaactcctgagtatgaaaaagtctctcagtatgaggaccagttagaaaggcatgagggtaggcacatggaagaaagacggtataaatgcaatgaatgtggaaagaagtttgcccagagctcaggccttgttcgacatcagagaatccacactggagagaaaccctatgagtgtgatcactatggaaaagcctttagcgtgcgctcaaccctcactgtgcatgaaagaatccacactggtgagaagccttatacttgtaatgagtgtaagaaagccttcagtgtaagggcacacctgattatacatcagagaatccacaatggagagaaaccctatgaatgtaatgagtgtggcaaagcatttagtgtgagctcagaccttatcaaacatcagagaatccatactggtgagaaaccttatgagtgtgatgagtgtggaaaagctttcagtgtgagctcagccctcatcaagcatcagagaatccatacaggagaaaagccgtatgagtataaggaatgtgggaaggccttctatgtgaactcagcacttattaatcaccagaggattcactctggagaaaagccctatgagtgtggagagtgtggaaaagcattcagccagatctcaacgcttattcatcaccagagaatccatactggagagaaaccgtatgagtgtgaagagtgtgggaaagctttccatgggagttctaaccttactaaacaccagaaaacacatgccaaaggaaagtgtcatcagtgatttatgtggcaaatatattccaaagggcttttgttacatcggaagataccattgaaagaagagtatggttaaagttaatgccttaattgacacttcacccttgaaatactgaagtgagaagtcactcaaaagtaactccatcagcattgtttctaaggctctaaaatcacatctacttctgagaagaatggagatttacagacagtcatctgggtggaggacacccttttgggatcagcactgaaagtgacgccatatcccactccaaaccagcacaactataaatactaagcagtgagtggtattctgaagactttgaaggaggagctatttctgaaaataaatttattttgttgaagaattt

SEQ ID NO: 466878 - DNA, 1063 bp, Homo sapiens
ccgccccgaggcgaggcctcggagctggttgctgctcacaggcagagaaacgctgaagtgttcctgaaaactcgtcaattacaggaaaagctgcatgactgcatctttagaggagatggtttcgctggttccaaggattctgttaatgagaaaactccacaggccagcattctgtaagctggctccagcagcccagttgacagtggctgaggccagttcctgatcatcctgaggaacaccagaatggagatttacagacagtcatctgggtggaggacacccttttgggatcagcactgaaagtgacgccatatcccactccaaaccagcacaactataaatactaagcagtgagtggtattctgaagactttgaaggaggagctatttctgaaaataaatttattttgttgaagaatttaaccattaagcgatcaggatatgtgtactgtggttattacttttgagctcaaagtaaggtattagtgattatttgttttaggttgggtcttgtgccgggtgctaggaatacaaaaataagtgaaaaaagcaccctaatctcgaggctcgcagactatttggtgacagggagaagagagtagatagaaaacaacaaatactgtgataaagccgctggatttgtagagtactttgcattgaagagggtttaacaatgactcacgaaaacaattgaaaaggctttggaggaggacgaaagcttggaggaaaagaatgagttcttgagccacatgatacagaagaatgagggaagggatccttgtcacaggatttagggcccacctggatattccaggctgatctcatcttgagatcataaacttagtaattacctgccaagacccttttttcaaataaggtccctcagaaagttatggaatgttaattctagcctctaaatctatagtttctcaggaagaattgctgatagtgtattcttttttaaagaacttttaatcaaatgagttaagtgtaaatgtttccttaagttagaatatcaaaataattcataggaattggagctgaaatcacttttctaattatat

SEQ ID NO: 466879 - DNA, 2270 bp, Homo sapiens
ccgccccgaggcgaggcctcggagctggttgctgctcacaggcagagaaacgctgaagtgttcctgaaaactcgtcaattacaggaaaagctgcatgactgcatctttagaggagatggtttcgctggttccaaggattctgttaatgagaaaactccacaggccagcattctgtaagctggctccagcagcccagttgacagtggctgaggccagttcctgatcatcctgaggaacaccagtcaactcacaaatccctgagagggaagcctccaggatcctagagtagatgaccagatgcccaggcgcaggatccacggaagtcaaagtcaagctttctaggccgacagctgtcctcagtcgcttggtcagatagtctaatctcagtttttcaggaatcaaggccagaggtgtgaacaaggtgtcagctctgaagggaaggtttttctaaggatggacccacaccagaaggtccctagcatatataatggggatactttacaaactcctgagtatgaaaaagtctctcagtatgaggaccagttagaaaggcatgagggtaggcacatggaagaaagacggtataaatgcaatgaatgtggaaagaagtttgcccagagctcaggccttgttcgacatcagagaatccacactggagagaaaccctatgagtgtgatcactatggaaaagcctttagcgtgcgctcaaccctcactgtgcatgaaagaatccacactggtgagaagccttatacttgtaatgagtgtaagaaagccttcagtgtaagggcacacctgattatacatcagagaatccacaatggagagaaaccctatgaatgtaatgagtgtggcaaagcatttagtgtgagctcagaccttatcaaacatcagagaatccatactggtgagaaaccttatgagtgtgatgagtgtggaaaagctttcagtgtgagctcagccctcatcaagcatcagagaatccatacaggagaaaagccgtatgagtataaggaatgtgggaaggccttctatgtgaactcagcacttattaatcaccagaggattcactctggagaaaagccctatgagtgtggagagtgtggaaaagcattcagccagatctcaacgcttattcatcaccagagaatccatactggagagaaaccgtatgagtgtgaagagtgtgggaaagctttccatgggagttctaaccttactaaacaccagaaaacacatgccaaaggaaagtgtcatcagtgatttatgtggcaaatatattccaaagggcttttgttacatcggaagataccattgaaagaagagtatggttaaagttaatgccttaattgacacttcacccttgaaatactgaagtgagaagtcactcaaaagtaactccatcagcattgtttctaaggctctaaaatcacatctacttctgagaagaatggagatttacagacagtcatctgggtggaggacacccttttgggatcagcactgaaagtgacgccatatcccactccaaaccagcacaactataaatactaagcagtgagtggtattctgaagactttgaaggaggagctatttctgaaaataaatttattttgttgaagaatttaaccattaagcgatcaggatatgtgtactgtggttattacttttgagctcaaagtaaggtattagtgattatttgttttaggttgggtcttgtgccgggtgctaggaatacaaaaataagtgaaaaaagcaccctaatctcgaggctcgcagactatttggtgacagggagaagagagtagatagaaaacaacaaatactgtgataaagccgctggatttgtagagtactttgcattgaagagggtttaacaatgactcacgaaaacaattgaaaaggctttggaggaggacgaaagcttggaggaaaagaatgagttcttgagccacatgatacagaagaatgagggaagggatccttgtcacaggatttagggcccacctggatattccaggctgatctcatcttgagatcataaacttagtaattacctgccaagacccttttttcaaataaggtccctcagaaagttatggaatgttaattctagcctctaaatctatagtttctcaggaagaattgctgatagtgtattcttttttaaagaacttttaatcaaatgagttaagtgtaaatgtttccttaagttagaatatcaaaataattcataggaattggagctgaaatcacttttctaattatat

SEQ ID NO: 466880 - DNA, 716 bp, Homo sapiens
agagggcgctccacgaaagtcactgcctcggcagctgaggagactccggcgctcgccatggccgaagaaaagcccaaggaaggagtcaagactgagaacaacgatcatattaatttgaaggtggcggggcaggatggttctgtggtgcagtttaagattaagaggcatacaccacttagtaaactaatgaaagcctattgtgaacgacagggattgtcaatgaggcagatcagattccgattcgacgggcaaccaatgaaacagacacacctgcacagttggaaatggaggatgaagatacaattgatgtgttccaacagcagacgggaggtgtctactgaaaagggaacctgcttctttactccagaactctgttctttaaagaccaagattacattctcaattagaaaactgcaatttgcttccaccacatcctgactactaccgtatagttttctctattctttcatttcccccttccccattcctttactgtacataaagtaactggtatatgtgcacaagcatattactttttttttttaaaactaaacagccaatggtatgttttgattgacatcaagtggagacggggcggaaaaatactgattctgtgaaaataccccctttctccattagtggcatgctcattcagctcttatctttatattccagacattcacgtagtgaaaacctgtgtttaattatctgagcct

SEQ ID NO: 466881 - DNA, 3683 bp, Homo sapiens
gtctagagctggtcggaactgatggctaccagtggcaggtacttcctgcaggagaaacagtgtaagcaaagatgggaagaggagaggcaagaattgagtgttgtgaatagttctgaactagagaccttttgaaaccaaaaggaagatggtcttgagtctttcttgttacgaatgctatcttctttgagaagtcaaattgtcaggatcaggaatgtatgttttcttccatctggattctagggttggaaataccaagtaaggaattaacatatatgatgctggaaacttgtagaggctcatgattgaaaggcctgaaacagatgtatcttccaagttcttatcaagaaaatgactgtgagggcaacgatgggtcaagaagaccagcggaaaactccctaggagagagccatagaaaatgtacacttcagaagagaaatgtaatcagagaactcaaaaaaggaaaatatataatgtatgccctcggaagggtaaaaagatttttattcatatgcatgagattattcagatagatggtcatatataccagtgccttgaatgcaagcaaaacttctgtgaaaacttagctcttattatgtgtgagagaacccatactggggagaaaccttataaatgtgatatgtgtgagaaaacctttgtccaaagctcagatcttacttcacaccagaggatccacaattacgagaaaccttataaatgtagcaaatgtgagaagagcttttggcatcacttagcgctttcaggacatcagagaacacatgcaggtaaaaaattctatacatgtgacatttgtggcaagaattttggtcagagttctgatctgcttgtccaccagcgaagccatactggcgagaaaccatatctatgtagtgagtgtgacaaatgcttcagtagaagtacaaacctcataaggcatcgaagaactcacacaggtgagaaaccatttaagtgtctcgagtgtgaaaaagcttttagtgggaaatcagatcttattagccaccagagaactcacactggggaaaggccctacaaatgtaataagtgtgagaaaagttaccgacaccgttcagccttcattgtacataaaagagttcatactggggagaagccctataagtgtggtgcctgtgaaaaatgctttggccagaaatcagaccttatcgtgcaccagagagtccacacaggtgagaagccgtataaatgcctggaatgtatgagaagttttactcggagtgccaacctaattaggcaccaggcaactcacactcacacttttaaatgccttgaatatgaaaaaagctttaactgtagctcagatcttattgtacatcagagaattcacatggaagagaaaccacatcagtggtctgcgtgtgagagtggcttcctcctaggaatggactttgttgcccaacagaaaatgagaactcaaacagaggagctacactataaatacactgtatgtgataaaagcttccaccagagttcagcccttcttcaacatcagacagtacacattggtgaaaaaccgtttgtctgtaatgtgagtgaaaaaggtcttgagcttagccctccccatgcgtcagaagcctcacagatgtcttgaccaggcgagaagctgtaataccaatattaaaaattatttatgtatcagagaactcattaagatgaggacaaatctcagactttgctcagagctcagaattcagtggggaccagagagcctgcaattggaaatatgagaaattctttgcccagagagctgccctaacagaacacttcatcctcactccaacgagaaatctacagatgcccagaggttttgaaaacttaccgtctgagctcaaatttgatcactcacaagaggattcatacaagtgggaaaccttagaaatgcactgagtgtgagagagctttctactaatgctcagcccttctcgttgtaagagaattcacaccggagaacaactttttaaatgccttcagtgtcagttgtgctgcagacagtatgaacatctcattggacctcagaaaacccaccctggggagaagccccagcaagtgtgaaaaaagcttctaacaaaactctgacttacccatcagagaagccatactggtgaaaaattgtatatttgtcttaagtatggcaaaagcattcgttggagagccttacttgggtttgcacccaaaaaaaaaaacccaatctgaggaaagactgcaagtgtctgaatgaagagtgcttgtcaatgatcaactcttgtggtacatcagggaactcacataggtgaaaaaacccatacttaccttgagtctgagaaaacctttggtagaagctcctgtcttatcaggccccaaaaaacctgttctgcagtgagagatttaattgtggttctgccaaggaaagagaaaataccttttaatcccagggaaaggattgcaatcaccacattataaggtatatggcgtggaatgcagaattctaaatactagaagggaaaagtagttggcagattcatcagaggcttaaggataagtacttgtttccaatttaaaagtataattaggattgtctttaatgttctctagaaatactataattaatctagagatctatcaatggtcacatctcagtttttttcttccctgagattcaaagacgtgtaataccaatacttcagattcctatagtatttgggactttgtagactagtgaatagatactttgttgctagtccaaatcctctgattttggtttgatttgtcctagcagatccctgaacttcagagagtattgccatttggattcatggagttggcgaactgctacactgctaccttgtgtatggctctaagctttgatcctaatgactggttgatgatcatgataatattagggccagtgaatatagctcatagtgataataaggattctagggtatttttttttcttttagaaaaagatcctggaagtttatttgatctgacatgtttttgtaatatttagaaatagctcttgtatcataaaaagttgcccagtataagacacacaagatgtattttttttctctggtgaaaatcatgcctatcactagtatatgtttgacatttgtagtatacttaaaatagtattgggtgtgaggcatggtggtgatgaaaagtagtccttacggctacttgttagtcattagagagaacatggagaaggggtcaaagttggtatcattaacagggcaatgacttgacccttctttcaactgatcttactggtagttgtctctagtttttaagtaaattaatgatggaccatcccccaaacagagaactatgggggtatgaaacaaggctgaaggcttttaaccatgggagaaaaaggtgttggtattattcatatagcataacctgaggttggagaggaccacttgggagcctgtaaccaaaactagaaggtaacttctgggatggacggaggttcccttgaagcagtgccaacctaaatctacctcaggtaagtagttagattaactttttcaagatttcagaccaaacaagacaacttgtattcagttgatgtattcctatgctttaatgtttttgtttgcccttaattattaaataaacatttgttctgaaaaactccatttccgtctccactgtactgagagaaa

SEQ ID NO: 466882 - DNA, 3698 bp, Homo sapiens
agagtctgcggccgccaggaagcccagattcgagtgtccggagagtaaccggaagtgctgtccccaggcctaggggcggcgccggcggctgccagggagaggcaagaattgagtgttgtgaatagttctgaactagagaccttttgaaaccaaaaggaagatggtcttgagtctttcttgttacgaatgctatcttctttgagaagtcaaattgtcaggatcaggaatgtatgttttcttccatctggattctagggttggaaataccaagtaaggaattaacatatatgatgctggaaacttgtagaggctcatgattgaaaggcctgaaacagatgtatcttccaagttcttatcaagaaaatgactgtgagggcaacgatgggtcaagaagaccagcggaaaactccctaggagagagccatagaaaatgtacacttcagaagagaaatgtaatcagagaactcaaaaaaggaaaatatataatgtatgccctcggaagggtaaaaagatttttattcatatgcatgagattattcagatagatggtcatatataccagtgccttgaatgcaagcaaaacttctgtgaaaacttagctcttattatgtgtgagagaacccatactggggagaaaccttataaatgtgatatgtgtgagaaaacctttgtccaaagctcagatcttacttcacaccagaggatccacaattacgagaaaccttataaatgtagcaaatgtgagaagagcttttggcatcacttagcgctttcaggacatcagagaacacatgcaggtaaaaaattctatacatgtgacatttgtggcaagaattttggtcagagttctgatctgcttgtccaccagcgaagccatactggcgagaaaccatatctatgtagtgagtgtgacaaatgcttcagtagaagtacaaacctcataaggcatcgaagaactcacacaggtgagaaaccatttaagtgtctcgagtgtgaaaaagcttttagtgggaaatcagatcttattagccaccagagaactcacactggggaaaggccctacaaatgtaataagtgtgagaaaagttaccgacaccgttcagccttcattgtacataaaagagttcatactggggagaagccctataagtgtggtgcctgtgaaaaatgctttggccagaaatcagaccttatcgtgcaccagagagtccacacaggtgagaagccgtataaatgcctggaatgtatgagaagttttactcggagtgccaacctaattaggcaccaggcaactcacactcacacttttaaatgccttgaatatgaaaaaagctttaactgtagctcagatcttattgtacatcagagaattcacatggaagagaaaccacatcagtggtctgcgtgtgagagtggcttcctcctaggaatggactttgttgcccaacagaaaatgagaactcaaacagaggagctacactataaatacactgtatgtgataaaagcttccaccagagttcagcccttcttcaacatcagacagtacacattggtgaaaaaccgtttgtctgtaatgtgagtgaaaaaggtcttgagcttagccctccccatgcgtcagaagcctcacagatgtcttgaccaggcgagaagctgtaataccaatattaaaaattatttatgtatcagagaactcattaagatgaggacaaatctcagactttgctcagagctcagaattcagtggggaccagagagcctgcaattggaaatatgagaaattctttgcccagagagctgccctaacagaacacttcatcctcactccaacgagaaatctacagatgcccagaggttttgaaaacttaccgtctgagctcaaatttgatcactcacaagaggattcatacaagtgggaaaccttagaaatgcactgagtgtgagagagctttctactaatgctcagcccttctcgttgtaagagaattcacaccggagaacaactttttaaatgccttcagtgtcagttgtgctgcagacagtatgaacatctcattggacctcagaaaacccaccctggggagaagccccagcaagtgtgaaaaaagcttctaacaaaactctgacttacccatcagagaagccatactggtgaaaaattgtatatttgtcttaagtatggcaaaagcattcgttggagagccttacttgggtttgcacccaaaaaaaaaaacccaatctgaggaaagactgcaagtgtctgaatgaagagtgcttgtcaatgatcaactcttgtggtacatcagggaactcacataggtgaaaaaacccatacttaccttgagtctgagaaaacctttggtagaagctcctgtcttatcaggccccaaaaaacctgttctgcagtgagagatttaattgtggttctgccaaggaaagagaaaataccttttaatcccagggaaaggattgcaatcaccacattataaggtatatggcgtggaatgcagaattctaaatactagaagggaaaagtagttggcagattcatcagaggcttaaggataagtacttgtttccaatttaaaagtataattaggattgtctttaatgttctctagaaatactataattaatctagagatctatcaatggtcacatctcagtttttttcttccctgagattcaaagacgtgtaataccaatacttcagattcctatagtatttgggactttgtagactagtgaatagatactttgttgctagtccaaatcctctgattttggtttgatttgtcctagcagatccctgaacttcagagagtattgccatttggattcatggagttggcgaactgctacactgctaccttgtgtatggctctaagctttgatcctaatgactggttgatgatcatgataatattagggccagtgaatatagctcatagtgataataaggattctagggtatttttttttcttttagaaaaagatcctggaagtttatttgatctgacatgtttttgtaatatttagaaatagctcttgtatcataaaaagttgcccagtataagacacacaagatgtattttttttctctggtgaaaatcatgcctatcactagtatatgtttgacatttgtagtatacttaaaatagtattgggtgtgaggcatggtggtgatgaaaagtagtccttacggctacttgttagtcattagagagaacatggagaaggggtcaaagttggtatcattaacagggcaatgacttgacccttctttcaactgatcttactggtagttgtctctagtttttaagtaaattaatgatggaccatcccccaaacagagaactatgggggtatgaaacaaggctgaaggcttttaaccatgggagaaaaaggtgttggtattattcatatagcataacctgaggttggagaggaccacttgggagcctgtaaccaaaactagaaggtaacttctgggatggacggaggttcccttgaagcagtgccaacctaaatctacctcaggtaagtagttagattaactttttcaagatttcagaccaaacaagacaacttgtattcagttgatgtattcctatgctttaatgtttttgtttgcccttaattattaaataaacatttgttctgaaaaactccatttccgtctccactgtactgagagaaa

SEQ ID NO: 466883 - DNA, 858 bp, Homo sapiens
cacggctccatgcgagagatgcctgttccttctctgataaatttggcagcttcacgtaccctaagtttttgcatttctgacaaccacgtgtcctcacctggacccgccaacccatcctgtggcctccacccaggaactgactcagcatgagaggacagcctcaattccccatgatttcatctccaacccaaccaatcagcttgccccctaccctggtcccctgcccaccaaactgtctttgaaaaacccataacctccatgccttcagggagataatttgagtactaacgccatctcccatggggcatggccgacctcgtgtctattaaactctttctttactgcaatgttgtggtctttctgggtgcagtggacaggaaggactccttgggaagttacacacctatccccacaatggtagggttcttcctcttggggaagcctcctgcagtagggaatacagccctcttgttcctatcaacacaaactaagaatgggataggtttatctcgatccctgtcctgctggttctgtcattgggtgaaggcaaaactagagctgcaacaccagagttatgctattaagtggagctgctggcatttgaaatattccaactgtggctcttttaaaaagggtcagcatctaatgggacaggtgggactaaataagaagatgagcggcgttggggctgcaacagggaagaagaagtcggagtgccagcccagacggcgtttgtggggttggagcgagcaggcgacacatcctgttagggtccggagaggatgtgatactccgcaccaaatacaaactggtcctcgccctgaactttaaaaactaaggtcatgaacacattcagct

SEQ ID NO: 466884 - DNA, 4661 bp, Homo sapiens
aagctcgggatggaagcagtctctagggtcttcccagccttggctggccaggctccagaagaacaaggggagattatcaaagtaaaggttaaagaagaagaccacacttgggatcaggaatcagccctacgtaggaatttgtcttataccagggaactctctcgtcagcgcttcaggcagttctgctatcaggagacacctgggcccagggaggctctgagtcaactgcgggaactttgccgtcagtggctgaacccagagatacataccaaggagcagatcctggaattgttggtgctggagcagttcctgaccatcctgcctgaggagctccagtcttgggtgcgggagcataatcctgagagtggagaagaggtggtgactttgctggaagatttggagagggagcttgatgaacctagacagcagtctctattggaagcagatgccctcaaggggatatgtggagaatttggatgcattgatccagaatggaaatattctggtttatgtgcaattttgggattcactatccatggacattttccaactcgatgtagctggaagaatacaagtttagctatgacaaactacaattatttgtattgtttaccaaatgcacctacttgtccacaggtctcacagggcacatatgggcaggaagtttctatggaagaaatgatccctctggattctgcaaaggagtctttaggcacccagcttcagtctatggaagatagaatggaatgtgaatctccagagccacacccacttcaagataatgatgatttaaatttagtagttcattactgctacagaaccaaacgggttcacttgcctggcacaggaaagccaaacatccacatcaacaggagaaaagagggcatttatttgcagagtgtcaagcaaggagaattggtcccctcaaaattaagacccagtttccccaatgggtcatttttgtggttttccatgatgtctcaaagcatgggtggtgataacctcagtagcttagatactaatgaagcagaaattgaaccagaaaacatgagagaaaagttcttcagaagcttagcaaggttactggaaaacaaaagtaataatactaagatattttctaaagcaaagtactgtcagttgataaaggaagtgaaagaagctaaagctaaggcgaaaaaggaatcagttgactaccgtcgcttggctagatttgatgttatccttgtacaaggaaatgagaagctaattgaggctgtaaatggggaaacagataaaatacggtattacttacacagtgaggacttatttgacattctgcataatacacatctcagcattggacatggtggacgtactcgcatggagaaagagttacaagcgaaatacaagaacatcacaaaagaagttataatgctgtatctgaccctctgtaaaccatgccaacagaaaaattcaaaactcaagaaggttctaacatcaaaatcaattaaggaagttagttcaagatgccaagtagatcttatagacatgcagttgaatcctgatggggagtacagatttattttgcattatcaagatctctgtacaaagttaacttttttgcggtcattaaagtctaaaaggcctacggaagttgcacatgctcttttagatatatttacaattattggagcacccagtgtcctacaatctgacaatgggagggaattttcaagccaggttgtcagtgaactcagtaatatttggccagaattgaaaattgtccatgggaagtctcagacctgccaaagccagagttctgcagaacaaactgaggatatccgaaagaggattttctcctggatgcaaactaacaactcatcacactggactgaatttttgtggttcattcagatgtcccaaaatcagccctatcacagaagcatgcaacagactccatgtgaaagtgcatttagctctgaagctaaactgggcttgtcccattctcagctaactgaagaacttgttgccagcttgcatacagaaaatgaattagatcaggctgacaaagagttagaaaatactttaagagcccagtatgaagaaaacattgagactggaacagacagtagtgatattgaagagaatctttctgtcactcctaaggtggctgaaaaaagccctcctgagagcagactaagatttttatcctgtgtagtttgtgaaaaagaatgcacaggtgttaatagttgtatatcatgtgatggaaatatccatgcaatttgtggagtgccctctcaacatgggactgagggctgtggtcggcaaataacttgtagcctttgctatgaaaccagcacaatgaagaggaaacatgatgagattcaaagaagtttgcctgttaaaccttccaaaatgctaaagccatcagggacaccattttcaccagacaaagtaggagactggatggcgaaacaagcttcactggacttttttgtcaagaaaagacatgccttttctgaacacagtagtagtaataaaagaaatgttaacaatagaagttatcctgaagaagggaaaaccaaaagagttcatgctagtttcactcggaaatatgatccttcatatattgagtttggttttgtagctgtaattgatggtgaagtactaaaaccacagtgtattatttgtggagatgtactggctaatgaagcaatgaaaccatcaaaacttaagcgacatttatattcaaaacataaagaaataagttcacaaccaaaagaattctttgaaagaaagagtagtgaattgaaaagccaaccaaagcaggtgttcaacgtttctcatataaacattagtgctttgcgggcttcatataaagtagcacttccggttgccaagtctaaaacaccatacacaattgctgagacactagtgaaagactgcatcaaagaagtttgcttggaaatgttgggtgaatctgcagcaaagaaggtagctcaggtaccactttccaatgacaccatagctcgacgtattcaggaactggctaatgatatggaagatcaactcatagaacaaataaaactagcaaagtatttttcattgcaacttgatgaatgcagagatattgctaacatgataattcttttagtctatgtgaggtttgaacatgatgatgatataaaggaagagttctttttttcagcctctttgcctacaaacacaactagctcagaactgtatgaagctgtaaagaattatattgttaacaaatgtggtttggaatttaaattttgtgtaggagtatgttctgatggtgcagcttcaatgacaggaaaacattctgaagtggtaacccagattaaggaacttgcgccagaatgtaaaacaacacattgcttcattcatcgagaaagtcttgccatgaaaaaaatatcagctgaactaaatagtgtacttaatgatatagtaaaaattgtgaattatataaaatctaattcattgaattcaagattattctctttattatgtgataatatggaagctgatcataagcaactgttactgcatgctgagatacggtggttatcacggggaaaagttctgtcaagaatgtttgaaatacgaaatgaactcttagtgtttctgcaaggcaagaaacccatgtggtcccaactttttaaagatgtgaattggacagccagacttgcttatttgtctgatatcttcagtatttttaatgatcttaatgcttctatgcaagggaagaatgcaacttatttttcaatggcagataaagttgaaggacaaaaacagaagttagaagcttggaaaaacagaatttctacagattgttatgacatgtttcataatttaacaacaattatcaatgaagtaggtaatgatcttgatattgcacatctgcgaaaagttatcagtgaacatcttacaaatttgttagaatgttttgaattttattttccatcaaaagaagatccacgcataggaaatttgtggatccaaaatccatttctttcatcaaaagataacttaaatttaactgtaactctacaggataagttgttgaagctggctaccgacgaaggattgaaaatcagttttgaaaatacagcatcacttccttcattttggataaaagctaaaaatgactatcctgagcttgctgagattgctttaaaattgctgcttcttttcccctcaacatacctctgtgagaccggattctctactttaagtgttattaaaacaaaacatagaaacagtttaaatatacattatcccctgagggtagcattgtcatcaatccaacctagattagacaaattaacaagcaagaagcaagctcacttatcacattaaaagctttaaatattgatatgtaaggtattggttcaaagtatgcatataagcattgagtgtgaggaatttgctatttcactttaaactttctgtctagttacagttatggaagtatgagaagttatgagtgaaacagcaattttctatataaattgcctatatgtatattttcaattaagaatgtgtacagtttttataattctatttttcctcatatttgtcgtatttattaaaatataattttaaatctgttgattctaatattaaaacatttgatcttatattttgtgtcttcttct

SEQ ID NO: 466885 - DNA, 4493 bp, Homo sapiens
aagctcgggatggaagcagtctctagggtcttcccagccttggctggccaggctccagaagaacaaggggagattatcaaagtaaaggttaaagaagaagaccacacttgggatcaggaatcagccctacgtaggaatttgtcttataccagggaactctctcgtcagcgcttcaggcagttctgctatcaggagacacctgggcccagggaggctctgagtcaactgcgggaactttgccgtcagtggctgaacccagagatacataccaaggagcagatcctggaattgttggtgctggagcagttcctgaccatcctgcctgaggagctccagtcttgggtgcgggagcataatcctgagagtggagaagaggtggtgactttgctggaagatttggagagggagcttgatgaacctagacagcagtctctattggaagcagatgccctcaaggggatatgtggagaatttggatgcattgatccagaatggaaatattctggtttatgtgcaattttgggattcactatccatggacattttccaactcgatgtagctggaagaatacaagtttagctatgacaaactacaattatttgtattgtttaccaaatgcacctacttgtccacaggtctcacagggcacatatgggcaggaagtttctatggaagaaatgatccctctggattctgcaaaggagtctttaggcacccagcttcagtctatggaagatagaatggaatgtgaatctccagagccacacccacttcaagataatgggtcatttttgtggttttccatgatgtctcaaagcatgggtggtgataacctcagtagcttagatactaatgaagcagaaattgaaccagaaaacatgagagaaaagttcttcagaagcttagcaaggttactggaaaacaaaagtaataatactaagatattttctaaagcaaagtactgtcagttgataaaggaagtgaaagaagctaaagctaaggcgaaaaaggaatcagttgactaccgtcgcttggctagatttgatgttatccttgtacaaggaaatgagaagctaattgaggctgtaaatggggaaacagataaaatacggtattacttacacagtgaggacttatttgacattctgcataatacacatctcagcattggacatggtggacgtactcgcatggagaaagagttacaagcgaaatacaagaacatcacaaaagaagttataatgctgtatctgaccctctgtaaaccatgccaacagaaaaattcaaaactcaagaaggttctaacatcaaaatcaattaaggaagttagttcaagatgccaagtagatcttatagacatgcagttgaatcctgatggggagtacagatttattttgcattatcaagatctctgtacaaagttaacttttttgcggtcattaaagtctaaaaggcctacggaagttgcacatgctcttttagatatatttacaattattggagcacccagtgtcctacaatctgacaatgggagggaattttcaagccaggttgtcagtgaactcagtaatatttggccagaattgaaaattgtccatgggaagtctcagacctgccaaagccagagttctgcagaacaaactgaggatatccgaaagaggattttctcctggatgcaaactaacaactcatcacactggactgaatttttgtggttcattcagatgtcccaaaatcagccctatcacagaagcatgcaacagactccatgtgaaagtgcatttagctctgaagctaaactgggcttgtcccattctcagctaactgaagaacttgttgccagcttgcatacagaaaatgaattagatcaggctgacaaagagttagaaaatactttaagagcccagtatgaagaaaacattgagactggaacagacagtagtgatattgaagagaatctttctgtcactcctaaggtggctgaaaaaagccctcctgagagcagactaagatttttatcctgtgtagtttgtgaaaaagaatgcacaggtgttaatagttgtatatcatgtgatggaaatatccatgcaatttgtggagtgccctctcaacatgggactgagggctgtggtcggcaaataacttgtagcctttgctatgaaaccagcacaatgaagaggaaacatgatgagattcaaagaagtttgcctgttaaaccttccaaaatgctaaagccatcagggacaccattttcaccagacaaagtaggagactggatggcgaaacaagcttcactggacttttttgtcaagaaaagacatgccttttctgaacacagtagtagtaataaaagaaatgttaacaatagaagttatcctgaagaagggaaaaccaaaagagttcatgctagtttcactcggaaatatgatccttcatatattgagtttggttttgtagctgtaattgatggtgaagtactaaaaccacagtgtattatttgtggagatgtactggctaatgaagcaatgaaaccatcaaaacttaagcgacatttatattcaaaacataaagaaataagttcacaaccaaaagaattctttgaaagaaagagtagtgaattgaaaagccaaccaaagcaggtgttcaacgtttctcatataaacattagtgctttgcgggcttcatataaagtagcacttccggttgccaagtctaaaacaccatacacaattgctgagacactagtgaaagactgcatcaaagaagtttgcttggaaatgttgggtgaatctgcagcaaagaaggtagctcaggtaccactttccaatgacaccatagctcgacgtattcaggaactggctaatgatatggaagatcaactcatagaacaaataaaactagcaaagtatttttcattgcaacttgatgaatgcagagatattgctaacatgataattcttttagtctatgtgaggtttgaacatgatgatgatataaaggaagagttctttttttcagcctctttgcctacaaacacaactagctcagaactgtatgaagctgtaaagaattatattgttaacaaatgtggtttggaatttaaattttgtgtaggagtatgttctgatggtgcagcttcaatgacaggaaaacattctgaagtggtaacccagattaaggaacttgcgccagaatgtaaaacaacacattgcttcattcatcgagaaagtcttgccatgaaaaaaatatcagctgaactaaatagtgtacttaatgatatagtaaaaattgtgaattatataaaatctaattcattgaattcaagattattctctttattatgtgataatatggaagctgatcataagcaactgttactgcatgctgagatacggtggttatcacggggaaaagttctgtcaagaatgtttgaaatacgaaatgaactcttagtgtttctgcaaggcaagaaacccatgtggtcccaactttttaaagatgtgaattggacagccagacttgcttatttgtctgatatcttcagtatttttaatgatcttaatgcttctatgcaagggaagaatgcaacttatttttcaatggcagataaagttgaaggacaaaaacagaagttagaagcttggaaaaacagaatttctacagattgttatgacatgtttcataatttaacaacaattatcaatgaagtaggtaatgatcttgatattgcacatctgcgaaaagttatcagtgaacatcttacaaatttgttagaatgttttgaattttattttccatcaaaagaagatccacgcataggaaatttgtggatccaaaatccatttctttcatcaaaagataacttaaatttaactgtaactctacaggataagttgttgaagctggctaccgacgaaggattgaaaatcagttttgaaaatacagcatcacttccttcattttggataaaagctaaaaatgactatcctgagcttgctgagattgctttaaaattgctgcttcttttcccctcaacatacctctgtgagaccggattctctactttaagtgttattaaaacaaaacatagaaacagtttaaatatacattatcccctgagggtagcattgtcatcaatccaacctagattagacaaattaacaagcaagaagcaagctcacttatcacattaaaagctttaaatattgatatgtaaggtattggttcaaagtatgcatataagcattgagtgtgaggaatttgctatttcactttaaactttctgtctagttacagttatggaagtatgagaagttatgagtgaaacagcaattttctatataaattgcctatatgtatattttcaattaagaatgtgtacagtttttataattctatttttcctcatatttgtcgtatttattaaaatataattttaaatctgttgattctaatattaaaacatttgatcttatattttgtgtcttcttct

SEQ ID NO: 466886 - DNA, 1285 bp, Homo sapiens
ggagattatcccagatacctgtgtccaggatggccacatgcgtgctgctggagtgtctcatgagagatgcaaagtgcctgaattttctgacacttcctgttagacctctcccccagacacatatgatccaccattccgtctctgactataaggccaccctgaggtgctgggccctgggcttctaccctgtggagatcacactggcctggcagcaggatggagaggaccagactcgggacatggagcttctagagaccaggcctgcaggggatggaaccttccagaagtgggcagctgtggtggtgccttctggagaggaacagagatacccgtgccatgtgcagcatgaggggttgcccaagcccctcaccctgagatgggagcagtcttctcagcccaccatccccatcgtgggtatcgttgctggcctggttctccttggagctgtagtcactggagctgtggtttctgctgtgatgtgcaggaagaagaactcaggcagcgaccatgcgcagggttctgatgtgtctctcacggcttgtaaagtgggtgctcaggccaccgtgcgctttatgtggtcactgctcagctgggtcatctttgctgctctgttgtccttggctgtatgatccgtccctacggggcttagcgggttttctccccgtgtgcggagatgagagattgtaataaataaaagcacaagacaaagagataaagagaaaacagctgggcccgggggaccactgccatcaagatgcggagaccgccgcctgccttggcctcccaaagtgccaagattgcagcctctgcccggccgccaccctgtctgggatgtgaggagcccctctgcctgactgcccagtctggaaagtgaggagcatctctgcctggccgccatcccatctaggaagtgaggagcgtttctgcccggccgcccatcatctgagatgtggggagtgcctctgccccgccgccccatctgggatgtgaggagcgcctctgcccggccgtgaccccgtctgggagccccagcgaagccctcagatgctgcggcccctggctgacaactggagtgcaaccttgtgagaggccctgagcaggaagcactcagggaaacctctcctggattcctgacgattggaaactgtgggagatgagaaacatttgttgtttcgagctaagttttacgtaatttgttatgcaacagtaaataatatattttcacaagagaggatgtattattacacatcaaattgcatttgctctaaatgtgtcatcatcatca

SEQ ID NO: 466887 - DNA, 1280 bp, Homo sapiens
cagatccggtcctcgggcgaccgctctgtcccagttgggcgagactacctggtcctgataacagtggataacggctttaacggccagaaggtcagcgcagtcccggatgaggacgagtagaacggtaacggccatggggcggttggccttccttctaccagaccttgatgtgggaagagagaaatggagtaacaagccacatttggcgctttggagatgcccaccacgctttgggaagatgtaccagcgtttatagaaggcccgagtgtataagagtctcgctcggtcagccacgctggagtgcagtggcatgatctcgactcgctgcaacctctgcgtcccgggctcaagcaattctcctgcctcagcctcccgaatagctgggattacaggggtgtgccaccacgcccagctaatttttgtatttttaatagagacgggtttcaccttgttggccaggctggtcttgaactcctgaccttaggtaatccacccgcctcagcctcccaaagtactgagattataggcgtgagccacagtgcctggccaaaaaaaaattcctaatttttttgcatattagctacagctggggaaggaattcctaagctgaaagataaagccaaaaccttaacccagaatacaacaaaaatagttaagaacatggaacatgtgaagcaagctgagatagataaacacaactgcgaattctttgcatctcctcccatcagaagaccttccgggtttcatcaactctatctccaattcaatcctcgtctacacacacagttcaggggaggcaagatagcggctacattttctgttcttgaccttcagctccaagggactgtttcccggatgcttcggaccgagtgtttggtagtgtctggggaggactcggtcagggagccccctcctttcaccctgctcccagcgcggcgaggcccaggtccggtcctaggtgagtttttctctccggctggaagactcgacgccgtggataccagggacccgagccctccggggctgctggctttggagggatttccagacgttgcagtcggggaattgggtttccacgttgctgctggagcttttcgtaagtcgataagagcagcatctttctctttgtctccaaacccgtgaatttgatacgctttgaaagcgttcttctaggcgaaagagcttggtactttcatgcttggatagaaggggagagttcaataccgtgcacgcgaccacaaagttgttttcgacgagaattcgatgggaagcggaggaac

SEQ ID NO: 466888 - DNA, 687 bp, Homo sapiens
cagatccggtcctcgggcgaccgctctgtcccagttgggcgagactacctggtcctgataacagtggataacggctttaacggccagaaggtcagcgcagtcccggatgaggacgagtagaacggtaacggccatggggcggttggccttccttctaccagaccttgatgtgggaagagagaaatggagtaacaagccacatttggcgctttggagatgcccaccacgctttgggaagatgtaccagcgtttatagaaggcccgagtgtataaggtgagaaagctactctcagcttccccgaaaacttttacaagaaaacatttgccacatctagcccctccagatgtaaagaagctgccgatgtatgatagactaagaatatcacacatcttgtaaattcccatttgtttaaaaaaatcgtagaaaataaacatcttctggagatgactttttgaaatggagatgttgcatcacctctggagcagacacatacacgtttgttcagtgggttagactaggacatggagaagatctgagaaggacgagaagaaggtcctatgccagactggtcatatttagaagacgtttacatattataatcgttgtcttccgtgtgcattttattcctcactactgtatatgtagttgacaactccaagtactttttgaaatgtctagtctttttt

SEQ ID NO: 466889 - DNA, 3264 bp, Homo sapiens
ttctccccagacgccgaggatggccgtcatggcgccccgaaccctcctcctgctactctcgggggccctggccctgacccagacctgggcgggaccgggggagccgcgccgggacgagggtcgggcaggtctcagccactgctcgcccccaggctcccactccatgaggtatttcttcacatccgtgtcccggcccggccgcggggagccccgcttcatcgccgtgggctacgtggacgacacgcagttcgtgcggttcgacagcgacgccgcgagccagaggatggagccgcgggcgccgtggatagagcaggaggggccggagtattgggaccaggagacacggaatgtgaaggcccagtcacagactgaccgagtggacctggggaccctgcgcggctactacaaccagagcgaggccgtctccgggtccgagatccaccccgaagccgcgggaccccgagacccttgccccgggagaggcccaggcgcctttacccggtttcattttcagtttaggccaaaaatccccccgggttggtcggggctgggcggggctcgggggactgggctgaccgcggggtcggggccaggttctcacaccatccagataatgtatggctgcgacgtggggtcggacgggcgcttcctccgcgggtaccggcaggacgcctacgacggcaaggattacatcgccctgaacgaggacctgcgctcttggaccgcggcggacatggcggctcagatcaccaagcgcaagtgggaggcggcccatgaggcggagcagttgagagcctacctggatggcacgtgcgtggagtggctccgcagatacctggagaacgggaaggagacgctgcagcgcacggacccccccaagacacatatgacccaccaccccatctctgaccatgaggccaccctgaggtgctgggccctgggcttctaccctgcggagatcacactgacctggcagcgggatggggaggaccagacccaggacacggagctcgtggagaccaggcctgcaggggatggaaccttccagaagtgggcggctgtggtggtgccttctggagaggagcagagatacacctgccatgtgcagcatgagggtctgcccaagcccctcaccctgagatgggagctgtcttcccagcccaccatccccatcgtgggcatcattgctggcctggttctccttggagctgtgatcactggagctgtggtcgctgccgtgatgtggaggaggaagagctcaggtggagaaggggtgaagggtggggtctgagatttcttgtctcactgagggttccaagccccagctagaaatgtgccctgtctcattactgggaagcaccgtccacaatcatgggcctacccagtctgggccctgtgtgccagcacttactcttttgtaaagcacctgttaaaatgaaggacagatttatcaccttgattacggcggtgatgggacctgatcccagcagtcacaagtcacaggggaaggtccctgaggacagacctcaggagggctattggtccaggacccacacctgctttcttcatgtttcctgatcccgccctgggtctgcagtcacacatttctggaaacttctctggggtccaagactaggaggttcctctaggaccttaaggccctggctcctttctggtatctcacaggacattttcttctcacagatagaaaaggagggagttacactcaggctgcaagtaagtatgaaggaggctgatgcctgaggtccttgggatattgtgtttgggagcccatgggggagcccacccacctcacaattcctcctctagccacatcttctgtgggatctgaccaggttctgtttttgttctaccccaggcagtgacagtgcccagggctctgatgtgtccctcacagcttgtaaaggtgagagcttggaggacctaatgtgtgttgggtgttgggcggaacagtggacacagctgtgctatggggtttctttgcattggatgtattgagcatgcgatgggctgtttaaggtgtgacccctcactgtgatggatatgaatttgttcatgaatatttttttctatagtgtgagacagctgccttgtgtgggactgagaggcaagagttgttcctgcccttccctttgtgacttgaagaaccctgactttgtttctgcaaaggcacctgcatgtgtctgtgttcgtgtaggcataatgtgaggaggtggggagaccaccccacccccatgtccaccatgaccctcttcccacgctgacctgtgctccctccccaatcatctttcctgttccagagaggtggggctgaggtgtctccatctctgtctcaacttcatggtgcactgagctgtaacttcttccttccctattaaaattagaaccttagtataaatttactttctcaaattcttgccatgagaggttgatgagttaattaaaggagaagattcctaaaatttgagagacaaaataaatggaagacatgagaaccttccagagtccacgtgtttcttgtgctgatttgttgcaggggaggagagtagatggggctgtgcccagtttctgttctggccaccatgggctttatgtggtcacagctcacctgggtcatctttgctgctccattgtccttggcccttcagtagaaccttgtcccaccaagacctgtgatcacagggagttggatgtcacctagggtggtccctgcatacaaatctccttgtggtatcaagagacaaattttcagacctgtccaggtcttgccttcctcccagggctttttccttaatggtattttcgatttttctccaatctttttaaaggaaccagattgtgacatttgcagagaggaggggtcccatagtttctcatcatggttaactttctgttggaactcctcttctgccctcctactcttcttcctgctctgagttgtagtaatcctagtgctggctccaatccaaactcatagatttataaagcagagtctaatttagattcatatgtggttggaaaattgtacccataaggctagggttattgttcctgaagagaaatatatggttttgtgctgaagtgtgcaggagggttggtgtgggaggagggaggacacacaagcagccctggtgagaaaagcactggcggcatggatgtccacgtgaacttatgttctttagctgccacaaaacagcatttgccctgtggctacattaataaagatatgggctttagaataga

SEQ ID NO: 466890 - DNA, 2184 bp, Homo sapiens
  misc_feature (5)..(6): n is a, c, g, or t
  misc_feature (8)..(8): n is a, c, g, or t
agtgnncnaggaaagcatgagtctttccaccccccgccctgagatttactgacatatgaacacatatgattggcatgatataagaaccactcatctgctggccatctctccaggtctggagccagagaagatgatctgaaattgtagcaggagaaattgaggtaggatactaagaaagcttttcaggagtggggctaggcaagaggtgcagcatgagggaataagagtgaatcctcagtatctaagggaggtggcaggtggcgggggacttctttctttgggtcatctttggtggtgatttgacaggaaggaacaaagtggcttcaaacattatacaagtctctagtctgttctgtgtcctgttttctttctcattctttcagtgtggaatctatatgaccctgggagggatgttggttggaagaatgaccagctgatggagatgctgctgtaattattggtggtaataatgggcagcagtgagccacccggtgtgacagtgtaggagaaaacagtccaaactcctgccaaactctctctactgatggcaaatcagaggagactcaaattgtgtatgaaaaataatttcaagtttaacaaacacaaggaaaccgcagggtccatgtcaaagctgatgagctatttctgaaactcgtgcagaattgtggtttgtgtggtctatgtcacggcacccttgagggagagtgggcaattgcctgaacttggaggctgtgtcctgtccccaggctgctccagggctgcctccttccgactgggccttcttatctgggactgttgagggcaacaggccttccgaagaccagtgaagaaggaggccctgcaaacaggaggctgacagggtaggaacgaggccatgatccctttgcagaaggacaaccaggaggagggtgtctgccccatctgccaggagagcctgaaggaggccgtgagcaccaactgcggacatctcttctgtcgagtgtgcctgacacagcatgtggagaaggcctcagcctctggggtcttctgctgccccctctgccggaagccctgttctgaggaggtgctagggacaggctatatctgccccaaccaccagaagagggtgtgcaggttctgtgaggagagcagacttcttctatgtgtggaatgcctggtgtcccctgaacacatgtctcatcatgaactgaccattgaaaatgccctcagccactacaagctcaacaatggacatctctctttgtttcttctgcttcatcctgttttggacccttgtcttgcttttctgtgtatattttgaggctgatgtttccatgcattaatgtgagtctgtctaaaagaggatattgtcagtgtgatgttagagtcccagtctgctcatctgtagaatagagtaattggactaactaatgcaaaaccctttcaggactaaaactgtgtgaactcctggttgatagtactagaaacttggctagaaatgtaatcaggttttatatacactagtaattatcctgcaaatatattaaaacctgaaagttactacataattttttctctctttttcttccttctgcatttgtcttatctttccttttcctttctttgctatggcaattattttatcttattctgttaaattttctatcacaaaagttacatgctgtaggtaataaattcagaaagcactgaaaggtataaagtcaagactaaaaacttgtcttcctttctccctccattcatagtcctcagaggtaaccattgtttgatttttgtacatccttccaaaaaatgtgtgtgcttatgaatgcactcttacacacacacacacacacacacacacaccctcaaaggattctctctatatttttttctgtaactcatttttgttatctaaaagtgtggcttgaacattttctcatcagcatgtatagatcttctgaattattttcaagaactgtgtggtattaaattctatgaatgtaccataaattggcagacattgggtcatttccaagctattgttttgttttaagattacacagaacgttctaatgaatatccttcaacatatatattggaggacctagaatatccaagatatattttggtgagagcataaggtagaaatctaactttagtttttccaagttataatcaatttgtcctatcaccatttgttgaatg

SEQ ID NO: 466891 - DNA, 686 bp, Homo sapiens
gcttcggtgtcaggtgagctagatggtatgtgtggcccgagccattgcatgtggggagaaaggtcaggcaggattttcacgttttcatctatttggacagttccttcttcgagcggggtcgagagcgagaggagcgacagctcccaaggtacatttcatcattcaacgtactcagatgcagggaatttgggttgcattttccatgagccttcggctagcagaaaatctgtcaaaagatcttgaacaatcccttaattctttccgcctgggattcaattgcgccaagaggactaattgtgctaaagctataaaagtgtgctttgctctcagtggaattcatcctcagagttggtcactccctggtcgagcacgaggctacaaagctgtacagcatgttgctgaactgaataccgtcggcaattgcaatacagtggtatttgtgtatccgaacatacgaaagcttctacaaggtgcggatccataaggaagatattaggaaacatctaattgaagcttgaagaaccaaaatgaggaaggcagaattaggaaagaccctgtccggtgacgcctccccttctggtttccatctgtgccccctctcaggagccgcgggaacacaagcctcgagcaggcaaagtctctttggatttgaaatacaaaaccgttaagtgagctccgaccaggtc

SEQ ID NO: 466892 - DNA, 999 bp, Homo sapiens
gcttcggtgtcaggtgagctagatggtatgtgtggcccgagccattgcatgtggggagaaaggtcaggcaggattttcacgttttcatctatttggacagttccttcttcgagcggggtcgagagcgagaggagcgacagctcccaaggtacatttcatcattcaacgtactcagatgcagggaatttgggttgcattttccatgagccttcggctagcagaaaatctgtcaaaagatcttgaacaatcccttaattctttccgcctgggattcaattgcgccaagaggactaattgtgctaaagctataaaagtgtgctttgctctcagtggaattcatcctcagagttggtcactccctggtcgagcacgaggctacaaagctgtacagcatgttgctgaactgaataccgtcggcaattgcaatacagtggtatttgtgtatccgaacatacgaaagcttctacaaggtgcggatccataaggaagatattaggaaacatctaattgaagcttgaagaaccaaaatgaggaaggcagaattaggaaagaccctgtccggtgacgcctccccttctggtttccatctgtgccccctctcaggagccgcgggaacacaagcctcgagcagaatccaaccacttgatgattcgaaatcaccgcaatgccatggaatgtaaaaactgctctcgccacgtctagagaccgatgcctcttcctccgctgggaacacggttcatctccactctccgatttcacggttttatttgccctctgggacgcgctgacattgttctaagcacattttctaagtgattgtgtgagtgtgggtgtgttttgttggacttgaagggagtctaatttctagaagttcctttcaggagtctgcctttactgcaaagttgatgtattcgaaaacacagtaactcttaatggcaacagaatttgtcacctaattaagtgcaattcggtcataaaagaagccacagaatcagcacg

SEQ ID NO: 466893 - DNA, 2340 bp, Homo sapiens
gcaagctgagggagccggctccggccttggccagcccagaaaggggctcccacagtgcagcggcgggctgaagggctcctcaagtgccgccaaagtgggagcccaggcagaggaggcgccgagagcgagcgagggctattgtgcaacggagccagtttctccagacaggctggagagaccacttgcatcagaatcatctggggtgccccttgaaaatgcaatgttccgggccaacgagtcaatctcggagtgtaaatcttgtgaagctgtattttaacaagctcacttggtgatttatttgtgtacgctatttaaaactctgtgaaccaccggtctaggctatactttgcagtgtattaaggtggtcttcggcacctctcgcagacccccttcctcttgcctctagcgccaacctctcagcctctcgcataccaggggaggggctttgcaaaaccttccacgaaagtgaatcccagcacagccctgctgtagctggctctcaggcgcaagcgcagagctgcgaccgctgctgatacgttgctcagtctcagtgtggtctctgttttgcaactggtcgtccgcgtcaggagacttaggtccaggcgactgcccagacaatgactggtcccgcataccgagcagagcatgatcagcagcagtctgagtggaagagtgcctgtgatcttagggaacctgatgggcgttggagcagcggttcgacgcatgggtttctctttaatccttccgacttccccaagcccagcgcactcaggttccgctccaagtgcgggacccgcccggggtgtgtcgggggtactcggccggaggcggccggtgagtgaggcttacagggccccgggaccaaggaagaagtaaggggactagtgccatagtgtctttgaactcataccccatatgaagagaacgtcaaagaggctggatcacctaaagggtttagagaaagtttggaattggctcagatctgtcttttatcataaaagatgaacttgaaacccagacataacttagatacagatgacatttacactttaaatgtctttcagatagggggatttgagctgaaccaaagcatcaacaccaatcagactgtttccgaagaactagagttttctgggtcagcaatggaaagcctcagagggaatactgctcagggtcctacaaatgaagaagactataaaaacgaaggccaattatcaaggcaaacaaaatgtcctgcacagaagaaatcctcttttgagaacacagtggtcagaaaagtgtcagtgacactcaaagaaattttcacaggggaggaaggccctgaatccagtgaatttagtctaagcccaaaccttgacgcacaacagaaaattccaaagggacatggatccccaatatctaggaaaaactccaaagataattcagacttaattaaacaccaaagacttttctcacaaagaaaaccttgtaaatgcaatgaatgtgaaaaagcctttagttaccaatcagaccttcttgtacacagtagaattcatggtggagaaaagccttttgaatgcaacaaatgtgggaaatctttcagccgaagtacacaccttattgaacatcaaagaactcacactggagagaaaccttatgaatgcaatgaatgtggaaaagcttttagccggagcacacatcttagtctacatcagagaatccatactggagaaaaaccatatgaatgtagtgaatgtggaaaagcctttagccgaagcactaaccttagtcagcatcagcgaactcatactcaagaaaggccttacaaatgtaatgaatgtgggaaagccttcggtgaccgttcaaccataattcagcatcaacgaatacacactggagagaatccctatgaatgcagtaaatgtggaaaagctttcagttggatctcatcgcttactgaacatcagagaacacacactggggagaacccctatgagtgcagtgaatgtgggaaagtgttcagtcgaagctcgtctcttacagaacatcagagaatccacagtggagaaaagcctcacgagtgtagagtgtgtggaaagggcttcagtcgaagctcatcccttattattcatcagagaactcataccggggagaagccgtacaaatgtaatgactgtggaaaagccttctgtcagagttcaactctgatcagacatcagcaccttcatactaaagagtaatatctgagcttttattaatgttagcataagaacacatatacctaacctcccaccactgaaatatatatatttcaagtatatatatacttgttctaattttcttttattagatacctatacc

SEQ ID NO: 466894 - DNA, 1022 bp, Homo sapiens
gcaagctgagggagccggctccggccttggccagcccagaaaggggctcccacagtgcagcggcgggctgaagggctcctcaagtgccgccaaagtgggagcccaggcagaggaggcgccgagagcgagcgagggctattgtgcaacggagccagtttctccagacaggctggagagaccacttgcatcagaatcatctggggtgccccttgaaaatgcaatgttccgggccaacgagtcaatctcggagtgtaaatcttgtgaagctgtattttaacaagctcacttggtgatttatttgtgtacgctatttaaaactctgtgaaccaccggtctaggctatactttgcagtgtattaaggtggtcttcggcacctctcgcagacccccttcctcttgcctctagcgccaacctctcagcctctcgcataccaggggaggggctttgcaaaaccttccacgaaagtgaatcccagcacagccctgctgtagctggctctcaggcgcaagcgcagagctgcgaccgctgctgatacgttgctcagtctcagtgtggtctctgttttgcaactggtcgtccgcgtcaggagacttaggtccaggcgactgcccagacaatgactggtcccgcataccgagcagagcatgatcagcagcagtctgagtggaagagtgcctgtgatcttagggaacctgatgggcgttggagcagcggttcgacgcatgggtttctctttaatccttccgacttccccaagcccagcgcactcaggttccgctccaagtgcgggacccgcccggggtgtgtcgggggtactcggccggaggcggccggtgagtgaggcttacagggccccgggaccaaggtgggtgctcttggaggttctggaaggcggaaacacgggttcttcgagggaaacgggcgaaagggtcgcgggtggtttggctgcaggtcgggtcaggaggcacctccacggttgggacgccgcgtggcgtggggtcatgaagcccctcagcccgct

SEQ ID NO: 466895 - DNA, 2976 bp, Homo sapiens
  misc_feature (3)..(5): n is a, c, g, or t
  misc_feature (8)..(9): n is a, c, g, or t
  misc_feature (12)..(13): n is a, c, g, or t
tgnnnaannatnnggtccaaaagcatcaacaaccttgtcacttgcagcgtgggctgctgatcagcaacactgacctaacctgggagtttctcacaaatgcagaatatctacaccccatcctacacctacagcgttccgaggacaacatagtaagggatgctcattcatctctctgccagtgctttctgcggtctcttcagctagttctatcaggcacttctggcaatctggagcggcagccggctgggcggcgaggaaaccgctgcacggatcccgcctcccagcacacgcagtcggcagttgcagcctccaagaccgcggtgccaccaaaccaagcgccggacgcggtggcgcgcgcctgtaatcccagctccccgggaggctgaggtcggcggatcgtgggtgctcgggggttcggagctacggcgctgtgtggagcgggcgtccgcaccgggcctggcaccaacatggtactcccgggggagcccgggagtaccaggttgtctaaggagggggggaccaggcccaggccggacacggagcaggtcaaactccccgtgttgggcgacggtgggaccgcgcctgcgagcaacgcctgcagttccgcccgggacatccgacgagacccgggaatgatgattcattcagtcagtgggagccggaagaaactcagcagcctgcaagatggagctgcagacatagataaggaagctggaaacttgcatgggggaaggctggcagctgcaccgatagaaaaggtctacctgggggaaacttcccttcagttcaccggccgtgcctctctctatccttttcctcggagcaggctgtgctatgatcaaggcattgtgacccctgtgacccacacgtacacatccagaaggtctcctggagccagaaagtctgggacaacaggaaaaccacaaaagaagaaaaacagctcctttacgaacttcccaaattactcttatggcattgccacgccctctgccgtccagattttattggttggtgcaaaacaggaggtcagtgaatacgagagcatgaccgtgcactaactcgtcggaaaagtagaagtcaactgtgtgctttaccgtgcaggattgcaaacaccagagagaaaatcagtctctggaatgatgcctttgatggaccaagatgcagctgatgaagcattgaaccaattagcacctagcaggagggcacccttgctctgtgtccttgaaggttaaagctgtcaaaaagtggtctccctcaagttcggccatcttgctctcagagatctagaactggactcagtcaaaattttgggccaaggagaccgacgcgctgtcgcctgcactaagagaaacgcaacgaacaactttgtcaatgcattgcattatactatagcagcaactatacttttaaatgattcgaatcttgaggtttcaaactgaaccgtcttgtgccttttgcccggcgggcatttctgcggggaccgcgggtcaccttctgaatttttaccttcataaacagcaaggactgcgctctttcgcacggcgccccgttttttcgtagagttccgtcggccaaaaccacttgaaactcgctcagcggcgtcggggctccagccaggcgtcaccttccacagcgaacctgcgaaccacagcgtcccctgggggtctccgtccgcgtggccgcttcctcttacatcggtgacgcaagggaagggcgtctaggatccgccggtttccttcctcactgctcccatcagtgcgaaagcaacgtgttgggggttcggggtgtgtggcggctgaacagctgcctgaagttctctgatggcgctggagggagctccagagaagaggtcatggggagaaggcacaccttaaacgccccggggtggggggggggggcgacattccctaatgggaaaaaagacacaccttaaacgcagtagagggcgacattctctactagggaaaatgcggaagaacacagttgtaatcaacggtagcaacagtgcctagaacacagcaagcactaataagtgtttattaatattaggaagtgattgataaactcttggaagtaaatgtgctcactgaaaaaatagtgaataagaaggtaaaggacaatgtctttggggaatctcacaattaagggtcaggaaatcaggaataactaatataagagacagaaggaccagcctaagaggtaggaaaaacagaaagtaacaccagaatcgttatactcaggcactggtcaaaatactgactactgaggtctgagaaacagtcactggagagagggatttcctactcccatcaagttcatgggtactccatacttgatgttttcttttcttatgtccagtaagatttgagctcactctaaaagcttttccacattcctcacattcataaggtttctccccagtatgaactcgcttatgtccaatcagagctgagccctgacggaaggacgtgccacactcactgcaggtcacttcctcagagccttctttctcttctctcagtttctcccttatagatgtttcccattgattctctaatttgacatcctgaacacaaacttctctaaccttaggatcccgggaatcaacttttaggagactgttaaatttcatccagtaggcttctccattttcaaaaatctcttgttgtgaacttgccttttcattctcaggccacatcttgtcagctgacacttaaacaagaaaatacaaatgtcagagggaaggaaataagtttctttaacagtcttccactgctgtcctggtttcttcctactggtcagatccagttctcaaacaagctgtgaagtggctccagttgatgccagcctcctttggagaacacatgttttggtggtgccagccaaagggcccttcttgacccacagtgccgctactgtttggcttaatgtgtcaaacactgccctggatttggggttcattagcaacactaaacc

SEQ ID NO: 466896 - DNA, 506 bp, Homo sapiens
cccacagtccctgcactcgtgaggcttctccccactgtgggtttttttatgtcggcaaagagctgatctactgttgaaagccttcccacactgggtgcaattaaaaggtttctcccctgtgtggattatccggtgcatagaaagctgatttctggtcttgaatgctttcccacactcattacacacatggggtttctcaccagaatgaatttgctcatggagaattagatctgagtgccaactgaagtttttgccacacctggcacattcatggagtttctgtgctataagaactttattacattgactatgttttgagtttggattcaagtttttactaagcactttctggttctttccttttttgcaggtcacttcctcagagccttctttctcttctctcagtttctcccttatagatgtttcccattgattctctaatttgacatcctgaacacaaacttctctacccagagccggggataggatcctctagatcacccaca

SEQ ID NO: 466897 - DNA, 4159 bp, Homo sapiens
gagcagaaatgcgttcgccaaatatatcgactatatttcctgctcacctcaccctctcacagatgctgattttgagagcgtccccaatgaacttcccgcacacaaatcgccatctcagtgtctgtttcctagggaactgaccgatgacaaaaagcaagtgactgatgcctacggtggtctcttgaggtcaaaatcataggatttctctcccccgcaaataatggcccttacttcgtaaacacgctggctccgtaatccctattattgttttgggggtttggttctgtccagggaggaggtgagggcagatgctcaagagaggctgtccccaccgtccttttgtctcagcgaaccgcagtccgcgcccgagcgccactagctgtcctgggacgggaactgcagcggcaagtgtgtgactttcttgagcccggagccacaggcctgggaagcgccgctgagacttcagggtcgtagtgacagaggaaccacccgaggctaggcggggagagggtgcagtttccggatcccgaaggcttcgagaagagccgacctgtctggaagggtctccaagaacagagaggactctgcaaccatcactcgggagccgcgtcctttcatccttgagacagctccgtggtccaacggttccccgatccgctggccgagatctcaagcttggatgcaacttcggattcgccccaggcaggaggaaggaagccccgattggaaacgtcgcgggttcgatccccgtactggccaagtattctctgtggcttttatcaccagaatggatagtaacccagacatcgatctaaacgtgtacctgtgtgtttctccaggcttaactttgccccgagaaaacggatctgtgaatttggtgcgccctcgcttactcgacagcgaagggaaggtgaggagagtcaaaggcacatggagcattaacagttggaataaacgacagagacacggaaacctccgaggtttccagagcggacccggaaatgacgccaggggatgcaaacccttctgcccctttttgctacccctgaagcttactgttagtggtcgagtttttctggaagtgggcttccgcgatcgcggggaccaacgccctgagctcttgtgcccaaaggggatcgccaggttttttgatgcggatcgaaagggactggccccggagcctacaacctgacgcaggtgggacttggggaaatgtcgagaaacctaggtctgggacttgagttggcttccagggcacacattcttgttcagaagaaacacattgcaaaaatcgggaggtgacgggcagatgaagtgtcggcgcttcgcctcgggactccagtgcaacctatggggcttttggaaatgaggaagtcgatgactctgcagggactcctctgacccaggagcagatggcgctcgtctgggcactccccaggagaaaaggtgcatcgggaagcagcctggcttgtggatggtggacaaggtggaggagagagaattccttggcagtagcattatgaacaaatgcagggctgagaaacagcatggtggccttgactaagtttatggcgacagcagttggggtaacatgtgacctggatctgatcattgtgattcaagtcagcgtcatttagggttttcgggaaacattttttgaaagggagcaacttggctggaacactccatcaattctttgccctgtgcatttttgcccttctttctgcctctcaggaatgcagagagaattcctggaggaacagcagctatcatacatccgtgatgaaagccatgggacaaaggcaattgagcaagaagacaggagctggggacattcttgacagtagtgccacctctggatgatttaccttgggacctcttattaaatgagataggacttcttcctgtttaatccactggagtggaattttctgttacagtgaatgcagtcctaattgatgatattggctaatacatattagcacctgctatgtcccagtacagtttaagcattttatctactaatgttttaaattttctcagtgaccttatgagataggccaaaggttctcagagtgtggttcctggaccagcaacatcagcatcacctggaaacttgttagaaatacaaattttagggcctggccctagacccactgaatcagaaactctaggggtgaggacctagcagtctgtttaaaaagccctccatgctattttgatgaatgccaaagttggacagctactgagatagggtattgttattatccccattttacagataaggaaacagctgaatttatgtcacttgcccaatgtcacacaactagcaagactgactccttgaagctcatcacatgtaagaactgctttagagcagtggtcttcaaactttgaaagcatatcctgttgaaaaattatgtatccacttctacatttttaagttgacatctaaaaatttcacatcataagtttaaacagttgtaaaaaatgtgatttctggtatattgtgaattatgacattttaaaatgtattccatcactcctctaaatgtattcagtggtttctaaataccatagtgatttaaatctatcatcaatttaaaaaaaaaaacaagcttttttttttaacattagatattttgcatctttttctctctttttttttttttttttgagacagactctcactgcgatgcctcttcatgggtggtggatgaagaaactgaacagggccatgatccttatctgtaatttcccggctaccacactgctttggtggtcttccctcgtctcttcctgggtagaaacaactacctggagatcccaatgttcttgtcagtgcacttttcatggactgcagtgggtaaaggaactaatatttattaagcacttactatttatcaggcagtatgtgacatacaatgtatgtgggagtgtgtgtgtgtctttcctcacaattattttatagagtaggggttagtacaatgaagatgttgtagcttagagagaggaagtggcaaaaccagaattggaaaacaagactgttgggctccaaggtccatgcacttttcccctttaaaggtcttaggtaaagagtagacccatttggataggcccaaactaacagtctatctccagagtccttgtcctaaattctttaccccactgccttctgagaggaagttcatctttttaccagggagtagccaccttcagaagaattctcctgtctatataaccaaattaatagaatcctggtaaatcaactggaatgttaactgttctgattttcaactgtttttaccttcatcattaatactgaatatggactgtaggttggataactgctgttcaaggtaaggaactctgagcagcagccttgagctaccaaggcattaaataggatttttgcttaaaaatcctatatttttgcttaaaaatattaaaaatatgactgagtatatgtatatattccccccacattccaaagataaacactgttaagcatgtaaagcacattttactgtatatatatgggtggcatatgtgtgtattgttgaatactacattgctttaggcaaaaagtgttttatttctcactggatcaaaaacaattaaggatgtcattttctcttcttcctttgagttccaataaatctacatttgttcttgttcccttgtttagaggtgcaatggaaaagaagtttgcagattgtactcctgcctggttggataaactcatttgaaaataagctcctgttttgtgcagatgcaaatttaaatgtgctatttgtaactaatcactgataaaatagagatttccaaaatatattgagaaaaagagctgcagaataatttgcaagtttcataaaatcaggaagaatgcatttaaaaactaaaaaagcttgggagagtggggacatatttttcccccattgctgcattcctagtaactagatgtgtgctgcaaaaaaaaaaaaatagtttaaggaatgaattggtagctattgttatatgtaaatgtgaaattaatatctacaaatacatatctgtatttataaattgtacttacgtagagaaacaaaaaaataaaaataattgtaattacatacttagggaatatatgcttctattaatctaaaatttaattattagc

SEQ ID NO: 466898 - DNA, 3879 bp, Homo sapiens
gagcagaaatgcgttcgccaaatatatcgactatatttcctgctcacctcaccctctcacagatgctgattttgagagcgtccccaatgaacttcccgcacacaaatcgccatctcagtgtctgtttcctagggaactgaccgatgacaaaaagcaagtgactgatgcctacggtggtctcttgaggtcaaaatcataggatttctctcccccgcaaataatggcccttacttcgtaaacacgctggctccgtaatccctattattgttttgggggtttggttctgtccagggaggaggtgagggcagatgctcaagagaggctgtccccaccgtccttttgtctcagcgaaccgcagtccgcgcccgagcgccactagctgtcctgggacgggaactgcagcggcaagtgtgtgactttcttgagcccggagccacaggcctgggaagcgccgctgagacttcagggtcgtagtgacagaggaaccacccgaggctaggcggggagagggtgcagtttccggatcccgaaggcttcgagaagagccgacctgtctggaagggtctccaagaacagagaggactctgcaaccatcactcgggagccgcgtcctttcatccttgagacagctccgtggtccaacggttccccgatccgctggccgagatctcaagcttggatgcaacttcggattcgccccaggcaggaggaaggaagccccgattggaaacgtcgcgggttcgatccccgtactggccaagtattctctgtggcttttatcaccagaatggatagtaacccagacatcgatctaaacgtgtacctgtgtgtttctccaggcttaactttgccccgagaaaacggatctgtgaatttggtgcgccctcgcttactcgacagcgaagggaaggtgaggagagtcaaaggcacatggagcattaacagttggaataaacgacagagacacggaaacctccgaggtttccagagcggacccggaaatgacgccaggggatgcaaacccttctgcccctttttgctacccctgaagcttactgttagtggtcgagtttttctggaagtgggcttccgcgatcgcggggaccaacgccctgagctcttgtgcccaaaggggatcgccaggttttttgatgcggatcgaaagggactggccccggagcctacaacctgacgcaggtggacaaggtggaggagagagaattccttggcagtagcattatgaacaaatgcagggctgagaaacagcatggtggccttgactaagtttatggcgacagcagttggggtaacatgtgacctggatctgatcattgtgattcaagtcagcgtcatttagggttttcgggaaacattttttgaaagggagcaacttggctggaacactccatcaattctttgccctgtgcatttttgcccttctttctgcctctcaggaatgcagagagaattcctggaggaacagcagctatcatacatccgtgatgaaagccatgggacaaaggcaattgagcaagaagacaggagctggggacattcttgacagtagtgccacctctggatgatttaccttgggacctcttattaaatgagataggacttcttcctgtttaatccactggagtggaattttctgttacagtgaatgcagtcctaattgatgatattggctaatacatattagcacctgctatgtcccagtacagtttaagcattttatctactaatgttttaaattttctcagtgaccttatgagataggccaaaggttctcagagtgtggttcctggaccagcaacatcagcatcacctggaaacttgttagaaatacaaattttagggcctggccctagacccactgaatcagaaactctaggggtgaggacctagcagtctgtttaaaaagccctccatgctattttgatgaatgccaaagttggacagctactgagatagggtattgttattatccccattttacagataaggaaacagctgaatttatgtcacttgcccaatgtcacacaactagcaagactgactccttgaagctcatcacatgtaagaactgctttagagcagtggtcttcaaactttgaaagcatatcctgttgaaaaattatgtatccacttctacatttttaagttgacatctaaaaatttcacatcataagtttaaacagttgtaaaaaatgtgatttctggtatattgtgaattatgacattttaaaatgtattccatcactcctctaaatgtattcagtggtttctaaataccatagtgatttaaatctatcatcaatttaaaaaaaaaaacaagcttttttttttaacattagatattttgcatctttttctctctttttttttttttttttgagacagactctcactgcgatgcctcttcatgggtggtggatgaagaaactgaacagggccatgatccttatctgtaatttcccggctaccacactgctttggtggtcttccctcgtctcttcctgggtagaaacaactacctggagatcccaatgttcttgtcagtgcacttttcatggactgcagtgggtaaaggaactaatatttattaagcacttactatttatcaggcagtatgtgacatacaatgtatgtgggagtgtgtgtgtgtctttcctcacaattattttatagagtaggggttagtacaatgaagatgttgtagcttagagagaggaagtggcaaaaccagaattggaaaacaagactgttgggctccaaggtccatgcacttttcccctttaaaggtcttaggtaaagagtagacccatttggataggcccaaactaacagtctatctccagagtccttgtcctaaattctttaccccactgccttctgagaggaagttcatctttttaccagggagtagccaccttcagaagaattctcctgtctatataaccaaattaatagaatcctggtaaatcaactggaatgttaactgttctgattttcaactgtttttaccttcatcattaatactgaatatggactgtaggttggataactgctgttcaaggtaaggaactctgagcagcagccttgagctaccaaggcattaaataggatttttgcttaaaaatcctatatttttgcttaaaaatattaaaaatatgactgagtatatgtatatattccccccacattccaaagataaacactgttaagcatgtaaagcacattttactgtatatatatgggtggcatatgtgtgtattgttgaatactacattgctttaggcaaaaagtgttttatttctcactggatcaaaaacaattaaggatgtcattttctcttcttcctttgagttccaataaatctacatttgttcttgttcccttgtttagaggtgcaatggaaaagaagtttgcagattgtactcctgcctggttggataaactcatttgaaaataagctcctgttttgtgcagatgcaaatttaaatgtgctatttgtaactaatcactgataaaatagagatttccaaaatatattgagaaaaagagctgcagaataatttgcaagtttcataaaatcaggaagaatgcatttaaaaactaaaaaagcttgggagagtggggacatatttttcccccattgctgcattcctagtaactagatgtgtgctgcaaaaaaaaaaaaatagtttaaggaatgaattggtagctattgttatatgtaaatgtgaaattaatatctacaaatacatatctgtatttataaattgtacttacgtagagaaacaaaaaaataaaaataattgtaattacatacttagggaatatatgcttctattaatctaaaatttaattattagc

SEQ ID NO: 466899 - DNA, 1682 bp, Homo sapiens
gagcagaaatgcgttcgccaaatatatcgactatatttcctgctcacctcaccctctcacagatgctgattttgagagcgtccccaatgaacttcccgcacacaaatcgccatctcagtgtctgtttcctagggaactgaccgatgacaaaaagcaagtgactgatgcctacggtggtctcttgaggtcaaaatcataggatttctctcccccgcaaataatggcccttacttcgtaaacacgctggctccgtaatccctattattgttttgggggtttggttctgtccagggaggaggtgagggcagatgctcaagagaggctgtccccaccgtccttttgtctcagcgaaccgcagtccgcgcccgagcgccactagctgtcctgggacgggaactgcagcggcaagtgtgtgactttcttgagcccggagccacaggcctgggaagcgccgctgagacttcagggtcgtagtgacagaggaaccacccgaggctaggcggggagagggtgcagtttccggatcccgaaggcttcgagaagagccgacctgtctggaagggtctccaagaacagagaggactctgcaaccatcactcgggagccgcgtcctttcatccttgagacagctccgtggtccaacggttccccgatccgctggccgagatctcaagcttggatgcaacttcggattcgccccaggcaggaggaaggaagccccgattggaaacgtcgcgggttcgatccccgtactggccaagtattctctgtggcttttatcaccagaatggatagtaacccagacatcgatctaaacgtgtacctgtgtgtttctccaggcttaactttgccccgagaaaacggatctgtgaatttggtgcgccctcgcttactcgacagcgaagggaaggtgaggagagtcaaaggcacatggagcattaacagttggaataaacgacagagacacggaaacctccgaggtttccagagcggacccggaaatgacgccaggggatgcaaacccttctgcccctttttgctacccctgaagcttactgttagtggtcgagtttttctggaagtgggcttccgcgatcgcggggaccaacgccctgagctcttgtgcccaaaggggatcgccaggttttttgatgcggatcgaaagggactggccccggagcctacaacctgacgcaggtgggacttggggaaatgtcgagaaacctaggtctgggacttgagttggcttccagggcacacattcttgttcagaagaaacacattgcaaaaatcgggaggtgacgggcagatgaagtgtcggcgcttcgcctcgggactccagtgcaacctatggggcttttggaaatgaggaagtcgatgactctgcagggactcctctgacccaggagcagatggcgctcgtctgggcactccccaggagaaaaggtgcatcgggaagcagcctggcttgtggatggtggacaaggtggaggagagagaattccttggcagtagcattatgaacaaatgcagggctgagaaacagcatggtggccttgactaagtttatggcgacagcagatggagtcttgctctgtcgcccaggctagagtgcagtggcgcgatctcagctcactgaaacctctgcctcccgggttcaagtgattctcctgcctccgcca

SEQ ID NO: 466900 - DNA, 1760 bp, Homo sapiens
gagcagaaatgcgttcgccaaatatatcgactatatttcctgctcacctcaccctctcacagatgctgattttgagagcgtccccaatgaacttcccgcacacaaatcgccatctcagtgtctgtttcctagggaactgaccgatgacaaaaagcaagtgactgatgcctacggtggtctcttgaggtcaaaatcataggatttctctcccccgcaaataatggcccttacttcgtaaacacgctggctccgtaatccctattattgttttgggggtttggttctgtccagggaggaggtgagggcagatgctcaagagaggctgtccccaccgtccttttgtctcagcgaaccgcagtccgcgcccgagcgccactagctgtcctgggacgggaactgcagcggcaagtgtgtgactttcttgagcccggagccacaggcctgggaagcgccgctgagacttcagggtcgtagtgacagaggaaccacccgaggctaggcggggagagggtgcagtttccggatcccgaaggcttcgagaagagccgacctgtctggaagggtctccaagaacagagaggactctgcaaccatcactcgggagccgcgtcctttcatccttgagacagctccgtggtccaacggttccccgatccgctggccgagatctcaagcttggatgcaacttcggattcgccccaggcaggaggaaggaagccccgattggaaacgtcgcgggttcgatccccgtactggccaagtattctctgtggcttttatcaccagaatggatagtaacccagacatcgatctaaacgtgtacctgtgtgtttctccaggcttaactttgccccgagaaaacggatctgtgaatttggtgcgccctcgcttactcgacagcgaagggaaggtgaggagagtcaaaggcacatggagcattaacagttggaataaacgacagagacacggaaacctccgaggtttccagagcggacccggaaatgacgccaggggatgcaaacccttctgcccctttttgctacccctgaagcttactgttagtggtcgagtttttctggaagtgggcttccgcgatcgcggggaccaacgccctgagctcttgtgcccaaaggggatcgccaggttttttgatgcggatcgaaagggactggccccggagcctacaacctgacgcaggtgggacttggggaaatgtcgagaaacctaggtctgggacttgagttggcttccagggcacacattcttgttcagaagaaacacattgcaaaaatcgggaggtgacgggcagatgaagtgtcggcgcttcgcctcgggactccagtgcaacctatggggcttttggaaatgaggaagtcgatgactctgcagggactcctctgacccaggagcagatggcgctcgtctgggcactccccaggagaaaaggtgcatcgggaagcagcctggcttgtggatggtggacaaggtggaggagagagaattccttggcagtagcattatgaacaaatgcagggctgagaaacagcatggtggccttgactaagtttatggcgacagcagataaggaaacagctgaatttatgtcacttgcccaatgtcacacaactagcaagactgactccttgaagctcatcacatatggagtcttgctctgtcgcccaggctagagtgcagtggcgcgatctcagctcactgaaacctctgcctcccgggttcaagtgattctcctgcctccgcca

SEQ ID NO: 466901 - DNA, 846 bp, Homo sapiens
ttgcaatgcctgatccagctaagtccgctcccgccccgaagaagggctccaagaaggcggtgaccaaggcgcagaagaaggatggcaagaagcgtaaacgcagccgcaaggagagctactccgtatacgtttacaaggtgctgaagcaagtccaccccgacaccggcatctcctccaaagccatggggatcatgaattcctttgtcaacgatatcttcgagcgcatcgccggcgaggcttcccgcctggctcattacaacaagcgttcgaccatcacctccagggagatccagacagccgtgcgcctgctgctgcctggggaactggccaagcacgccgtgtccgagggcactaaggccgtcaccaagaaccaaaaactaagtttgcaacttaaaatgcaatcaatttggagcaacacgtccaccagtctagagctgaagagcctaaaaaaggaggggaggaagaaccatcatctaccttactgcctcctcctcctccctcagccccgccattacccgggtaaagataccaaagaggagacggaggattttcctaattcccctcccccaataaatcgggaagaagacaagagatatactacagttatgggaccctgtcttaggcaagcagcattagaaggggagctcctggcttgtcctgtgatggaagatcaacaggccaattgggtacatgagcctattactttcaacacttttaaggaaatcaggaaaagcattagagaaaatggacctgctagcccattcacaagaggattaattgaggtcatagcagataactaccatattgactccatgggactggtcagtgctagctaaaacaacttta

SEQ ID NO: 466902 - DNA, 2309 bp, Homo sapiens
tgcaaggggatagtaaagaaagcatctttgaggtcgataacagaatagtgagttgtggaaagggttattgaagataggagggtgtacaggtttggcactataggatggatgggaaggacaatttgattaacaaggtgaagatcctgaaccaacctgtaagacttgtccagtttctggaggggcagcatcagtcttcagccactaagccaagaagatctgggaaggagtcagtcagagagccttggggcagagttccaggggctctgggagtggcttttgggcaagctggacagtccgatttcgagtggggacctgcacagataggacacggcttaggaggaatcctgggctgcgggcattccttggcccagtggccagatttccggcacttgaagcaagatcctgggggaggaggtcctggaggaatgcctggccactgtggtttaggcggcggtaaagcatctaagggttgttgccaaaccagccacggactgggctgggtttttatatttgatgaaaaagagcctaaacgctaaccaatttgggagaggtcagataaagaaaaaaggagcattaatcttgactatgccttcagctccggccacctctctaaaatgaaattgttgggcaggcattgaccaacatctgtgggactatatttgtggtgtaacaaagatccaagatagccagatttctaagaaagaaatatatgggggtttggagatgtttatccagtaatggcagcaggataaggaccatatttcccatcaaagaaattgcatagaagaaaaagacaaccccagagatgatcatctccagctgaggcttcccagggaacccaaggagcataagccaaccaaaatgttggaattcctggaaaatgtggcgttcttaatagtcataaaagtactaaatatatactgcaaaatgctaggtgtgtctctgagatttaggacaacttctgaaagtactgtcattaacggagaagctggaataaaaagaaaagtcactccagagcttaagtagttcctacaagtatctcaatttatgatgcttcaaaacagctattgaaacaattttactttaacttatctaatggagtatttagacttcaaaatcctattaagttcatttttcatcctcaagaactacaaaaatatcaaaatcaaatattctagatttttcattttatttaagttttctactttctcaagggagaaagagggtataaggaataaaattaatcactctagcttttttaataaaaagtctttttggcatgaatggaattatgtgactgtataaataactaggacatgagcaagagatggagcaagaaaaagtgatattggatattggatcagaaacataaaggaagttttcaaaaattctttttcaagttacaagttggtaacatagctctgaactatcccatgaatcaacatttatcttcaagacaaaaatcaaatttatcttcagtcaaaatatggaaaggataataactcaacaaaaatgagaaagaaatgcatttaaaaacacacttcagaaaaagacagaaagaccatttcaatagccaaataaatcacctttctatgtgtcagttttcttgaagcactcagagaaaaaatgtagaacatctaaaaccaggtgacatggcaatacctccatgctcatccccaaaataagtagtaaaaacttggaaggccaagtgggaaagaaaaaagcattatcttaaagatgattattggaactgataaaaatatttttcttttgtgatcacaaaaattgagctccttgagtaattatctaagcagagaaagatagggggaaattactgtggttaattaacatgagatcttttcaaagatgattgataactagaactcttggtcttcttggttaacgactagctttgctgctgtcatcttcaggctggagatttgcctgtgtaaaaatattcctgggactggttggagcaaaagtgttgtaccttaaaatagagggcaatgaaaacagcttttaatctccttaaattaatgacaatatttagttaacataatcaaaggagactattagagttaaattggtcaatatcaatataattgtaacatatataatccaaaagaaatcagtgcatagcatgttatttttagtgttggcactttagtttataatttcattttaaatatgagttttgtacatataccaatcatcatggattaagtattcaataaatacattcggcttaattataatttttattataattttattatatttttaatggatattatctttatctcaggtgt

SEQ ID NO: 466903 - DNA, 737 bp, Homo sapiens
tatcccttcagaatcttccgatggtttagaattttgccctatgaaaataaacaaggatagtgtcgcctacacagcttctctgctttttgctcaggtggtctttcctctctgggttgtctctcctcatctaccttcattctccaaatgttctccatcaggaacacgtaccaatagccaccccattatccaagccattacagacaacagtaaggaggcttctcaaaaaattaaaagtagaactactatatcatccatcaatctcactaatggatatatatccaaaggaaatgaaattgtgcagaacattaacatatgggggaaattgtatattacacaatgcagcttccacattatgctgacaccattcctctacttgtccatttactttaagagacacttactgatgcaaaggagactgaacagtgaaggatctcactcagaatcctgtccacaatctgtccagtttacaccttaccccaaagagaggtagcctgttatacaacgttcttcacctcattctctcacttcacaatatatcttggagatcttaccaaaagcacacagagacctcctgtgttgtgattagattttcattgcataatattccattgttcgtgtgtgtgtgagtgtttagttagtctcaaattgataggtgcatgaatttttccaatcttttgttaaggcaagcagtattgaataaacttgtacataatatttttgcatgtgtataattatat

SEQ ID NO: 466904 - DNA, 1656 bp, Homo sapiens
gctagaagctggagatacagtgatgcacaaagcaaatgtattctgtgtcttcttgattatagtctagtagggaagagaaaaaggtaaccaaaaaattacaatatgatgtaatagattctgtgataggaaggtgcagggaactgtgggaagggatacagaagtgtatgattcaggaaagactatatgaggaggacctcaagcacaagtgggaattaaatggaaggcagaggaggacgagagtgtttgagacaaaagacacaggaagagccaagaatgcaaggtgggaaccttaatagtgtgttcgagaaatcacaagtagttcagactcagcttgaggaggggaccgtgaaagctgagagtgaggcttgtgtgcccccttaaggggcttgctctcctcccaagagctatggggagtcacaggattgcaggcaggggagtgatgcagtcctgtgtgtcttagatcactcaggctgaggcaagactgagacaggaagatcaatcttttgcagtgatccagatgagaaatgatgtgagcctggaccgtgagaaagacgagacagtgtatgcatagggtatagacttgagagagggatttgagatggaatcaagagttgtgttaattcattggcctatcaaacagagaagaaattggagtcaagagtgactcatggccagctgggtggcaccagtcattgagatagagaactaagagaactgatttcccaaagaaaatgagctgttagatttgatattcccaatggacatcagcaagagatgtctactaggcagtagggcacatggatgtgaagcctatgaagcagatttgggctgtagctgtagatctgggtgggggttctcagccctggggcttcaccctatcctcctccaaagccctaccctctgcctgaggccaggtccccagtccctagccccttcccccgccaggtgtacagtgccgatggagagttcctcttcaagtttggctcccatggcgagggcaatgggcagttcaatgcccccacaggagtagctgtggactccaatggaaacatcattgtggctgactggggcaacagccgcatccaggtattcgacagctctggctccttcctgtcctatatcaacacatctgcagaaccactgtatggtccacagggcctggcactgacctcggatggccatgtggtggtggctgatgctggcaaccactgctttaaagcctatcgctacctccagtagctgtacagaggccctgcctggcttgtggagggacagacattggggtgattggacaagagggtctggctgggaggtgggccagacctggcagcactgaatgtgggctgtgggcatgggtgcacccggtgccctccctctcctacccccacccccacggttgcactttatttattcggttcttgctttggtgactgggtgagcctggactgtggtcccaaggatgtgtgcagagcttcaccctacccttcttacacacctccccacccctgtcagtctgctccccatcccccagcctggggccagaacagcctaccccaggacaggagtccctctagttgtctccctaccaccctatacacactgacagagacagcaataccccaccccccatattaaataaatgtcttcaccaagaaa

SEQ ID NO: 466905 - DNA, 456 bp, Homo sapiens
tctctgctccatattttttaatcccttaagcatttgatgaaacactctttagtgctatatgcattttctaacttttgttaaaaatgtgacaattgtcaaaaaatgcactaaaatgtaaatggagattgaacaagttcactttccagcttataggcaactttatacagacttgcacattttctccagctgtttagtgaaagtgaaagagaaaggggttttcggccgcgaggatgggtcagtttgttatatggcaagcagaacgcgcccatggtttcggcgtaaccttcttacacacctccccacccctgtcagtctgctccccatcccccagcctggggccagaacagcctaccccaggacaggagtccctctagttgtctccctaccaccctatacacactgacagagacagcaataccccaccccccatattaaataaatgtcttcaccaagaaa

SEQ ID NO: 466906 - DNA, 2879 bp, Homo sapiens
ggccggtccgcagccccgccccggcccctccctccggcctgtgcggctagtccggcggcggcgccggcgcggggacaggcggaggcgcgggcagggccgggcggacgggcgctggcagcagtagcagcgccgcgggcccttcagagtggccgcagtccgagctttgccctcgcatcctgttccaacgcgaggctggtgtgagtggcgggagccatctgtgggcgccatggcaaagagggaggacagccctggcccagaggtccagccaatggacaagcagttcctggtatgcagcatctgcctggatcggtaccagtgccccaaggttcttccttgcctgcacaccttctgtgagagatgtctccaaaactatatccctgcccagagcctgacgctatcctgtccagtatgccggcagacgtccatcctcccagagcagggcgtctcggcactgcagaacaacttcttcatcagcagcctcatggaggcaatgcagcaggcacctgatggggcccacgacccggaggacccccaccccctcagtgtagtggctggccgccctctctcctgccccaaccatgaaggcaagacgatggagttttactgtgaggcctgtgagacggccatgtgtggtgagtgccgcgccggggagcatcgtgagcatggcacagtgctgctgagggatgtggtggagcagcacaaggcggccctgcagcgccagctcgaggctgtgcgtggccgattgccacagctgtccgcagcaattgccttagtcgggggcatcagccagcagctgcaggagcgcaaggcagaggccctggcccagatcagtgcagcgttcgaggacctggagcaagcactgcagcagcgcaagcaggctctggtcagcgacctggagaccatttgtggggccaaacagaaggtgttgcaaagccagctggacacactgcgccagggtcaggaacacatcggcagtagctgcagctttgcagagcaggcactgcgcctgggctcggccccggaggtgttgctggtgcgcaagcacatgcgagagcggctggctgcattggcggcacaggccttcccggagcggccacatgagaatgcacagctggaactggtccttgaggtggacggtctgcggcgatcggtgctcaatctgggcgcactgctcaccacgagcgccactgcacacgaaacggtggccacgggagagggcctgcgccaggcgctagtgggccagcctgcctcgctcactgtcactaccaaagacaaggacgggcggttggtgcgcacaggcagcgctgagctgcgtgcagagatcaccggcccggacggcacgcgccttccggtgccagtggtggaccacaagaatggcacatatgagctagtgtacacagcgcgcacggaaggcgagctgctcctctcggtgctgctctacggacagccagtgcgcggcagccccttccgcgtgcgtgccctgcgtccgggggacctgccaccttccccggacgatgtgaagcgccgtgtcaagtcccctggcggccccggcagccatgtgcgccagaaggcagtgcgtaggcccagctccatgtacagcacaggcggcaaacgaaaggacaacccaattgaggatgagctcgtcttccgtgttggcagtcgtggaagggagaaaggtgaattcaccaatttacaaggtgtgtccgcagccagcagcggccgcatcgtggtagcagacagcaacaaccagtgtattcaggttttctccaatgagggccagttcaagttccgttttggggtccgaggacgctcacctgggcagctgcagcgccccacaggtgtggcagtggacaccaatggagacataattgtggcagactatgacaaccgttgggtcagcatcttctcccctgagggcaagttcaagaccaagattggagctggccgcctcatgggccccaagggagtggccgtagaccggaatggacatatcattgtggtcgacaacaagtcttgctgcgtctttaccttccagcccaatggcaaactggttggccgttttgggggccgtggggccactgaccgccactttgcagggccccattttgtggctgtgaagcaacaagaatgaagttgtagtaacggacttccataaccattcagtgaaggtgtacagtgccgatggagagttcctcttcaagtttggctcccatggcgagggcaatgggcagttcaatgcccccacaggagtagctgtggactccaatggaaacatcattgtggctgactggggcaacagccgcatccaggtattcgacagctctggctccttcctgtcctatatcaacacatctgcagaaccactgtatggtccacagggcctggcactgacctcggatggccatgtggtggtggctgatgctggcaaccactgctttaaagcctatcgctacctccagtagctgtacagaggccctgcctggcttgtggagggacagacattggggtgattggacaagagggtctggctgggaggtgggccagacctggcagcactgaatgtgggctgtgggcatgggtgcacccggtgccctccctctcctacccccacccccacggttgcactttatttattcggttcttgctttggtgactgggtgagcctggactgtggtcccaaggatgtgtgcagagcttcaccctacccttcttacacacctccccacccctgtcagtctgctccccatcccccagcctggggccagaacagcctaccccaggacaggagtccctctagttgtctccctaccaccctatacacactgacagagacagcaataccccaccccccatattaaataaatgtcttcaccaagaaa

SEQ ID NO: 466907 - DNA, 3044 bp, Homo sapiens
ggccggtccgcagccccgccccggcccctccctccggcctgtgcggctagtccggcggcggcgccggcgcggggacaggcggaggcgcgggcagggccgggcggacgggcgctggcagcagtagcagcgccgcgggcccttcagagtggccgcagtccgagctttgccctcgcatcctgttccaacgcggaaaggacccctctggttctcctgtagcctgagccctgcctggaggaccccaggcccctccctggttctgacctcctcccttctgcaattggcttcagatcctgggctgcaaacctgcagggacagatggttgcaggttggaggggcaggctgcaccccagggagaggctggtgtgagtggcgggagccatctgtgggcgccatggcaaagagggaggacagccctggcccagaggtccagccaatggacaagcagttcctggtatgcagcatctgcctggatcggtaccagtgccccaaggttcttccttgcctgcacaccttctgtgagagatgtctccaaaactatatccctgcccagagcctgacgctatcctgtccagtatgccggcagacgtccatcctcccagagcagggcgtctcggcactgcagaacaacttcttcatcagcagcctcatggaggcaatgcagcaggcacctgatggggcccacgacccggaggacccccaccccctcagtgtagtggctggccgccctctctcctgccccaaccatgaaggcaagacgatggagttttactgtgaggcctgtgagacggccatgtgtggtgagtgccgcgccggggagcatcgtgagcatggcacagtgctgctgagggatgtggtggagcagcacaaggcggccctgcagcgccagctcgaggctgtgcgtggccgattgccacagctgtccgcagcaattgccttagtcgggggcatcagccagcagctgcaggagcgcaaggcagaggccctggcccagatcagtgcagcgttcgaggacctggagcaagcactgcagcagcgcaagcaggctctggtcagcgacctggagaccatttgtggggccaaacagaaggtgttgcaaagccagctggacacactgcgccagggtcaggaacacatcggcagtagctgcagctttgcagagcaggcactgcgcctgggctcggccccggaggtgttgctggtgcgcaagcacatgcgagagcggctggctgcattggcggcacaggccttcccggagcggccacatgagaatgcacagctggaactggtccttgaggtggacggtctgcggcgatcggtgctcaatctgggcgcactgctcaccacgagcgccactgcacacgaaacggtggccacgggagagggcctgcgccaggcgctagtgggccagcctgcctcgctcactgtcactaccaaagacaaggacgggcggttggtgcgcacaggcagcgctgagctgcgtgcagagatcaccggcccggacggcacgcgccttccggtgccagtggtggaccacaagaatggcacatatgagctagtgtacacagcgcgcacggaaggcgagctgctcctctcggtgctgctctacggacagccagtgcgcggcagccccttccgcgtgcgtgccctgcgtccgggggacctgccaccttccccggacgatgtgaagcgccgtgtcaagtcccctggcggccccggcagccatgtgcgccagaaggcagtgcgtaggcccagctccatgtacagcacaggcggcaaacgaaaggacaacccaattgaggatgagctcgtcttccgtgttggcagtcgtggaagggagaaaggtgaattcaccaatttacaaggtgtgtccgcagccagcagcggccgcatcgtggtagcagacagcaacaaccagtgtattcaggttttctccaatgagggccagttcaagttccgttttggggtccgaggacgctcacctgggcagctgcagcgccccacaggtgtggcagtggacaccaatggagacataattgtggcagactatgacaaccgttgggtcagcatcttctcccctgagggcaagttcaagaccaagattggagctggccgcctcatgggccccaagggagtggccgtagaccggaatggacatatcattgtggtcgacaacaagtcttgctgcgtctttaccttccagcccaatggcaaactggttggccgttttgggggccgtggggccactgaccgccactttgcagggccccattttgtggctgtgaagcaacaagaatgaagttgtagtaacggacttccataaccattcagtgaaggtgtacagtgccgatggagagttcctcttcaagtttggctcccatggcgagggcaatgggcagttcaatgcccccacaggagtagctgtggactccaatggaaacatcattgtggctgactggggcaacagccgcatccaggtattcgacagctctggctccttcctgtcctatatcaacacatctgcagaaccactgtatggtccacagggcctggcactgacctcggatggccatgtggtggtggctgatgctggcaaccactgctttaaagcctatcgctacctccagtagctgtacagaggccctgcctggcttgtggagggacagacattggggtgattggacaagagggtctggctgggaggtgggccagacctggcagcactgaatgtgggctgtgggcatgggtgcacccggtgccctccctctcctacccccacccccacggttgcactttatttattcggttcttgctttggtgactgggtgagcctggactgtggtcccaaggatgtgtgcagagcttcaccctacccttcttacacacctccccacccctgtcagtctgctccccatcccccagcctggggccagaacagcctaccccaggacaggagtccctctagttgtctccctaccaccctatacacactgacagagacagcaataccccaccccccatattaaataaatgtcttcaccaagaaa

SEQ ID NO: 466908 - DNA, 2642 bp, Homo sapiens
ggccggtccgcagccccgccccggcccctccctccggcctgtgcggctagtccggcggcggcgccggcgcggggacaggcggaggcgcgggcagggccgggcggacgggcgctggcagcagtagcagcgccgcgggcccttcagagtggccgcagtccgagctttgccctcgcatcctgttccaacgcgaggctggtgtgagtggcgggagccatctgtgggcgccatggcaaagagggaggacagccctggcccagaggtccagccaatggacaagcagttcctggtatgcagcatctgcctggatcggtaccagtgccccaaggttcttccttgcctgcacaccttctgtgagagatgtctccaaaactatatccctgcccagagcctgacgctatcctgtccagtatgccggcagacgtccatcctcccagagcagggcgtctcggcactgcagaacaacttcttcatcagcagcctcatggaggcaatgcagcaggcacctgatggggcccacgacccggaggacccccaccccctcagtgtagtggctggccgccctctctcctgccccaaccatgaaggcaagacgatggagttttactgtgaggcctgtgagacggccatgtgtggtgagtgccgcgccggggagcatcgtgagcatggcacagtgctgctgagggatgtggtggagcagcacaaggcggccctgcagcgccagctcgaggctgtgcgtggccgattgccacagctgtccgcagcaattgccttagtcgggggcatcagccagcagctgcaggagcgcaaggcagaggccctggcccagatcagtgcagcgttcgaggacctggagcaagcactgcagcagcgcaagcaggctctggtcagcgacgtggacggtctgcggcgatcggtgctcaatctgggcgcactgctcaccacgagcgccactgcacacgaaacggtggccacgggagagggcctgcgccaggcgctagtgggccagcctgcctcgctcactgtcactaccaaagacaaggacgggcggttggtgcgcacaggcagcgctgagctgcgtgcagagatcaccggcccggacggcacgcgccttccggtgccagtggtggaccacaagaatggcacatatgagctagtgtacacagcgcgcacggaaggcgagctgctcctctcggtgctgctctacggacagccagtgcgcggcagccccttccgcgtgcgtgccctgcgtccgggggacctgccaccttccccggacgatgtgaagcgccgtgtcaagtcccctggcggccccggcagccatgtgcgccagaaggcagtgcgtaggcccagctccatgtacagcacaggcggcaaacgaaaggacaacccaattgaggatgagctcgtcttccgtgttggcagtcgtggaagggagaaaggtgaattcaccaatttacaaggtgtgtccgcagccagcagcggccgcatcgtggtagcagacagcaacaaccagtgtattcaggttttctccaatgagggccagttcaagttccgttttggggtccgaggacgctcacctgggcagctgcagcgccccacaggtgtggcagtggacaccaatggagacataattgtggcagactatgacaaccgttgggtcagcatcttctcccctgagggcaagttcaagaccaagattggagctggccgcctcatgggccccaagggagtggccgtagaccggaatggacatatcattgtggtcgacaacaagtcttgctgcgtctttaccttccagcccaatggcaaactggttggccgttttgggggccgtggggccactgaccgccactttgcagggccccattttgtggctgtgaagcaacaagaatgaagttgtagtaacggacttccataaccattcagtgaaggtgtacagtgccgatggagagttcctcttcaagtttggctcccatggcgagggcaatgggcagttcaatgcccccacaggagtagctgtggactccaatggaaacatcattgtggctgactggggcaacagccgcatccaggtattcgacagctctggctccttcctgtcctatatcaacacatctgcagaaccactgtatggtccacagggcctggcactgacctcggatggccatgtggtggtggctgatgctggcaaccactgctttaaagcctatcgctacctccagtagctgtacagaggccctgcctggcttgtggagggacagacattggggtgattggacaagagggtctggctgggaggtgggccagacctggcagcactgaatgtgggctgtgggcatgggtgcacccggtgccctccctctcctacccccacccccacggttgcactttatttattcggttcttgctttggtgactgggtgagcctggactgtggtcccaaggatgtgtgcagagcttcaccctacccttcttacacacctccccacccctgtcagtctgctccccatcccccagcctggggccagaacagcctaccccaggacaggagtccctctagttgtctccctaccaccctatacacactgacagagacagcaataccccaccccccatattaaataaatgtcttcaccaagaaa

SEQ ID NO: 466909 - DNA, 2846 bp, Homo sapiens
ggccggtccgcagccccgccccggcccctccctccggcctgtgcggctagtccggcggcggcgccggcgcggggacaggcggaggcgcgggcagggccgggcggacgggcgctggcagcagtagcagcgccgcgggcccttcagagtggccgcagtccgagctttgccctcgcatcctgttccaacgcgaggctggtgtgagtggcgggagccatctgtgggcgccatggcaaagagggaggacagccctggcccagaggtccagccaatggacaagcagttcctggtatgcagcatctgcctggatcggtaccagtgccccaaggttcttccttgcctgcacaccttctgtgagagatgtctccaaaactatatccctgcccagagcctgacgctatcctgtccagtatgccggcagacgtccatcctcccagagcagggcgtctcggcactgcagaacaacttcttcatcagcagcctcatggaggcaatgcagcaggcacctgatggggcccacgacccggaggacccccaccccctcagtgtagtggctggccgccctctctcctgccccaaccatgaaggcaagacgatggagttttactgtgaggcctgtgagacggccatgtgtggtgagtgccgcgccggggagcatcgtgagcagcacaaggcggccctgcagcgccagctcgaggctgtgcgtggccgattgccacagctgtccgcagcaattgccttagtcgggggcatcagccagcagctgcaggagcgcaaggcagaggccctggcccagatcagtgcagcgttcgaggacctggagcaagcactgcagcagcgcaagcaggctctggtcagcgacctggagaccatttgtggggccaaacagaaggtgttgcaaagccagctggacacactgcgccagggtcaggaacacatcggcagtagctgcagctttgcagagcaggcactgcgcctgggctcggccccggaggtgttgctggtgcgcaagcacatgcgagagcggctggctgcattggcggcacaggccttcccggagcggccacatgagaatgcacagctggaactggtccttgaggtggacggtctgcggcgatcggtgctcaatctgggcgcactgctcaccacgagcgccactgcacacgaaacggtggccacgggagagggcctgcgccaggcgctagtgggccagcctgcctcgctcactgtcactaccaaagacaaggacgggcggttggtgcgcacaggcagcgctgagctgcgtgcagagatcaccggcccggacggcacgcgccttccggtgccagtggtggaccacaagaatggcacatatgagctagtgtacacagcgcgcacggaaggcgagctgctcctctcggtgctgctctacggacagccagtgcgcggcagccccttccgcgtgcgtgccctgcgtccgggggacctgccaccttccccggacgatgtgaagcgccgtgtcaagtcccctggcggccccggcagccatgtgcgccagaaggcagtgcgtaggcccagctccatgtacagcacaggcggcaaacgaaaggacaacccaattgaggatgagctcgtcttccgtgttggcagtcgtggaagggagaaaggtgaattcaccaatttacaaggtgtgtccgcagccagcagcggccgcatcgtggtagcagacagcaacaaccagtgtattcaggttttctccaatgagggccagttcaagttccgttttggggtccgaggacgctcacctgggcagctgcagcgccccacaggtgtggcagtggacaccaatggagacataattgtggcagactatgacaaccgttgggtcagcatcttctcccctgagggcaagttcaagaccaagattggagctggccgcctcatgggccccaagggagtggccgtagaccggaatggacatatcattgtggtcgacaacaagtcttgctgcgtctttaccttccagcccaatggcaaactggttggccgttttgggggccgtggggccactgaccgccactttgcagggccccattttgtggctgtgaagcaacaagaatgaagttgtagtaacggacttccataaccattcagtgaaggtgtacagtgccgatggagagttcctcttcaagtttggctcccatggcgagggcaatgggcagttcaatgcccccacaggagtagctgtggactccaatggaaacatcattgtggctgactggggcaacagccgcatccaggtattcgacagctctggctccttcctgtcctatatcaacacatctgcagaaccactgtatggtccacagggcctggcactgacctcggatggccatgtggtggtggctgatgctggcaaccactgctttaaagcctatcgctacctccagtagctgtacagaggccctgcctggcttgtggagggacagacattggggtgattggacaagagggtctggctgggaggtgggccagacctggcagcactgaatgtgggctgtgggcatgggtgcacccggtgccctccctctcctacccccacccccacggttgcactttatttattcggttcttgctttggtgactgggtgagcctggactgtggtcccaaggatgtgtgcagagcttcaccctacccttcttacacacctccccacccctgtcagtctgctccccatcccccagcctggggccagaacagcctaccccaggacaggagtccctctagttgtctccctaccaccctatacacactgacagagacagcaataccccaccccccatattaaataaatgtcttcaccaagaaa

SEQ ID NO: 466910 - DNA, 2621 bp, Homo sapiens
ggccggtccgcagccccgccccggcccctccctccggcctgtgcggctagtccggcggcggcgccggcgcggggacaggcggaggcgcgggcagggccgggcggacgggcgctggcagcagtagcagcgccgcgggcccttcagagtggccgcagtccgagctttgccctcgcatcctgttccaacgcgaggctggtgtgagtggcgggagccatctgtgggcgccatggcaaagagggaggacagccctggcccagaggtccagccaatggacaagcagttcctggtatgcagcatctgcctggatcggtaccagtgccccaaggttcttccttgcctgcacaccttctgtgagagatgtctccaaaactatatccctgcccagagcctgacgctatcctgtccagtatgccggcagacgtccatcctcccagagcagggcgtctcggcactgcagaacaacttcttcatcagcagcctcatggaggcaatgcagcaggcacctgatggggcccacgacccggaggacccccaccccctcagtgtagtggctggccgccctctctcctgccccaaccatgaaggcaagacgatggagttttactgtgaggcctgtgagacggccatgtgtggtgagtgccgcgccggggagcatcgtgagcatggcacagtgctgctgagggatgtggtggagcagcacaaggcggccctgcagcgccagctcgaggctgtgcgtggccgattgccacagctgtccgcagcaattgccttagtcgggggcatcagccagcagctgcaggagcgcaaggcagaggccctggcccagatcagtgcagcgttcgaggacctggagcaagcactgcagcagcgcaagcaggctctggtcagcgacctggagaccatttgtggggccaaacagaaggtgttgcaaagccagctggacacactgcgccagggtcaggaacacatcggcagtagctgcagctttgcagagcaggcactgcgcctgggctcggccccggaggtgttgctggtgcgcaagcacatgcgagagcggctggctgcattggcggcacaggccttcccggagcggccacatgagaatgcacagctggaactggtccttgaggtggacggtctgcggcgatcggtgctcaatctgggcgcactgctcaccacgagcgccactgcacacgaaacggtggccacgggagagggcctgcgccaggcgctagtgggccagcctgcctcgctcactgtcactaccaaagacaaggacgggcggttggtgcgcacaggcagcgctgagctgcgtgcagagatcaccggcccggacggcacgcgccttccggtgccagtggtggaccacaagaatggcagtcgtggaagggagaaaggtgaattcaccaatttacaaggtgaattcaccaatttacaaggtgtgtccgcagccagcagcggccgcatcgtggtagcagacagcaacaaccagtgtattcaggttttctccaatgagggccagttcaagttccgttttggggtccgaggacgctcacctgggcagctgcagcgccccacaggtgtggcagtggacaccaatggagacataattgtggcagactatgacaaccgttgggtcagcatcttctcccctgagggcaagttcaagaccaagattggagctggccgcctcatgggccccaagggagtggccgtagaccggaatggacatatcattgtggtcgacaacaagtcttgctgcgtctttaccttccagcccaatggcaaactggttggccgttttgggggccgtggggccactgaccgccactttgcagggccccattttgtggctgtgaagcaacaagaatgaagttgtagtaacggacttccataaccattcagtgaaggtgtacagtgccgatggagagttcctcttcaagtttggctcccatggcgagggcaatgggcagttcaatgcccccacaggagtagctgtggactccaatggaaacatcattgtggctgactggggcaacagccgcatccaggtattcgacagctctggctccttcctgtcctatatcaacacatctgcagaaccactgtatggtccacagggcctggcactgacctcggatggccatgtggtggtggctgatgctggcaaccactgctttaaagcctatcgctacctccagtagctgtacagaggccctgcctggcttgtggagggacagacattggggtgattggacaagagggtctggctgggaggtgggccagacctggcagcactgaatgtgggctgtgggcatgggtgcacccggtgccctccctctcctacccccacccccacggttgcactttatttattcggttcttgctttggtgactgggtgagcctggactgtggtcccaaggatgtgtgcagagcttcaccctacccttcttacacacctccccacccctgtcagtctgctccccatcccccagcctggggccagaacagcctaccccaggacaggagtccctctagttgtctccctaccaccctatacacactgacagagacagcaataccccaccccccatattaaataaatgtcttcaccaagaaa

SEQ ID NO: 466911 - DNA, 2867 bp, Homo sapiens
ggccggtccgcagccccgccccggcccctccctccggcctgtgcggctagtccggcggcggcgccggcgcggggacaggcggaggcgcgggcagggccgggcggacgggcgctggcagcagtagcagcgccgcgggcccttcagagtggccgcagtccgagctttgccctcgcatcctgttccaacgcgaggctggtgtgagtggcgggagccatctgtgggcgccatggcaaagagggaggacagccctggcccagaggtccagccaatggacaagcagttcctggtatgcagcatctgcctggatcggtaccagtgccccaaggttcttccttgcctgcacaccttctgtgagagatgtctccaaaactatatccctgcccagagcctgacgctatcctgtccagtatgccggcagacgtccatcctcccagagcagggcgtctcggcactgcagaacaacttcttcatcagcagcctcatggaggcaatgcagcaggcacctgatggggcccacgacccggaggacccccaccccctcagtgtagtggctggccgccctctctcctgccccaaccatgaaggcaagacgatggagttttactgtgaggcctgtgagacggccatgtgtggtgagtgccgcgccggggagcatcgtgagcagcacaaggcggccctgcagcgccagctcgaggctgtgcgtggccgattgccacagctgtccgcagcaattgccttagtcgggggcatcagccagcagctgcaggagcgcaaggcagaggccctggcccagatcagtgcagcgttcgaggacctggagcaagcactgcagcagcgcaagcaggctctggtcagcgacctggagaccatttgtggggccaaacagaaggtgttgcaaagccagctggacacactgcgccagggtcaggaacacatcggcagtagctgcagctttgcagagcaggcactgcgcctgggctcggccccggaggtgttgctggtgcgcaagcacatgcgagagcggctggctgcattggcggcacaggccttcccggagcggccacatgagaatgcacagctggaactggtccttgaggtggacggtctgcggcgatcggtgctcaatctgggcgcactgctcaccacgagcgccactgcacacgaaacggtggccacgggagagggcctgcgccaggcgctagtgggccagcctgcctcgctcactgtcactaccaaagacaaggacgggcggttggtgcgcacaggcagcgctgagctgcgtgcagagatcaccggcccggacggcacgcgccttccggtgccagtggtggaccacaagaatggcacatatgagctagtgtacacagcgcgcacggaaggcgagctgctcctctcggtgctgctctacggacagccagtgcgcggcagccccttccgcgtgcgtgccctgcgtccgggggacctgccaccttccccggacgatgtgaagcgccgtgtcaagtcccctggcggccccggcagccatgtgcgccagaaggcagtgcgtaggcccagctccatgtacagcacaggcggcaaacgaaaggacaacccaattgaggatgagctcgtcttccgtgttggcagtcgtggaagggagaaaggtgaattcaccaatttacaaggtgaattcaccaatttacaaggtgtgtccgcagccagcagcggccgcatcgtggtagcagacagcaacaaccagtgtattcaggttttctccaatgagggccagttcaagttccgttttggggtccgaggacgctcacctgggcagctgcagcgccccacaggtgtggcagtggacaccaatggagacataattgtggcagactatgacaaccgttgggtcagcatcttctcccctgagggcaagttcaagaccaagattggagctggccgcctcatgggccccaagggagtggccgtagaccggaatggacatatcattgtggtcgacaacaagtcttgctgcgtctttaccttccagcccaatggcaaactggttggccgttttgggggccgtggggccactgaccgccactttgcagggccccattttgtggctgtgaagcaacaagaatgaagttgtagtaacggacttccataaccattcagtgaaggtgtacagtgccgatggagagttcctcttcaagtttggctcccatggcgagggcaatgggcagttcaatgcccccacaggagtagctgtggactccaatggaaacatcattgtggctgactggggcaacagccgcatccaggtattcgacagctctggctccttcctgtcctatatcaacacatctgcagaaccactgtatggtccacagggcctggcactgacctcggatggccatgtggtggtggctgatgctggcaaccactgctttaaagcctatcgctacctccagtagctgtacagaggccctgcctggcttgtggagggacagacattggggtgattggacaagagggtctggctgggaggtgggccagacctggcagcactgaatgtgggctgtgggcatgggtgcacccggtgccctccctctcctacccccacccccacggttgcactttatttattcggttcttgctttggtgactgggtgagcctggactgtggtcccaaggatgtgtgcagagcttcaccctacccttcttacacacctccccacccctgtcagtctgctccccatcccccagcctggggccagaacagcctaccccaggacaggagtccctctagttgtctccctaccaccctatacacactgacagagacagcaataccccaccccccatattaaataaatgtcttcaccaagaaa

SEQ ID NO: 466912 - DNA, 1175 bp, Homo sapiens
  misc_feature (1)..(1): n is a, c, g, or t
nttcaggacgcatcttcggtaacatttagcacacgtcgcaatgccttcttggtctcttcagtcgtaaggccataccgaagtacctgtgatgggggtccgaggacgctcacctgggcagctgcagcgccccacaggtgtggcagtggacaccaatggagacataattgtggcagactatgacaaccgttgggtcagcatcttctcccctgagggcaagttcaagaccaagattggagctggccgcctcatgggccccaagggagtggccgtagaccggaatggacatatcattgtggtcgacaacaagtcttgctgcgtctttaccttccagcccaatggcaaactggttggccgttttgggggccgtggggccactgaccgccactttgcagggccccattttgtggctgtgaagcaacaagaatgaagttgtagtaacggacttccataaccattcagtgaaggtgtacagtgccgatggagagttcctcttcaagtttggctcccatggcgagggcaatgggcagttcaatgcccccacaggagtagctgtggactccaatggaaacatcattgtggctgactggggcaacagccgcatccaggtattcgacagctctggctccttcctgtcctatatcaacacatctgcagaaccactgtatggtccacagggcctggcactgacctcggatggccatgtggtggtggctgatgctggcaaccactgctttaaagcctatcgctacctccagtagctgtacagaggccctgcctggcttgtggagggacagacattggggtgattggacaagagggtctggctgggaggtgggccagacctggcagcactgaatgtgggctgtgggcatgggtgcacccggtgccctccctctcctacccccacccccacggttgcactttatttattcggttcttgctttggtgactgggtgagcctggactgtggtcccaaggatgtgtgcagagcttcaccctacccttcttacacacctccccacccctgtcagtctgctccccatcccccagcctggggccagaacagcctaccccaggacaggagtccctctagttgtctccctaccaccctatacacactgacagagacagcaataccccaccccccatattaaataaatgtcttcaccaagaaa

SEQ ID NO: 466913 - DNA, 584 bp, Homo sapiens
gcacacgaaacggtggccacgggagagggcctgcgccaggcgctagtgggccagcctgcctcgctcactgtcactaccaaagacaaggacgggcggttggtgcgcacaggcagcgctgagctgcgtgcagagatcaccggcccggacggcacgcgccttccggtgccagtggtggaccacaagaatggcacatatgagctagtgtacacagcgcgcacggaaggcgagctgctcctctcggtgctgctctacggacagccagtgcgcggcagccccttccgcgtgcgtgccctgcgtccgggggacctgccaccttccccggacgatgtgaagcgccgtgtcaagtcccctggcggccccggcagccatgtgcgccagaaggcagtgcgtaggcccagctccatgtacagcacaggcggcaaacgaaaggacaacccaattgaggatgagctcgtcttccgtgttggcagtcgtggaagggagagccagatgggccaggctcaggtagtgggtggggagggaagggaggttcaagatgacctctgaatgaattattttgttttccctcctgtcccttcccacag

SEQ ID NO: 466914 - DNA, 258 bp, Homo sapiens
tgtttgattttgtcagtaagtgcttgttgaatgactgaataaatggtggtgggggggtctcctccctcaggatcctactcccttctgtctgtgcccacagtgtctcccctcctacctgctccctccccttgctcctctgctccaggttttctccaatgagggccagttcaagttccgttttggggtccgaggacgctcacctgggcagctgcagcgccccacaggtgtggcagtggacaccaatggagacataattgt

SEQ ID NO: 466915 - DNA, 1026 bp, Homo sapiens
ctaccggaggtagcgataggctctaaagcagtggttgccagcatcagccaccaccacacggccatccgaggtcagtgccaggcactgcggaacatacagtggcacagagagatgggctcgaaaaaggacaggaaggaaccagagctgtcgaactaccaggatgcgcctgtcgccccagtcaacccaatggcaaactggttggccgttttgggggccgtggggccactgaccgccactttgcagggccccattttgtggctgtgaagcaacaagaatgaagttgtagtaacggacttccataaccattcagtgaaggtgtacagtgccgatggagagttcctcttcaagtttggctcccatggcgagggcaatgggcagttcaatgcccccacaggagtagctgtggactccaatggaaacatcattgtggctgactggggcaacagccgcatccaggtattcgacagctctggctccttcctgtcctatatcaacacatctgcagaaccactgtatggtccacagggcctggcactgacctcggatggccatgtggtggtggctgatgctggcaaccactgctttaaagcctatcgctacctccagtagctgtacagaggccctgcctggcttgtggagggacagacattggggtgattggacaagagggtctggctgggaggtgggccagacctggcagcactgaatgtgggctgtgggcatgggtgcacccggtgccctccctctcctacccccacccccacggttgcactttatttattcggttcttgctttggtgactgggtgagcctggactgtggtcccaaggatgtgtgcagagcttcaccctacccttcttacacacctccccacccctgtcagtctgctccccatcccccagcctggggccagaacagcctaccccaggacaggagtccctctagttgtctccctaccaccctatacacactgacagagacagcaataccccaccccccatattaaataaatgtcttcaccaagaaa

SEQ ID NO: 466916 - DNA, 1792 bp, Homo sapiens
  misc_feature (1755)..(1755): n is a, c, g, or t
  misc_feature (1771)..(1771): n is a, c, g, or t
ggccggtccgcagccccgccccggcccctccctccggcctgtgcggctagtccggcggcggcgccggcgcggggacaggcggaggcgcgggcagggccgggcggacgggcgctggcagcagtagcagcgccgcgggcccttcagagtggccgcagtccgagctttgccctcgcatcctgttccaacgcgaggctggtgtgagtggcgggagccatctgtgggcgccatggcaaagagggaggacagccctggcccagaggtccagccaatggacaagcagttcctggtatgcagcatctgcctggatcggtaccagtgccccaaggttcttccttgcctgcacaccttctgtgagagatgtctccaaaactatatccctgcccagagcctgacgctatcctgtccagtatgccggcagacgtccatcctcccagagcagggcgtctcggcactgcagaacaacttcttcatcagcagcctcatggaggcaatgcagcaggcacctgatggggcccacgacccggaggacccccaccccctcagtgtagtggctggccgccctctctcctgccccaaccatgaaggcaagacgatggagttttactgtgaggcctgtgagacggccatgtgtggtgagtgccgcgccggggagcatcgtgagcatggcacagtgctgctgagggatgtggtggagcagcacaaggcggccctgcagcgccagctcgaggctgtgcgtggccgattgccacagctgtccgcagcaattgccttagtcgggggcatcagccagcagctgcaggagcgcaaggcagaggccctggcccagatcagtgcagcgttcgaggacctggagcaagcactgcagcagcgcaagcaggctctggtcagcgacctggagaccatttgtggggccaaacagaaggtgttgcaaagccagctggacacactgcgccagggtcaggaacacatcggcagtagctgcagctttgcagagcaggcactgcgcctgggctcggccccggaggtgttgctggtgcgcaagcacatgcgagagcggctggctgcattggcggcacaggccttcccggagcggccacatgagaatgcacagctggaactggtccttgaggtggacggtctgcggcgatcggtgctcaatctgggcgcactgctcaccacgagcgccactgcacacgaaacggtggccacgggagagggcctgcgccaggcgctagtgggccagcctgcctcgctcactgtcactaccaaagacaaggacgggcggttggtgcgcacaggcagcgctgagctgcgtgcagagatcaccggcccggacggcacgcgccttccggtgccagtggtggaccacaagaatggcacatatgagctagtgtacacagcgcgcacggaaggcgagctgctcctctcggtgctgctctacggacagccagtgcgcggcagccccttccgcgtgcgtgccctgcgtccgggggacctgccaccttccccggacgatgtgaagcgccgtgtcaagtcccctggcggccccggcagccatgtgcgccagaaggcagtgcgtaggcccagctccatgtacagcacaggcggcaaacgaaaggacaacccaattgaggatgagctcgtcttccgtgttggcagtcgtggaagggagaaaggtgaattcaccaatttacaaggtgttgttccgcagccagcagcggccgcaagtttatttccttttagttgagggtttanttttagtttggcattnggccttgtttttacaacgttg

SEQ ID NO: 466917 - DNA, 2191 bp, Homo sapiens
ggccggtccgcagccccgccccggcccctccctccggcctgtgcggctagtccggcggcggcgccggcgcggggacaggcggaggcgcgggcagggccgggcggacgggcgctggcagcagtagcagcgccgcgggcccttcagagtggccgcagtccgagctttgccctcgcatcctgttccaacgcgaggctggtgtgagtggcgggagccatctgtgggcgccatggcaaagagggaggacagccctggcccagaggtccagccaatggacaagcagttcctggtatgcagcatctgcctggatcggtaccagtgccccaaggttcttccttgcctgcacaccttctgtgagagatgtctccaaaactatatccctgcccagagcctgacgctatcctgtccagtatgccggcagacgtccatcctcccagagcagggcgtctcggcactgcagaacaacttcttcatcagcagcctcatggaggcaatgcagcaggcacctgatggggcccacgacccggaggacccccaccccctcagtgtagtggctggccgccctctctcctgccccaaccatgaaggcaagacgatggagttttactgtgaggcctgtgagacggccatgtgtggtgagtgccgcgccggggagcatcgtgagcatggcacagtgctgctgagggatgtggtggagcagcacaaggcggccctgcagcgccagctcgaggctgtgcgtggccgattgccacagctgtccgcagcaattgccttagtcgggggcatcagccagcagctgcaggagcgcaaggcagaggccctggcccagatcagtgcagcgttcgaggacctggagcaagcactgcagcagcgcaagcaggctctggtcagcgacctggagaccatttgtggggccaaacagaaggtgttgcaaagccagctggacacactgcgccagggtcaggaacacatcggcagtagctgcagctttgcagagcaggcactgcgcctgggctcggccccggaggtgttgctggtgcgcaagcacatgcgagagcggctggctgcattggcggcacaggccttcccggagcggccacatgagaatgcacagctggaactggtccttgaggtggacggtctgcggcgatcggtgctcaatctgggcgcactgctcaccacgagcgccactgcacacgaaacggtggccacgggagagggcctgcgccaggcgctagtgggccagcctgcctcgctcactgtcactaccaaagacaaggacgggcggttggtgcgcacaggcagcgctgagctgcgtgcagagatcaccggcccggacggcacgcgccttccggtgccagtggtggaccacaagaatggcacatatgagctagtgtacacagcgcgcacggaaggcgagctgctcctctcggtgctgctctacggacagccagtgcgcggcagccccttccgcgtgcgtgccctgcgtccgggggacctgccaccttccccggacgatgtgaagcgccgtgtcaagtcccctggcggccccggcagccatgtgcgccagaaggcagtgcgtaggcccagctccatgtacagcacaggcggcaaacgaaaggacaacccaattgaggatgagctcgtcttccgtgttggcagtcgtggaagggagaaaggtgaattcaccaatttacaaggtgtgtccgcagccagcagcggccgcatcgtggtagcagacagcaacaaccagtgtattcaggttttctccaatgagggccagttcaagttccgttttggggtccgaggacgctcacctgggcagctgcagcgccccacaggtgtggcagtggacaccaatggagacataattgtggcagactatgacaaccgttgggtcagcatcttctcccctgagggcaagttcaagaccaagattggagctggccgcctcatgggccccaagggagtggccgtagaccggaatggacatatcattgtggtcgacaacaagtcttgctgcgtctttaccttccagcccaatggcaaactggttggccgttttgggggccgtggggccactgaccgccactttgcaggtatagggggacagctccaagatctatgctgatacccctgttccagagaactcccctagataccccagctgtaaaggccctctcctcctatatct

SEQ ID NO: 466918 - DNA, 2864 bp, Homo sapiens
gcgacgggcgggccccaagggtgcgtttgtattcctgtcagcccgggtctgggtcggagcgtctgtgggtgggggcacagatgattttcaaaagctgtgcctctctctgcccacgtgaggcgtgtccatgtccgtgagagcagcagggggattcttcgggctgtggctgctcacaggctggtgtgagtggcgggagccatctgtgggcgccatggcaaagagggaggacagccctggcccagaggtccagccaatggacaagcagttcctggtatgcagcatctgcctggatcggtaccagtgccccaaggttcttccttgcctgcacaccttctgtgagagatgtctccaaaactatatccctgcccagagcctgacgctatcctgtccagtatgccggcagacgtccatcctcccagagcagggcgtctcggcactgcagaacaacttcttcatcagcagcctcatggaggcaatgcagcaggcacctgatggggcccacgacccggaggacccccaccccctcagtgtagtggctggccgccctctctcctgccccaaccatgaaggcaagacgatggagttttactgtgaggcctgtgagacggccatgtgtggtgagtgccgcgccggggagcatcgtgagcatggcacagtgctgctgagggatgtggtggagcagcacaaggcggccctgcagcgccagctcgaggctgtgcgtggccgattgccacagctgtccgcagcaattgccttagtcgggggcatcagccagcagctgcaggagcgcaaggcagaggccctggcccagatcagtgcagcgttcgaggacctggagcaagcactgcagcagcgcaagcaggctctggtcagcgacctggagaccatttgtggggccaaacagaaggtgttgcaaagccagctggacacactgcgccagggtcaggaacacatcggcagtagctgcagctttgcagagcaggcactgcgcctgggctcggccccggaggtgttgctggtgcgcaagcacatgcgagagcggctggctgcattggcggcacaggccttcccggagcggccacatgagaatgcacagctggaactggtccttgaggtggacggtctgcggcgatcggtgctcaatctgggcgcactgctcaccacgagcgccactgcacacgaaacggtggccacgggagagggcctgcgccaggcgctagtgggccagcctgcctcgctcactgtcactaccaaagacaaggacgggcggttggtgcgcacaggcagcgctgagctgcgtgcagagatcaccggcccggacggcacgcgccttccggtgccagtggtggaccacaagaatggcacatatgagctagtgtacacagcgcgcacggaaggcgagctgctcctctcggtgctgctctacggacagccagtgcgcggcagccccttccgcgtgcgtgccctgcgtccgggggacctgccaccttccccggacgatgtgaagcgccgtgtcaagtcccctggcggccccggcagccatgtgcgccagaaggcagtgcgtaggcccagctccatgtacagcacaggcggcaaacgaaaggacaacccaattgaggatgagctcgtcttccgtgttggcagtcgtggaagggagaaaggtgaattcaccaatttacaaggtgtgtccgcagccagcagcggccgcatcgtggtagcagacagcaacaaccagtgtattcaggttttctccaatgagggccagttcaagttccgttttggggtccgaggacgctcacctgggcagctgcagcgccccacaggtgtggcagtggacaccaatggagacataattgtggcagactatgacaaccgttgggtcagcatcttctcccctgagggcaagttcaagaccaagattggagctggccgcctcatgggccccaagggagtggccgtagaccggaatggacatatcattgtggtcgacaacaagtcttgctgcgtctttaccttccagcccaatggcaaactggttggccgttttgggggccgtggggccactgaccgccactttgcagggccccattttgtggctgtgaagcaacaagaatgaagttgtagtaacggacttccataaccattcagtgaaggtgtacagtgccgatggagagttcctcttcaagtttggctcccatggcgagggcaatgggcagttcaatgcccccacaggagtagctgtggactccaatggaaacatcattgtggctgactggggcaacagccgcatccaggtattcgacagctctggctccttcctgtcctatatcaacacatctgcagaaccactgtatggtccacagggcctggcactgacctcggatggccatgtggtggtggctgatgctggcaaccactgctttaaagcctatcgctacctccagtagctgtacagaggccctgcctggcttgtggagggacagacattggggtgattggacaagagggtctggctgggaggtgggccagacctggcagcactgaatgtgggctgtgggcatgggtgcacccggtgccctccctctcctacccccacccccacggttgcactttatttattcggttcttgctttggtgactgggtgagcctggactgtggtcccaaggatgtgtgcagagcttcaccctacccttcttacacacctccccacccctgtcagtctgctccccatcccccagcctggggccagaacagcctaccccaggacaggagtccctctagttgtctccctaccaccctatacacactgacagagacagcaataccccaccccccatattaaataaatgtcttcaccaagaaa

SEQ ID NO: 466919 - DNA, 2698 bp, Homo sapiens
ggccggtccgcagccccgccccggcccctccctccggcctgtgcggctagtccggcggcggcgccggcgcggggacaggcggaggcgcgggcagggccgggcggacgggcgctggcagcagtagcagcgccgcgggcccttcagagtggccgcagtccgagctttgccctcgcatcctgttccaacgcgaggctggtgtgagtggcgggagccatctgtgggcgccatggcaaagagggaggacagccctggcccagaggtccagccaatggacaagcagttcctggtatgcagcatctgcctggatcggtaccagtgccccaaggttcttccttgcctgcacaccttctgtgagagatgtctccaaaactatatccctgcccagagcctgacgctatcctgtccagtatgccggcagacgtccatcctcccagagcagggcgtctcggcactgcagaacaacttcttcatcagcagcctcatggaggcaatgcagcaggcacctgatggggcccacgacccggaggacccccaccccctcagtgtagtggctggccgccctctctcctgccccaaccatgaaggcaagacgatggagttttactgtgaggcctgtgagacggccatgtgtggtgagtgccgcgccggggagcatcgtgagcatggcacagtgctgctgagggatgtggtggagcagcacaaggcggccctgcagcgccagctcgaggctgtgcgtggccgattgccacagctgtccgcagcaattgccttagtcgggggcatcagccagcagctgcaggagcgcaaggcagaggccctggcccagatcagtgcagcgttcgaggacctggagcaagcactgcagcagcgcaagcaggctctggtcagcgacctggagaccatttgtggggccaaacagaaggtgttgcaaagccagctggacacactgcgccagggtcaggaacacatcggcagtagctgcagctttgcagagcaggcactgcgcctgggctcggccccggaggtgttgctggtgcgcaagcacatgcgagagcggctggctgcattggcggcacaggccttcccggagcggccacatgagaatgcacagctggaactggtccttgaggtggacggtctgcggcgatcggtgctcaatctgggcgcactgctcaccacgagcgccactgcacacgaaacggtggccacgggagagggcctgcgccaggcgctagtgggccagcctgcctcgctcactgtcactaccaaagacaaggacgggcggttggtgcgcacaggcagcgctgagctgcgtgcagagatcaccggcccggacggcacgcgccttccggtgccagtggtggaccacaagaatggcacatatgagctagtgtacacagcgcgcacggaaggcgagctgctcctctcggtgctgctctacggacagccagtgcgcggcagccccttccgcgtgcgtgccctgcgtccgggggacctgccaccttccccggacgatgtgaagcgccgtgtcaagtcccctggcggccccggcagccatgtgcgccagaaggcagtgcgtaggcccagctccatgtacagcacaggcggcaaacgaaaggacaacccaattgaggatgagctcgtcttccgtgttggcagtcgtggaagggagaaaggtgaattcaccaatttacaaggtgtgtccgcagccagcagcggccgcatcgtggtagcagacagcaacaaccagtgtattcaggttttctccaatgagggccagttcaagttccgttttggggtccgaggacgctcacctgggcagctgcagcgccccacaggtgtggcagtggacaccaatggagacataattgtggcagactatgacaaccgttgggtcagcatcttctcccctgagggcaagttcaagaccaagattggagctggccgcctcatgggccccaagggagtggccgtagaccggaatggacatatcattgtggtcgacaacaagtcttgctgcgtctttaccttccagcccaatggcaaactggttggccgttttgggggccgtggggccactgaccgccactttgcagggccccattttgtggctgtgaagcaacaagaatgaagttgtagtaacggacttccataaccattcagtgaaggtgtacagtgccgatggagagttcctcttcaagtttggctcccatggcgagggcaatgggcagttcaatgcccccacaggagtagctgtggactccaatggaaacatcattgtggctgactggggcaacagccgcatccaggtattcgacagctctggctccttcctgtcctatatcaacacatctgcagaaccactgtatggtccacagggcctggcactgacctcggatggccatgtggtggtggctgatgctggcaaccactgctttaaagcctatcgctacctccagtagctgtacagaggccctgcctggcttgtggagggacagacattggggtgattggacaagagggtctggctgggaggtgggccagacctggcagcactgaatgtgggctgtgggcatggccgtcctcggtgcccacgtcttttatcactctatatccgtcttatctctctctactacacctatcttcacactacttttattctcaccattctctctcgatcctcctatagcttacctat

SEQ ID NO: 466920 - DNA, 3443 bp, Homo sapiens
gggcgttgtcttcacagagctccacgcaggagatcggtgaggagctgatcaacggagtcatctactccatctccctgcgcaaggtgcagctgcaccacggaggcaacaaggggcagcgctggctcgggtatgagaatgagtcggccctgaacctttatgagacttgcaaggtgcggaccgtgaaggctggcacgctggagaagctggtggagcacctggtgccagccttccagggcagcgacctctcctacgtcaccatcttcctgtgtacctatagagccttcaccaccacccaacaggtcctggacctgctgttcaaaaggtacggtagatgtgacgccctcacggctcctctagatacggctgcatcctcccctattccgacgaggatggtggaccccaggaccaacttaaaaatgccatctcctccatcctgggcacctggctggaccagtactcggaggatttctgtcaacctccggactttccctgcctcaagcagctggtggcctacgtgcagctcaacatgccaggctcagacctggagcgccgtgcccaccttctcctggcccagctggagcactcggaacccattgaggcagagcctgaggctctgtcaccagtgccagctctaaaaccaactccagagctcgagctagctctaacaccagctcgagcacccagcccagtgccggctccagccccggagccagagccagctccaacaccagctccaggttcagagctagaagtagctccagcaccagctccggagctccagcaggctccagagccagctgtgggactagaatcggctccagcgccagctctggaactagagccagctccagaacaggatccagctccctcacaaactctagagctggagccagctccagcgccagttccatcattacagccttcctggccttcacctgtggttgcagagaacgggctgagtgaggagaagcctcacctcttggtgttccctccagatctggtggcagagcagtttacactgatggatgcggaactgttcaagaaggtggtgccctaccactgcctgggctccatctggtcccagcgggacaagaagggcaaggagcacctggcgcccaccatccgcgccactgtcacccagttcaacagtgtggccaactgtgtcatcaccacctgcctcgggaaccgaagcacgaaagccccagacagggccagggtggtggagcactggatcgaggtggccagggagtgccggatcctcaagaacttctcgtcactgtatgccatcctctcggccctgcagagcaactccatccaccgtctgaagaagacgtgggaagacgtttccagggacagtttccggatctttcagaagctgtcagagatcttctcagatgagaacaactactcattgagccgggagctgctcatcaaggagggcacctccaagtttgccaccctggagatgaaccccaagagagcccagaaacggccgaaggagacgggcatcatccagggcaccgttccctacctgggcacgttcctcaccgacctggtgatgctggacactgccatgaaggactatctgtatggcagactcatcaactttgagaagaggaggaaggagttcgaggtgatcgcccagatcaagctgctgcagtcggcctgcaacaactacagcatcgcgccagatgagcaatttggggcctggttccgggccgtggagcggctcagcgagactgagagctacaacctgtcgtgcgagctggagcccccatccgagtcagccagcaacaccctcaggaccaagaagaacacagccattgtcaagcgctggagcgaccgccaggcccccagcactgagctcagtaccagtggcagctcccactccaagtcctgtgaccagctcaggtgtggcccctacctcagcagcggggacatcgctgacgcgctcagcgtgcactcggccggctcctctagctccgacgtggaggagatcaacatcagcttcgtcccggagtctcctgatggccaggaaaagaagttctgggaatcagcctcacagtcatccccggagacctccggcatcagctcagcctccagcagcacctcgtcctcctcagcctccaccacgcccgtggctgccacacgcacccacaagcgctctgtctcagggctctgcaactccagctccgcgctgccgctctacaaccagcaggtgggcgactgctgtatcatccgcgtcagcctggacgtggacaatggcaacatgtacaagagcatcctggtgaccagccaagataaggctccggctgtaatccgcaaggccatggacaaacacaacctggaggaggaggagccggaggactatgagctgctgcagattctctcagatgaccggaagctgaagatccctgaaaacgccaacgtcttctatgccatgaactctaccgccaactatgactttgtcctgaagaagcggaccttcaccaagggagtgaaggtcaagcacggagccagctccaccctccctcgcatgaagcagaaaggactcaagattgccaagggcatcttctgagggcatcctcccagggtctggctggctggtagccaagcacttatggaccagagtggcccaggccagctgggcgccttcctcccacctgccagcccagggtaccccagactccagtttcatcctgaacctctcccgctgctgggattgacgcctgccattggtcaggctgacctggcctcccgtggaccactcgctgccttaggtgccttctgctctctggaaccagaggactagctgacttttgccaaggagcagtgccaacgggcatggcatggtgccctgcctgcccccgggcgccacctctgtacacttccctgacaccttcccaggtgtgggtcactgccacctgtgcccatgggcaccccagagcacccactgtgaccactgcagttctctcatgcccacaggcactggcctgtgaccttcgcaggggtcccggcccctcccaccactctagcctttctcaggctgcaccaaagattccatcatcagggccaactgagagtgagggagtctcacccaccgcttaccccagccctcccctgggagcagagagagaaaccctcttcatggaccagactctgcacccggtgagtgaggacagtcccagctgagtcccatcgatgttgaatctcatgccactgcaagtgccattcaccactgcgtcctgggctttacgagaccatgcaagacgggggttagtgaggaaggaggatttggggtgggggtggggtgattgaatatttgtataaaaagcaaaaagaaaaaaaaaatgtttgtttactgattggggaggggcaatatttatttgttgtaaatagcaaatgctagacttgaatattatattaaaatcctgtttctacta

SEQ ID NO: 466921 - DNA, 3518 bp, Homo sapiens
  misc_feature (230)..(230): n is a, c, g, or t
gggcgttgtcttcacagagctccacgcaggagatcggtgaggagctgatcaacggagtcatctactccatctccctgcgcaaggtgcagctgcaccacggaggcaacaaggggcagcgctggctcgggagctccacgcaggagatcggtgaggagctgatcaacggagtcatctactccatctccccgcgcaagtgcagctgcaccacggaggcaacaaggggcagcgcnggctcgggtatgagaatgagtcggccctgaacctttatgagacttgcaaggtgcggaccgtgaaggctggcacgctggagaagctggtggagcacctggtgccagccttccagggcagcgacctctcctacgtcaccatcttcctgtgtacctatagagccttcaccaccacccaacaggtcctggacctgctgttcaaaagatacggctgcatcctcccctattccgacgaggatggtggaccccaggaccaacttaaaaatgccatctcctccatcctgggcacctggctggaccagtactcggaggatttctgtcaacctccggactttccctgcctcaagcagctggtggcctacgtgcagctcaacatgccaggctcagacctggagcgccgtgcccaccttctcctggcccagctggagcactcggaacccattgaggcagagcctgaggctctgtcaccagtgccagctctaaaaccaactccagagctcgagctagctctaacaccagctcgagcacccagcccagtgccggctccagccccggagccagagccagctccaacaccagctccaggttcagagctagaagtagctccagcaccagctccggagctccagcaggctccagagccagctgtgggactagaatcggctccagcgccagctctggaactagagccagctccagaacaggatccagctccctcacaaactctagagctggagccagctccagcgccagttccatcattacagccttcctggccttcacctgtggttgcagagaacgggctgagtgaggagaagcctcacctcttggtgttccctccagatctggtggcagagcagtttacactgatggatgcggaactgttcaagaaggtggtgccctaccactgcctgggctccatctggtcccagcgggacaagaagggcaaggagcacctggcgcccaccatccgcgccactgtcacccagttcaacagtgtggccaactgtgtcatcaccacctgcctcgggaaccgaagcacgaaagccccagacagggccagggtggtggagcactggatcgaggtggccagggagtgccggatcctcaagaacttctcgtcactgtatgccatcctctcggccctgcagagcaactccatccaccgtctgaagaagacgtgggaagacgtttccagggacagtttccggatctttcagaagctgtcagagatcttctcagatgagaacaactactcattgagccgggagctgctcatcaaggagggcacctccaagtttgccaccctggagatgaaccccaagagagcccagaaacggccgaaggagacgggcatcatccagggcaccgttccctacctgggcacgttcctcaccgacctggtgatgctggacactgccatgaaggactatctgtatggcagactcatcaactttgagaagaggaggaaggagttcgaggtgatcgcccagatcaagctgctgcagtcggcctgcaacaactacagcatcgcgccagatgagcaatttggggcctggttccgggccgtggagcggctcagcgagactgagagctacaacctgtcgtgcgagctggagcccccatccgagtcagccagcaacaccctcaggaccaagaagaacacagccattgtcaagcgctggagcgaccgccaggcccccagcactgagctcagtaccagtggcagctcccactccaagtcctgtgaccagctcaggtgtggcccctacctcagcagcggggacatcgctgacgcgctcagcgtgcactcggccggctcctctagctccgacgtggaggagatcaacatcagcttcgtcccggagtctcctgatggccaggaaaagaagttctgggaatcagcctcacagtcatccccggagacctccggcatcagctcagcctccagcagcacctcgtcctcctcagcctccaccacgcccgtggctgccacacgcacccacaagcgctctgtctcagggctctgcaactccagctccgcgctgccgctctacaaccagcaggtgggcgactgctgtatcatccgcgtcagcctggacgtggacaatggcaacatgtacaagagcatcctggtgaccagccaagataaggctccggctgtaatccgcaaggccatggacaaacacaacctggaggaggaggagccggaggactatgagctgctgcagattctctcagatgaccggaagctgaagatccctgaaaacgccaacgtcttctatgccatgaactctaccgccaactatgactttgtcctgaagaagcggaccttcaccaagggagtgaaggtcaagcacggagccagctccaccctccctcgcatgaagcagaaaggactcaagattgccaagggcatcttctgagggcatcctcccagggtctggctggctggtagccaagcacttatggaccagagtggcccaggccagctgggcgccttcctcccacctgccagcccagggtaccccagactccagtttcatcctgaacctctcccgctgctgggattgacgcctgccattggtcaggctgacctggcctcccgtggaccactcgctgccttaggtgccttctgctctctggaaccagaggactagctgacttttgccaaggagcagtgccaacgggcatggcatggtgccctgcctgcccccgggcgccacctctgtacacttccctgacaccttcccaggtgtgggtcactgccacctgtgcccatgggcaccccagagcacccactgtgaccactgcagttctctcatgcccacaggcactggcctgtgaccttcgcaggggtcccggcccctcccaccactctagcctttctcaggctgcaccaaagattccatcatcagggccaactgagagtgagggagtctcacccaccgcttaccccagccctcccctgggagcagagagagaaaccctcttcatggaccagactctgcacccggtgagtgaggacagtcccagctgagtcccatcgatgttgaatctcatgccactgcaagtgccattcaccactgcgtcctgggctttacgagaccatgcaagacgggggttagtgaggaaggaggatttggggtgggggtggggtgattgaatatttgtataaaaagcaaaaagaaaaaaaaaatgtttgtttactgattggggaggggcaatatttatttgttgtaaatagcaaatgctagacttgaatattatattaaaatcctgtttctacta

SEQ ID NO: 466922 - DNA, 3402 bp, Homo sapiens
ggagaacaggattagtgggaagatgagacccacacacagctctgagagagtaaggcagctcaccagcactgagctacaagttgaggagccgccagggacctgcagatgcccggcaggaggaccgatccctcatggagtttacattccagcgaggagggggtgctgggagacatgcagagctgtgggcggggcttccttggaggaggggagaggtgttcgccactgaccaggggcctccttggttcttttagctggacagccaagggggcttgggccggggcaggtggccttcagatggacaggggccggctcaggagcccagcctggctcaggggagcccaggcctctgactctgctgccacccacctgtccccagtgccatctcctccatcctgggcacctggctggaccagtactcggaggatttctgtcaacctccggactttccctgcctcaagcagctggtggcctacgtgcagctcaacatgccaggctcagacctggagcgccgtgcccaccttctcctggcccagctggagcactcggaacccattgaggcagagcctgaggctctgtcaccagtgccagctctaaaaccaactccagagctcgagctagctctaacaccagctcgagcacccagcccagtgccggctccagccccggagccagagccagctccaacaccagctccaggttcagagctagaagtagctccagcaccagctccggagctccagcaggctccagagccagctgtgggactagaatcggctccagcgccagctctggaactagagccagctccagaacaggatccagctccctcacaaactctagagctggagccagctccagcgccagttccatcattacagccttcctggccttcacctgtggttgcagagaacgggctgagtgaggagaagcctcacctcttggtgttccctccagatctggtggcagagcagtttacactgatggatgcggaactgttcaagaaggtggtgccctaccactgcctgggctccatctggtcccagcgggacaagaagggcaaggagcacctggcgcccaccatccgcgccactgtcacccagttcaacagtgtggccaactgtgtcatcaccacctgcctcgggaaccgaagcacgaaagccccagacagggccagggtggtggagcactggatcgaggtggccagggagtgccggatcctcaagaacttctcgtcactgtatgccatcctctcggccctgcagagcaactccatccaccgtctgaagaagacgtgggaagacgtttccagggacagtttccggatctttcagaagctgtcagagatcttctcagatgagaacaactactcattgagccgggagctgctcatcaaggagggcacctccaagtttgccaccctggagatgaaccccaagagagcccagaaacggccgaaggagacgggcatcatccagggcaccgttccctacctgggcacgttcctcaccgacctggtgatgctggacactgccatgaaggactatctgtatggcagactcatcaactttgagaagaggaggaaggagttcgaggtgatcgcccagatcaagctgctgcagtcggcctgcaacaactacagcatcgcgccagatgagcaatttggggcctggttccgggccgtggagcggctcagcgagactgagagctacaacctgtcgtgcgagctggagcccccatccgagtcagccagcaacaccctcaggaccaagaagaacacagccattgtcaagcgctggagcgaccgccaggcccccagcactgagctcagtaccagtggcagctcccactccaagtcctgtgaccagctcaggtgtggcccctacctcagcagcggggacatcgctgacgcgctcagcgtgcactcggccggctcctctagctccgacgtggaggagatcaacatcagcttcgtcccggagtctcctgatggccaggaaaagaagttctgggaatcagcctcacagtcatccccggagacctccggcatcagctcagcctccagcagcacctcgtcctcctcagcctccaccacgcccgtggctgccacacgcacccacaagcgctctgtctcagggctctgcaactccagctccgcgctgccgctctacaaccagcaggtgggcgactgctgtatcatccgcgtcagcctggacgtggacaatggcaacatgtacaagagcatcctggtgaccagccaagataaggctccggctgtaatccgcaaggccatggacaaacacaacctggaggaggaggagccggaggactatgagctgctgcagattctctcagatgaccggaagctgaagatccctgaaaacgccaacgtcttctatgccatgaactctaccgccaactatgactttgtcctgaagaagcggaccttcaccaagggagtgaaggtcaagcacggagccagctccaccctccctcgcatgaagcagaaaggactcaagattgccaagggcatcttctgagggcatcctcccagggtctggctggctggtagccaagcacttatggaccagagtggcccaggccagctgggcgccttcctcccacctgccagcccagggtaccccagactccagtttcatcctgaacctctcccgctgctgggattgacgcctgccattggtcaggctgacctggcctcccgtggaccactcgctgccttaggtgccttctgctctctggaaccagaggactagctgacttttgccaaggagcagtgccaacgggcatggcatggtgccctgcctgcccccgggcgccacctctgtacacttccctgacaccttcccaggtgtgggtcactgccacctgtgcccatgggcaccccagagcacccactgtgaccactgcagttctctcatgcccacaggcactggcctgtgaccttcgcaggggtcccggcccctcccaccactctagcctttctcaggctgcaccaaagattccatcatcagggccaactgagagtgagggagtctcacccaccgcttaccccagccctcccctgggagcagagagagaaaccctcttcatggaccagactctgcacccggtgagtgaggacagtcccagctgagtcccatcgatgttgaatctcatgccactgcaagtgccattcaccactgcgtcctgggctttacgagaccatgcaagacgggggttagtgaggaaggaggatttggggtgggggtggggtgattgaatatttgtataaaaagcaaaaagaaaaaaaaaatgtttgtttactgattggggaggggcaatatttatttgttgtaaatagcaaatgctagacttgaatattatattaaaatcctgtttctacta

SEQ ID NO: 466923 - DNA, 3227 bp, Homo sapiens
gggcgttgtcttcacagagctccacgcaggagatcggtgaggagctgatcaacggagtcatctactccatctccctgcgcaaggtgcagctgcaccacggaggcaacaaggggcagcgctggctcgggtatgagaatgagtcggccctgaacctttatgagacttgcaaggtgcggaccgtgaaggctggcacgctggagaagctggtggagcacctggtgccagccttccagggcagcgacctctcctacgtcaccatcttcctgtgtacctatagagccttcaccaccacccaacaggtcctggacctgctgttcaaaaggtacggtagatgtgacgccctcacggctcctctagatacggctgcatcctcccctattccgacgaggatggtggaccccaggaccaacttaaaaatgccatctcctccatcctgggcacctggctggaccagtactcggaggatttctgtcaacctccggactttccctgcctcaagcagctggtggcctacgtgcagctcaacatgccaggctcagacctggagcgccgtgcccaccttctcctggcccagctggagcactcggaacccattgaggcagagcctgaggctctgtcaccagtgccagctctaaaaccaactccagagctcgagctagctctaacaccagctcgagcacccagcccagtgccggctccagccccggagccagagccagctccaacaccagctccaggttcagagctagaagtagctccagcaccagctccggagctccagcaggctccagagccagctgtgggactagaatcggctccagcgccagctctggaactagagccagctccagaacaggatccagctccctcacaaactctagagctggagccagctccagcgccagttccatcattacagccttcctggccttcacctgtggttgcagagaacgggctgagtgaggagaagcctcacctcttggtgttccctccagatctggtggcagagcagtttacactgatggatgcggagtgccggatcctcaagaacttctcgtcactgtatgccatcctctcggccctgcagagcaactccatccaccgtctgaagaagacgtgggaagacgtttccagggacagtttccggatctttcagaagctgtcagagatcttctcagatgagaacaactactcattgagccgggagctgctcatcaaggagggcacctccaagtttgccaccctggagatgaaccccaagagagcccagaaacggccgaaggagacgggcatcatccagggcaccgttccctacctgggcacgttcctcaccgacctggtgatgctggacactgccatgaaggactatctgtatggcagactcatcaactttgagaagaggaggaaggagttcgaggtgatcgcccagatcaagctgctgcagtcggcctgcaacaactacagcatcgcgccagatgagcaatttggggcctggttccgggccgtggagcggctcagcgagactgagagctacaacctgtcgtgcgagctggagcccccatccgagtcagccagcaacaccctcaggaccaagaagaacacagccattgtcaagcgctggagcgaccgccaggcccccagcactgagctcagtaccagtggcagctcccactccaagtcctgtgaccagctcaggtgtggcccctacctcagcagcggggacatcgctgacgcgctcagcgtgcactcggccggctcctctagctccgacgtggaggagatcaacatcagcttcgtcccggagtctcctgatggccaggaaaagaagttctgggaatcagcctcacagtcatccccggagacctccggcatcagctcagcctccagcagcacctcgtcctcctcagcctccaccacgcccgtggctgccacacgcacccacaagcgctctgtctcagggctctgcaactccagctccgcgctgccgctctacaaccagcaggtgggcgactgctgtatcatccgcgtcagcctggacgtggacaatggcaacatgtacaagagcatcctggtgaccagccaagataaggctccggctgtaatccgcaaggccatggacaaacacaacctggaggaggaggagccggaggactatgagctgctgcagattctctcagatgaccggaagctgaagatccctgaaaacgccaacgtcttctatgccatgaactctaccgccaactatgactttgtcctgaagaagcggaccttcaccaagggagtgaaggtcaagcacggagccagctccaccctccctcgcatgaagcagaaaggactcaagattgccaagggcatcttctgagggcatcctcccagggtctggctggctggtagccaagcacttatggaccagagtggcccaggccagctgggcgccttcctcccacctgccagcccagggtaccccagactccagtttcatcctgaacctctcccgctgctgggattgacgcctgccattggtcaggctgacctggcctcccgtggaccactcgctgccttaggtgccttctgctctctggaaccagaggactagctgacttttgccaaggagcagtgccaacgggcatggcatggtgccctgcctgcccccgggcgccacctctgtacacttccctgacaccttcccaggtgtgggtcactgccacctgtgcccatgggcaccccagagcacccactgtgaccactgcagttctctcatgcccacaggcactggcctgtgaccttcgcaggggtcccggcccctcccaccactctagcctttctcaggctgcaccaaagattccatcatcagggccaactgagagtgagggagtctcacccaccgcttaccccagccctcccctgggagcagagagagaaaccctcttcatggaccagactctgcacccggtgagtgaggacagtcccagctgagtcccatcgatgttgaatctcatgccactgcaagtgccattcaccactgcgtcctgggctttacgagaccatgcaagacgggggttagtgaggaaggaggatttggggtgggggtggggtgattgaatatttgtataaaaagcaaaaagaaaaaaaaaatgtttgtttactgattggggaggggcaatatttatttgttgtaaatagcaaatgctagacttgaatattatattaaaatcctgtttctacta

SEQ ID NO: 466924 - DNA, 3409 bp, Homo sapiens
  misc_feature (1707)..(1708): n is a, c, g, or t
  misc_feature (1710)..(1710): n is a, c, g, or t
  misc_feature (1713)..(1713): n is a, c, g, or t
  misc_feature (1715)..(1716): n is a, c, g, or t
  misc_feature (1720)..(1721): n is a, c, g, or t
  misc_feature (1724)..(1725): n is a, c, g, or t
gggcgttgtcttcacagagctccacgcaggagatcggtgaggagctgatcaacggagtcatctactccatctccctgcgcaaggtgcagctgcaccacggaggcaacaaggggcagcgctggctcgggtatgagaatgagtcggccctgaacctttatgagacttgcaaggtgcggaccgtgaaggctggcacgctggagaagctggtggagcacctggtgccagccttccagggcagcgacctctcctacgtcaccatcttcctgtgtacctatagagccttcaccaccacccaacaggtcctggacctgctgttcaaaaggtacggtagatgtgacgccctcacggctcctctagatacggctgcatcctcccctattccgacgaggatggtggaccccaggaccaacttaaaaatgccatctcctccatcctgggcacctggctggaccagtactcggaggatttctgtcaacctccggactttccctgcctcaagcagctggtggcctacgtgcagctcaacatgccaggctcagacctggagcgccgtgcccaccttctcctggcccagctggagcactcggaacccattgaggcagagcctgaggctctgtcaccagtgccagctctaaaaccaactccagagctcgagctagctctaacaccagctcgagcacccagcccagtgccggctccagccccggagccagagccagctccaacaccagctccaggttcagagctagaagtagctccagcaccagctccggagctccagcaggctccagagccagctgtgggactagaatcggctccagcgccagctctggaactagagccagctccagaacaggatccagctccctcacaaactctagagctggagccagctccagcgccagttccatcattacagccttcctggccttcacctgtggttgcagagaacgggctgagtgaggagaagcctcacctcttggtgttccctccagatctggtggcagagcagtttacactgatggatgcggaactgttcaagaaggtggtgccctaccactgcctgggctccatctggtcccagcgggacaagaagggcaaggagcacctggcgcccaccatccgcgccactgtcacccagttcaacagtgtggccaactgtgtcatcaccacctgcctcgggaaccgaagcacgaaagccccagacagggccagggtggtggagcactggatcgaggtggccagggagtgccggatcctcaagaacttctcgtcactgtatgccatcctctcggccctgcagagcaactccatccaccgtctgaagaagacgtgggaagacgtttccagggacagtttccggatctttcagaagctgtcagagatcttctcagatgagaacaactactcattgagccgggagctgctcatcaaggagggcacctccaagtttgccaccctggagatgaaccccaagagagcccagaaacggccgaaggagacgggcatcatccagggcaccgttccctacctgggcacgttcctcaccgacctggtgatgctggacactgccatgaaggactatctgtatggcagactcatcaactttgagaagaggaggaaggagttcgaggtgatcgcccagatcaagctgctgcagtcggcctgcaacaactacagcatcgcgccagatgagcaatttggggnncncancnnttgnnaanngctgtgttcttcttggtcctgagggtgttgctggctgacctcaggaccaagaagaacacagccattgtcaagcgctggagcgaccgccaggcccccagcactgagctcagtaccagtggcagctcccactccaagtcctgtgaccagctcaggtgtggcccctacctcagcagcggggacatcgctgacgcgctcagcgtgcactcggccggctcctctagctccgacgtggaggagatcaacatcagcttcgtcccggagtctcctgatggccaggaaaagaagttctgggaatcagcctcacagtcatccccggagacctccggcatcagctcagcctccagcagcacctcgtcctcctcagcctccaccacgcccgtggctgccacacgcacccacaagcgctctgtctcagggctctgcaactccagctccgcgctgccgctctacaaccagcaggtgggcgactgctgtatcatccgcgtcagcctggacgtggacaatggcaacatgtacaagagcatcctggtgaccagccaagataaggctccggctgtaatccgcaaggccatggacaaacacaacctggaggaggaggagccggaggactatgagctgctgcagattctctcagatgaccggaagctgaagatccctgaaaacgccaacgtcttctatgccatgaactctaccgccaactatgactttgtcctgaagaagcggaccttcaccaagggagtgaaggtcaagcacggagccagctccaccctccctcgcatgaagcagaaaggactcaagattgccaagggcatcttctgagggcatcctcccagggtctggctggctggtagccaagcacttatggaccagagtggcccaggccagctgggcgccttcctcccacctgccagcccagggtaccccagactccagtttcatcctgaacctctcccgctgctgggattgacgcctgccattggtcaggctgacctggcctcccgtggaccactcgctgccttaggtgccttctgctctctggaaccagaggactagctgacttttgccaaggagcagtgccaacgggcatggcatggtgccctgcctgcccccgggcgccacctctgtacacttccctgacaccttcccaggtgtgggtcactgccacctgtgcccatgggcaccccagagcacccactgtgaccactgcagttctctcatgcccacaggcactggcctgtgaccttcgcaggggtcccggcccctcccaccactctagcctttctcaggctgcaccaaagattccatcatcagggccaactgagagtgagggagtctcacccaccgcttaccccagccctcccctgggagcagagagagaaaccctcttcatggaccagactctgcacccggtgagtgaggacagtcccagctgagtcccatcgatgttgaatctcatgccactgcaagtgccattcaccactgcgtcctgggctttacgagaccatgcaagacgggggttagtgaggaaggaggatttggggtgggggtggggtgattgaatatttgtataaaaagcaaaaagaaaaaaaaaatgtttgtttactgattggggaggggcaatatttatttgttgtaaatagcaaatgctagacttgaatattatattaaaatcctgtttctacta

SEQ ID NO: 466925 - DNA, 1479 bp, Homo sapiens
tagaaggttccccatctggcagctggcctggggtgcccccacagggcagtgggatctgctgatcttaccgtctccctcagttctgggaatcagcctcacagtcatccccggagacctccggcatcagctcagcctccagcagcacctcgtcctcctcagcctccaccacgcccgtggctgccacacgcacccacaagcgctctgtctcagggctctgcaactccagctccgcgctgccgctctacaaccagcaggtgggcgactgctgtatcatccgcgtcagcctggacgtggacaatggcaacatgtacaagagcatcctggtgaccagccaagataaggctccggctgtaatccgcaaggccatggacaaacacaacctggaggaggaggagccggaggactatgagctgctgcagattctctcagatgaccggaagctgaagatccctgaaaacgccaacgtcttctatgccatgaactctaccgccaactatgactttgtcctgaagaagcggaccttcaccaagggagtgaaggtcaagcacggagccagctccaccctccctcgcatgaagcagaaaggactcaagattgccaagggcatcttctgagggcatcctcccagggtctggctggctggtagccaagcacttatggaccagagtggcccaggccagctgggcgccttcctcccacctgccagcccagggtaccccagactccagtttcatcctgaacctctcccgctgctgggattgacgcctgccattggtcaggctgacctggcctcccgtggaccactcgctgccttaggtgccttctgctctctggaaccagaggactagctgacttttgccaaggagcagtgccaacgggcatggcatggtgccctgcctgcccccgggcgccacctctgtacacttccctgacaccttcccaggtgtgggtcactgccacctgtgcccatgggcaccccagagcacccactgtgaccactgcagttctctcatgcccacaggcactggcctgtgaccttcgcaggggtcccggcccctcccaccactctagcctttctcaggctgcaccaaagattccatcatcagggccaactgagagtgagggagtctcacccaccgcttaccccagccctcccctgggagcagagagagaaaccctcttcatggaccagactctgcacccggtgagtgaggacagtcccagctgagtcccatcgatgttgaatctcatgccactgcaagtgccattcaccactgcgtcctgggctttacgagaccatgcaagacgggggttagtgaggaaggaggatttggggtgggggtggggtgattgaatatttgtataaaaagcaaaaagaaaaaaaaaatgtttgtttactgattggggaggggcaatatttatttgttgtaaatagcaaatgctagacttgaatattatattaaaatcctgtttctacta

SEQ ID NO: 466926 - DNA, 3355 bp, Homo sapiens
gggcgttgtcttcacagagctccacgcaggagatcggtgaggagctgatcaacggagtcatctactccatctccctgcgcaaggtgcagctgcaccacggaggcaacaaggggcagcgctggctcgggtatgagaatgagtcggccctgaacctttatgagacttgcaaggtgcggaccgtgaaggctggcacgctggagaagctggtggagcacctggtgccagccttccagggcagcgacctctcctacgtcaccatcttcctgtgtacctatagagccttcaccaccacccaacaggtcctggacctgctgttcaaaaggtacggtagatgtgacgccctcacggctcctctagatacggctgcatcctcccctattccgacgaggatggtggaccccaggaccaacttaaaaatgccatctcctccatcctgggcacctggctggaccagtactcggaggatttctgtcaacctccggactttccctgcctcaagcagctggtggcctacgtgcagctcaacatgccaggctcagacctggagcgccgtgcccaccttctcctggcccagctggagcactcggaacccattgaggcagagcctgaggctctgtcaccagtgccagctctaaaaccaactccagagctcgagctagctctaacaccagctcgagcacccagcccagtgccggctccagccccggagccagagccagctccaacaccagctccaggttcagagctagaagtagctccagcaccagctccggagctccagcaggctccagagccagctgtgggactagaatcggctccagcgccagctctggaactagagccagctccagaacaggatccagctccctcacaaactctagagctggagccagctccagcgccagttccatcattacagccttcctggccttcacctgtggttgcagagaacgggctgagtgaggagaagcctcacctcttggtgttccctccagatctggtggcagagcagtttacactgatggatgcggaactgttcaagaaggtggtgccctaccactgcctgggctccatctggtcccagcgggacaagaagggcaaggagcacctggcgcccaccatccgcgccactgtcacccagttcaacagtgtggccaactgtgtcatcaccacctgcctcgggaaccgaagcacgaaagccccagacagggccagggtggtggagcactggatcgaggtggccagggagtgccggatcctcaagaacttctcgtcactgtatgccatcctctcggccctgcagagcaactccatccaccgtctgaagaagacgtgggaagacgtttccagggacagtttccggatctttcagaagctgtcagagatcttctcagatgagaacaactactcattgagccgggagctgctcatcaaggagggcacctccaagtttgccaccctggagatgaaccccaagagagcccagaaacggccgaaggagacgggcatcatccagggcaccgttccctacctgggcacgttcctcaccgacctggtgatgctggacactgccatgaaggactatctgtatggcagactcatcaactttgagaagaggaggaaggagttcgaggtgatcgcccagatcaagctgctgcagtcggcctgcaacaactacagcatcgcgccagatgagcaatttggggcctggttccgggccgtggagcggctcagcgagactgagagctacaacctgtcgtgcgagctggagcccccatccgagtcagccagcaacaccctcaggaccaagaagaacacagccattgtcaagcgctggagcgaccgccaggcccccagcactgagctcagtaccagtggcagctcccactccaagtcctgtgaccagctcaggtgtggcccctacctcagcagcggggacatcgctgacgcgctcagcgtgcactcggccggctcctctagctccgacgtggaggagatcaacatcagcttcgtcccggagtctcctgatggccaggaaaagaagttctgggaatcagcctcacagtcatccccggagacctccggcatcagctcagcctccagcagcacctcgtcctcctcagcctccaccacgcccgtggctgccacacgcacccacaagcgctctgtctcagggctctgcaactccagctccgcgctgccgctctacaaccagcaggtgggcgactgctgtatcatccgcgtcagcctggacgtggacaatggcaacatgtacaagagcatcctggtgaccagccaagataaggctccggctgtaatccgcaaggccatggacaaacacaacctggaggaggaggagccggaggactatgagctgctgcagattctctcagatgaccggaagctgaagatccctgaaaacgccaacgtcttctatgccatgaactctaccgccaactatgactttgtcctgaagaagcggaccttcaccaagggagtgaaggtcaagcacggagccagctccaccctccctcgcatgaagcagaaaggactcaagattgccaagggcatcttctgagggcatcctcccagggtctggctggctggtagccaagcacttatggaccagagtggcccaggccagctgggcgccttcctcccacctgccagcccagggtaccccagactccagtttcatcctgaacctctcccgctgctgggattgacgcctgccattggtcaggctgacctggcctcccgtggaccactcgctgccttaggtgccttctgctctctggaaccagaggactagctgacttttgccaaggagcagtgccaacgggcatggcatggtgccctgcctgcccccgggcgccacctctgtacacttccctgacaccttcccaggtgtgggtcactgccacctgtgcccatgggcaccccagagcacccactgtgaccactgcagttctctcatgcccacaggcactggcctgtgaccttcgcaggggtcccggcccctcccaccactctagcctttctcaggctgcaccaaagattccatcatcagggccaactgagagagtgaggacagtcccagctgagtcccatcgatgttgaatctcatgccactgcaagtgccattcaccactgcgtcctgggctttacgagaccatgcaagacgggggttagtgaggaaggaggatttggggtgggggtggggtgattgaatatttgtataaaaagcaaaaagaaaaaaaaaatgtttgtttactgattggggaggggcaatatttatttgttgtaaatagcaaatgctagacttgaatattatattaaaatcctgtttctacta

SEQ ID NO: 466927 - DNA, 2883 bp, Homo sapiens
gggcgttgtcttcacagagctccacgcaggagatcggtgaggagctgatcaacggagtcatctactccatctccctgcgcaaggtgcagctgcaccacggaggcaacaaggggcagcgctggctcgggtatgagaatgagtcggccctgaacctttatgagacttgcaaggtgcggaccgtgaaggctggcacgctggagaagctggtggagcacctggtgccagccttccagggcagcgacctctcctacgtcaccatcttcctgtgtacctatagagccttcaccaccacccaacaggtcctggacctgctgttcaaaaggtacggtagatgtgacgccctcacggctcctctagatacggctgcatcctcccctattccgacgaggatggtggaccccaggaccaacttaaaaatgccatctcctccatcctgggcacctggctggaccagtactcggaggatttctgtcaacctccggactttccctgcctcaagcagctggtggcctacgtgcagctcaacatgccaggctcagacctggagcgccgtgcccaccttctcctggcccagctggagcactcggaacccattgaggcagagcctgaggctctgtcaccagtgccagctctaaaaccaactccagagctcgagctagctctaacaccagctcgagcacccagcccagtgccggctccagccccggagccagagccagctccaacaccagctccaggttcagagctagaagtagctccagcaccagctccggagctccagcaggctccagagccagctgtgggactagaatcggctccagcgccagctctggaactagagccagctccagaacaggatccagctccctcacaaactctagagctggagccagctccagcgccagttccatcattacagccttcctggccttcacctgtggttgcagagaacgggctgagtgaggagaagcctcacctcttggtgttccctccagatctggtggcagagcagtttacactgatggatgcggaactgttcaagaaggtggtgccctaccactgcctgggctccatctggtcccagcgggacaagaagggcaaggagcacctggcgcccaccatccgcgccactgtcacccagttcaacagtgtggccaactgtgtcatcaccacctgcctcgggaaccgaagcacgaaagccccagacagggccagggtggtggagcactggatcgaggtggccagggagtgccggatcctcaagaacttctcgtcactgtatgccatcctctcggccctgcagagcaactccatccaccgtctgaagaagacgtgggaagacgtttccagggacagtttccggatctttcagaagctgtcagagatcttctcagatgagaacaactactcattgagccgggagctgctcatcaaggagggcacctccaagtttgccaccctggagatgaaccccaagagagcccagaaacggccgaaggagacgggcatcatccagggcaccgttccctacctgggcacgttcctcaccgacctggtgatgctggacactgccatgaaggactatctgtatggcagactcatcaactttgagaagaggaggaaggagttcgaggtgatcgcccagatcaagctgctgcagtcggcctgcaacaactacagcatcgcgccagatgagcaatttggggcctggttccgggccgtggagcggctcagcgagactgagagctacaacctgtcgtgcgagctggagcccccatccgagtcagccagcaacaccctcaggaccaagaagaacacagccattgtcaagcgctggagcgaccgccaggcccccagcactgagctcagtaccagtggcagctcccactccaagtcctgtgaccagctcaggtgtggcccctacctcagcagcggggacatcgctgacgcgctcagcgtgcactcggccggctcctctagctccgacgtggaggagatcaacatcagcttcgtcccggagtctcctgatggccaggaaaagaagttctgggaatcagcctcacagtcatccccggagacctccggcatcagctcagcctccagcagcacctcgtcctcctcagcctccaccacgcccgtggctgccacacgcacccacaagcgctctgtctcagggctctgcaactccagctccgcgctgccgctctacaaccagcaggtgggcgactgctgtatcatccgcgtcagcctggacgtggacaatggcaacatgtacaagagcatcctggtgaccagccaagataaggctccggctgtaatccgcaaggccatggacaaacacaacctggaggaggaggagccggaggactatgagctgctgcagattctctcagatgaccggaagctgaagatccctgaaaacgccaacgtcttctatgccatgaactctaccgccaactatgactttgtcctgaagaagcggaccttcaccaagggagtgaaggtcaagcacggagccagctccaccctccctcgcatgaagcagaaaggactcaagattgccaagggcatcttctgagggcatcctcccagggtctggctggctggtagccaagcacttatggaccagagtggcccaggccagctgggcgccttcctcccacctgccagcccagggtaccccagactccagtttcatcctgaacctctcccgctgctgggattgacgcctgccattggtcaggctgacctggcctcccgtggaccactcgctgccttaggtgccttctgctctctggaaccagaggactagctgacttttgcagtgagccaagatcacatcactgcattccagcctgggtgacagaccgagactctgtctca

SEQ ID NO: 466928 - DNA, 1770 bp, Homo sapiens
gggcgttgtcttcacagagctccacgcaggagatcggtgaggagctgatcaacggagtcatctactccatctccctgcgcaaggtgcagctgcaccacggaggcaacaaggggcagcgctggctcgggtatgagaatgagtcggccctgaacctttatgagacttgcaaggtgcggaccgtgaaggctggcacgctggagaagctggtggagcacctggtgccagccttccagggcagcgacctctcctacgtcaccatcttcctgtgtacctatagagccttcaccaccacccaacaggtcctggacctgctgttcaaaaggtacggtagatgtgacgccctcacggctcctctagatacggctgcatcctcccctattccgacgaggatggtggaccccaggaccaacttaaaaatgccatctcctccatcctgggcacctggctggaccagtactcggaggatttctgtcaacctccggactttccctgcctcaagcagctggtggcctacgtgcagctcaacatgccaggctcagacctggagcgccgtgcccaccttctcctggcccagctggagcactcggaacccattgaggcagagcctgaggctctgtcaccagtgccagctctaaaaccaactccagagctcgagctagctctaacaccagctcgagcacccagcccagtgccggctccagccccggagccagagccagctccaacaccagctccaggttcagagctagaagtagctccagcaccagctccggagctccagcaggctccagagccagctgtgggactagaatcggctccagcgccagctctggaactagagccagctccagaacaggatccagctccctcacaaactctagagctggagccagctccagcgccagttccatcattacagccttcctggccttcacctgtggttgcagagaacgggctgagtgaggagaagcctcacctcttggtgttccctccagatctggtggcagagcagtttacactgatggatgcggaactgttcaagaaggtggtgccctaccactgcctgggctccatctggtcccagcgggacaagaagggcaaggagcacctggcgcccaccatccgcgccactgtcacccagttcaacagtgtggccaactgtgtcatcaccacctgcctcgggaaccgaagcacgaaagccccagacagggccagggtggtggagcactggatcgaggtggccagggagtgccggatcctcaagaacttctcgtcactgtatgccatcctctcggccctgcagagcaactccatccaccgtctgaagaagacgtgggaagacgtttccagggacagtttccggatctttcagaagctgtcagagatcttctcagatgagaacaactactcattgagccgggagctgctcatcaaggagggcacctccaagtttgccaccctggagatgaaccccaagagagcccagaaacggccgaaggagacgggcatcatccagggcaccgttccctacctgggcacgttcctcaccgacctggtgatgctggacactgccatgaaggactatctgtatggcagactcatcaactttgagaagaggaggaaggagttcgaggtgatcgcccagatcaagctgctgcagtcggcctgcaacaactacagcatcgcgccagatgagcaatttggggcctggttccgggccgtggagcggctcagcgagactgagaggtgaggccggggcagcaaatgggg

SEQ ID NO: 466929 - DNA, 1652 bp, Homo sapiens
gggcgttgtcttcacagagctccacgcaggagatcggtgaggagctgatcaacggagtcatctactccatctccctgcgcaaggtgcagctgcaccacggaggcaacaaggggcagcgctggctcgggtatgagaatgagtcggccctgaacctttatgagacttgcaaggtgcggaccgtgaaggctggcacgctggagaagctggtggagcacctggtgccagccttccagggcagcgacctctcctacgtcaccatcttcctgtgtacctatagagccttcaccaccacccaacaggtcctggacctgctgttcaaaaggtacggtagatgtgacgccctcacggctcctctagatacggctgcatcctcccctattccgacgaggatggtggaccccaggaccaacttaaaaatgccatctcctccatcctgggcacctggctggaccagtactcggaggatttctgtcaacctccggactttccctgcctcaagcagctggtggcctacgtgcagctcaacatgccaggctcagacctggagcgccgtgcccaccttctcctggcccagctggagcactcggaacccattgaggcagagcctgaggctctgtcaccagtgccagctctaaaaccaactccagagctcgagctagctctaacaccagctcgagcacccagcccagtgccggctccagccccggagccagagccagctccaacaccagctccaggttcagagctagaagtagctccagcaccagctccggagctccagcaggctccagagccagctgtgggactagaatcggctccagcgccagctctggaactagagccagctccagaacaggatccagctccctcacaaactctagagctggagccagctccagcgccagttccatcattacagccttcctggccttcacctgtggttgcagagaacgggctgagtgaggagaagcctcacctcttggtgttccctccagatctggtggcagagcagtttacactgatggatgcggaactgttcaagaaggtggtgccctaccactgcctgggctccatctggtcccagcgggacaagaagggcaaggagcacctggcgcccaccatccgcgccactgtcacccagttcaacagtgtggccaactgtgtcatcaccacctgcctcgggaaccgaagcacgaaagccccagacagggccagggtggtggagcactggatcgaggtggccagggagtgccggatcctcaagaacttctcgtcactgtatgccatcctctcggccctgcagagcaactccatccaccgtctgaagaagacgtgggaagacgtttccagggacagtttccggatctttcagaagctgtcagagatcttctcagatgagaacaactactcattgagccgggagctgctcatcaaggagggcacctccaagtttgccaccctggagatgaaccccaagagagcccagaaacggccgaaggagacgggcatcatccagggcaccgttccctacctgggcacgttcctcaccgacctggtgatgctggacactgccatgaaggactatctgtatgtgagtgtgccgggcggggctggagtagggcccgggaggagagaccttccctgagccctgg

SEQ ID NO: 466930 - DNA, 364 bp, Homo sapiens
gctttttatacaaatattcaatcagccccagccccatcccaaatcctccttcctcacaaaccctcttcatggaccagactctgcacccggtgagtgaggacagtcccagctgagtcccatcgatgttgaatctcatgccactgcaagtgccattcaccactgcgtcctgggctttacgagaccatgcaagacgggggttagtgaggaaggaggatttggggtgggggtggggtgattgaatatttgtataaaaagcaaaaagaaaaaaaaaatgtttgtttactgattggggaggggcaatatttatttgttgtaaatagcaaatgctagacttgaatattatattaaaatcctgtttctacta

SEQ ID NO: 466931 - DNA, 219 bp, Homo sapiens
cgctgggcaagctccttaagccctctgtgcttgtcttctcatcccccaaatggaaatgaaagtagccagtgtgttcatcatatatgtaaaaatctatatgtatgtatatatgtgtatatgtatgtatatatgtgtatatatatgcatgtatatgtgtgtgtatatatatgcatgtatatgtgtgtgtatatatatgcatgtatatataaagcatctatg

SEQ ID NO: 466932 - DNA, 371 bp, Homo sapiens
ggcagggaccacaggcaggagagtggcctggtacacgttttgtgggttcggggagagaggcttctctggaagccggggctgttctgtgtctttggaaaggcacaggaaaggctggcatgttgttgaacttttctcctcttgcagctctgtcaccagtgccagctctaaaaccaactccagagctcgagctagctctaacaccagctcgagcacccagcccagtgccggctccagccccggagccagagccagctccaacaccagctccaggttcagagctagaagtagctccagcaccagctccggagctccagcaggctccagagccagctgtgggactagaatcggctccagcgccagctctggaacta

SEQ ID NO: 466933 - DNA, 1756 bp, Homo sapiens
gggcgttgtcttcacagagctccacgcaggagatcggtgaggagctgatcaacggagtcatctactccatctccctgcgcaaggtgcagctgcaccacggaggcaacaaggggcagcgctggctcgggtatgagaatgagtcggccctgaacctttatgagacttgcaaggtgcggaccgtgaaggctggcacgctggagaagctggtggagcacctggtgccagccttccagggcagcgacctctcctacgtcaccatcttcctgtgtacctatagagccttcaccaccacccaacaggtcctggacctgctgttcaaaaggtacggtagatgtgacgccctcacggctcctctagatacggctgcatcctcccctattccgacgaggatggtggaccccaggaccaacttaaaaatgccatctcctccatcctgggcacctggctggaccagtactcggaggatttctgtcaacctccggactttccctgcctcaagcagctggtggcctacgtgcagctcaacatgccaggctcagacctggagcgccgtgcccaccttctcctggcccagctggagcactcggaacccattgaggcagagcctgaggctctgtcaccagtgccagctctaaaaccaactccagagctcgagctagctctaacaccagctcgagcacccagcccagtgccggctccagccccggagccagagccagctccaacaccagctccaggttcagagctagaagtagctccagcaccagctccggagctccagcaggctccagagccagctgtgggactagaatcggctccagcgccagctctggaactagagccagctccagaacaggatccagctccctcacaaactctagagctggagccagctccagcgccagttccatcattacagccttcctggccttcacctgtggttgcagagaacgggctgagtgaggagaagcctcacctcttggtgttccctccagatctggtggcagagcagtttacactgatggatgcggaactgttcaagaaggtggtgccctaccactgcctgggctccatctggtcccagcgggacaagaagggcaaggagcacctggcgcccaccatccgcgccactgtcacccagttcaacagtgtggccaactgtgtcatcaccacctgcctcgggaaccgaagcacgaaagccccagacagggccagggtggtggagcactggatcgaggtggccagggagtgccggatcctcaagaacttctcgtcactgtatgccatcctctcggccctgcagagcaactccatccaccgtctgaagaagacgtgggaagacgtttccagggacagtttccggatctttcagaagctgtcagagatcttctcagatgagaacaactactcattgagccgggagctgctcatcaaggcgtgagccaccgcaccatgcagcaggcggagttctcatccgcactttccagagggggaggcaggctcaggaaggccaggccaccggcccaggaccccacactagagggcacctccaagtttgccaccctggagatgaaccccaagagagcccagaaacggccgaaggagacgggcatcatccagggcaccgttccctacctgggcacgttcctcaccgacctggtgatgctggacactgccatgaaggactatctgtatgtgagtgtgccgggcggggctggagtagggcccgggaggagagaccttccctgagccctgg

SEQ ID NO: 466934 - DNA, 3613 bp, Homo sapiens
gggcgttgtcttcacagagctccacgcaggagatcggtgaggagctgatcaacggagtcatctactccatctccctgcgcaaggtgcagctgcaccacggaggcaacaaggggcagcgctggctcgggtatgagaatgagtcggccctgaacctttatgagacttgcaaggtgcggaccgtgaaggctggcacgctggagaagctggtggagcacctggtgccagccttccagggcagcgacctctcctacgtcaccatcttcctgtgtacctatagagccttcaccaccacccaacaggtcctggacctgctgttcaaaaggtacggtagatgtgacgccctcacggctcctctagatacggctgcatcctcccctattccgacgaggatggtggaccccaggaccaacttaaaaatgccatctcctccatcctgggcacctggctggaccagtactcggaggatttctgtcaacctccggactttccctgcctcaagcagctggtggcctacgtgcagctcaacatgccaggctcagacctggagcgccgtgcccaccttctcctggcccagctggagcactcggaacccattgaggcagagcctgaggctctgtcaccagtgccagctctaaaaccaactccagagctcgagctagctctaacaccagctcgagcacccagcccagtgccggctccagccccggagccagagccagctccaacaccagctccaggttcagagctagaagtagctccagcaccagctccggagctccagcaggctccagagccagctgtgggactagaatcggctccagcgccagctctggaactagagccagctccagaacaggatccagctccctcacaaactctagagctggagccagctccagcgccagttccatcattacagccttcctggccttcacctgtggttgcagagaacgggctgagtgaggagaagcctcacctcttggtgttccctccagatctggtggcagagcagtttacactgatggatgcggaactgttcaagaaggtggtgccctaccactgcctgggctccatctggtcccagcgggacaagaagggcaaggagcacctggcgcccaccatccgcgccactgtcacccagttcaacagtgtggccaactgtgtcatcaccacctgcctcgggaaccgaagcacgaaagccccagacagggccagggtggtggagcactggatcgaggtggccagggagtgccggatcctcaagaacttctcgtcactgtatgccatcctctcggccctgcagagcaactccatccaccgtctgaagaagacgtgggaagacgtttccagggacagtttccggatctttcagaagctgtcagagatcttctcagatgagaacaactactcattgagccgggagctgctcatcaaggagggcacctccaagtttgccaccctggagatgaaccccaagagagcccagaaacggccgaaggagacgggcatcatccagggcaccgttccctacctgggcacgttcctcaccgacctggtgatgctggacactgccatgaaggactatctgtatggcagactcatcaactttgagaagaggaggaaggagttcgaggtgatcgcccagatcaagctgctgcagtcggcctgcaacaactacagcatcgcgccagatgagcaatttggggcctggttccgggccgtggagcggctcagcgagactgagagctacaacctgtcgtgcgagctggagcccccatccgagtcagccagcaacaccctcaggaccaagaagaacacagccattgtcaagcgctggagcgaccgccaggcccccagcactgagctcagtaccagtggcagctcccactccaagtcctgtgaccagctcaggtgtggcccctacctcagcagcggggacatcgctgacgcgctcagcgtgcactcggccggctcctctagctccgacgtggaggagatcaacatcagcttcgtcccggagtctcctgatggccaggaaaagaagttctgggaatcagcctcacagtcatccccggagacctccggcatcagctcagcctccagcagcacctcgtcctcctcagcctccaccacgcccgtggctgccacacgcacccacaagcgctctgtctcagggctctgcaactccagctccgcgctgccgctctacaaccagcaggtgggcgactgctgtatcatccgcgtcagcctggacgtggacaatggcaacatgtacaagagcatcctggtgaccagccaagataaggctccggctgtaatccgcaaggccatggacaaacacaacctggaggaggaggagccggaggactatgagctgctgcagattctctcagatgaccggagtaagtcagaagaccagagggcgatggcagagggggcaggtccacaccactccccagccccaggttggaagcctttggccccagaaaattcaccagcagagtgtgggtagacactgtggacagggcagccctggctgcccccattgtctgcttgctgtccccagcaaccactggacctccccagtgtgtgcccttccctaggcgtgaacaggcagttcaaagctcacatcagtgaggagcaaagagaaaaggcatttttcactgggacaggttagccacgtggcccactggaagggactctttctggctaagacaagaaaacatgtgctctacaaagaatggtgacagctgtggaccaaagtgtcaagtgttaaaatccatgagtgtgtgattctaaaagcagaacaggctactaggaggccaactcagtattctagaaactgggaaagtgtcaagaaccagtgcaggctcagagtggggtatcctgggcctggagacgctgggcaagctccttaagccctctgtgcttgtcttctcatcccccaaatggaaatgaaagtagccagtgtgttcatcatatatgtaaaaatctatatgtatgtatatatgtgtatatatatgcatgtatatgtgtgtgtatatatatgcatgtatatgtgtgtgtatatatatgcatgtatatataaagcatctatgtgcaccataaaagttaactataaatactatcatcgctgttttctttccagtgagctgaacaccaccttcccaccattagcccagacagtaagcaatgactcctgtgatccctagaagttacagtctaaatcctctggcagcttcttgcaccatttcggttaggtgggcagggtaggcgggacccccatcttacagaaaaggaagactgaggcctagagaggttaaagatgacgaaaagccacacgatgtcggcaggagcacaaatcgagcccagctctggtttatagcaggctgtgggccagaggagatggtgggaaatggagccaaaaggaagtgcttgccgggtgccagggttcaaggagtacaggcctccctggaacgggcgccagagccctggggcaggcctgtcctttcctggtccttggatcccttgtcctgagtagggcaggattctgggaggtgacctggattctagaaagcctgttccaggtgggcagccagcactgcagtatggg

SEQ ID NO: 466935 - DNA, 1144 bp, Homo sapiens
gtctgtggctcaagacagtccttgtatgggctctcaagcggtaggggtatcctgcagggcccccaggagcatccctgatcacccctctgcccctccccaccagagctgaagatccctgaaaacgccaacgtcttctatgccatgaactctaccgccaactatgactttgtcctgaagaagcggaccttcaccaagggagtgaaggtcaagcacggagccagctccaccctccctcgcatgaagcagaaaggactcaagattgccaagggcatcttctgagggcatcctcccagggtctggctggctggtagccaagcacttatggaccagagtggcccaggccagctgggcgccttcctcccacctgccagcccagggtaccccagactccagtttcatcctgaacctctcccgctgctgggattgacgcctgccattggtcaggctgacctggcctcccgtggaccactcgctgccttaggtgccttctgctctctggaaccagaggactagctgacttttgccaaggagcagtgccaacgggcatggcatggtgccctgcctgcccccgggcgccacctctgtacacttccctgacaccttcccaggtgtgggtcactgccacctgtgcccatgggcaccccagagcacccactgtgaccactgcagttctctcatgcccacaggcactggcctgtgaccttcgcaggggtcccggcccctcccaccactctagcctttctcaggctgcaccaaagattccatcatcagggccaactgagagtgagggagtctcacccaccgcttaccccagccctcccctgggagcagagagagaaaccctcttcatggaccagactctgcacccggtgagtgaggacagtcccagctgagtcccatcgatgttgaatctcatgccactgcaagtgccattcaccactgcgtcctgggctttacgagaccatgcaagacgggggttagtgaggaaggaggatttggggtgggggtggggtgattgaatatttgtataaaaagcaaaaagaaaaaaaaaatgtttgtttactgattggggaggggcaatatttatttgttgtaaatagcaaatgctagacttgaatattatattaaaatcctgtttctacta

SEQ ID NO: 466936 - DNA, 3380 bp, Homo sapiens
gggcgttgtcttcacagagctccacgcaggagatcggtgaggagctgatcaacggagtcatctactccatctccctgcgcaaggtgcagctgcaccacggaggcaacaaggggcagcgctggctcgggtatgagaatgagtcggccctgaacctttatgagacttgcaaggtgcggaccgtgaaggctggcacgctggagaagctggtggagcacctggtgccagccttccagggcagcgacctctcctacgtcaccatcttcctgtgtacctatagagccttcaccaccacccaacaggtcctggacctgctgttcaaaaggtacggtagatgtgacgccctcacggctcctctagatacggctgcatcctcccctattccgacgaggatggtggaccccaggaccaacttaaaaatgccatctcctccatcctgggcacctggctggaccagtactcggaggatttctgtcaacctccggactttccctgcctcaagcagctggtggcctacgtgcagctcaacatgccaggctcagacctggagcgccgtgcccaccttctcctggcccagctggagcactcggaacccattgaggcagagcctgaggctctgtcaccagtgccagctctaaaaccaactccagagctcgagctagctctaacaccagctcgagcacccagcccagtgccggctccagccccggagccagagccagctccaacaccagctccaggttcagagctagaagtagctccagcaccagctccggagctccagcaggctccagagccagctgtgggactagaatcggctccagcgccagctctggaactagagccagctccagaacaggatccagctccctcacaaactctagagctggagccagctccagcgccagttccatcattacagccttcctggccttcacctgtggttgcagagaacgggctgagtgaggagaagcctcacctcttggtgttccctccagatctggtggcagagcagtttacactgatggatgcggaactgttcaagaaggtggtgccctaccactgcctgggctccatctggtcccagcgggacaagaagggcaaggagcacctggcgcccaccatccgcgccactgtcacccagttcaacagtgtggccaactgtgtcatcaccacctgcctcgggaaccgaagcacgaaagccccagacagggccagggtggtggagcactggatcgaggtggccagggagtgccggatcctcaagaacttctcgtcactgtatgccatcctctcggccctgcagagcaactccatccaccgtctgaagaagacgtgggaagacgtttccagggacagtttccggatctttcagaagctgtcagagatcttctcagatgagaacaactactcattgagccgggagctgctcatcaaggagggcacctccaagtttgccaccctggagatgaaccccaagagagcccagaaacggccgaaggagacgggcatcatccagggcaccgttccctacctgggcacgttcctcaccgacctggtgatgctggacactgccatgaaggactatctgtatggcagactcatcaactttgagaagaggaggaaggagttcgaggtgatcgcccagatcaagctgctgcagtcggcctgcaacaactacagcatcgcgccagatgagcaatttggggcctggttccgggccgtggagcggctcagcgagactgagagctacaacctgtcgtgcgagctggagcccccatccgagtcagccagcaacaccctcaggaccaagaagaacacagccattgtcaagcgctggagcgaccgccaggcccccagcactgagctcagtaccagtggcagctcccactccaagtcctgtgaccagctcaggtgtggcccctacctcagcagcggggacatcgctgacgcgctcagcgtgcactcggccggctcctctagctccgacgtggaggagatcaacatcagcttcgtcccggagtctcctgatggccaggaaaagaagttctgggaatcagcctcacagtcatccccggagacctccggcatcagctcagcctccagcagcacctcgtcctcctcagcctccaccacgcccgtggctgccacacgcacccacaagcgctctgtctcagggctctgcaactccagctccgcgctgccgctctacaaccagcaggtgggcgactgctgtatcatccgcgtcagcctggacgtggacaatggcaacatgtacaagagcatcctggtgaccagccaagataaggctccggctgtaatccgcaaggccatggacaaacacaacctggaggaggaggagccggaggactatgagctgctgcagattctctcagatgaccggaagctgaagatccctgaaaacgccaacgtcttctatgccatgaactctaccgccaactatgactttgtcctgaagaagcggaccttcaccaagggagtgaaggtcaagcacggagccagctccaccctccctcgcatgaagcagaaaggactcaagattgccaagggcatcttctgagggcatcctcccagggtctggctggctggtagccaagcacttatggaccagagtggcccaggccagctgggcgccttcctcccacctgccagcccagggtaccccagactccagtttcatcctgaacctctcccgctgctgggattgacgcctgccattggtcaggctgacctggcctcccgtggaccactcgctgccttaggtgccttctgctctctggaaccagaggactagctgacttttgccaaggagcagtgccaacgggcatggcatggtgccctgcctgcccccgggcgccacctctgtacacttccctgacaccttcccaggtgtgggtcactgccacctgtgcccatgggcaccccagagcacccactgtgaccactgcagttctctcatgcccacaggcactggcctgtgaccttcgcaggggtcccggcccctcccaccactctagcctttctcaggctgcaccaaagattccatcatcagggccaactgagagtgagggagtctcacccaccgcttaccccagccctcccctgggagcagagagagaaaccctcttcatggaccagactctgcacccggtgagtgaggacagtcccagctgagtcccatcgatgttgaatctcatgccactgcaagtgccattcaccactgcgtcctgggctttacgagaccatgcaagacgggggttagtgaggaaggaggatttggggtgggggtggggtgattgaatatttgttttaaagcccaacacaaaatgccggcgtttacaccttgtaactggaaaccttct

SEQ ID NO: 466937 - DNA, 1876 bp, Homo sapiens
ggccattgggtgtccaccttccagggcagactcatcaactttgagaagaggaggaaggagttcgaggtgatcgcccagatcaagctgctgcagtcggcctgcaacaactacagcatcgcgccagatgagcaatttggggcctggttccgggccgtggagcggctcagcgagactgagagctacaacctgtcgtgcgagctggagcccccatccgagtcagccagcaacaccctcaggaccaagaagaacacagccattgtcaagcgctggagcgaccgccaggcccccagcactgagctcagtaccagtggcagctcccactccaagtcctgtgaccagctcaggtgtggcccctacctcagcagcggggacatcgctgacgcgctcagcgtgcactcggccggctcctctagctccgacgtggaggagatcaacatcagcttcgtcccggagtctcctgatggccaggaaaagaagttctgggaatcagcctcacagtcatccccggagacctccggcatcagctcagcctccagcagcacctcgtcctcctcagcctccaccacgcccgtggctgccacacgcacccacaagcgctctgtctcagggctctgcaactccagctccgcgctgccgctctacaaccagcaggtgggcgactgctgtatcatccgcgtcagcctggacgtggacaatggcaacatgtacaagagcatcctggtgaccagccaagataaggctccggctgtaatccgcaaggccatggacaaacacaacctggaggaggaggagccggaggactatgagctgctgcagattctctcagatgaccggaagctgaagatccctgaaaacgccaacgtcttctatgccatgaactctaccgccaactatgactttgtcctgaagaagcggaccttcaccaagggagtgaaggtcaagcacggagccagctccaccctccctcgcatgaagcagaaaggactcaagattgccaagggcatcttctgagggcatcctcccagggtctggctggctggtagccaagcacttatggaccagagtggcccaggccagctgggcgccttcctcccacctgccagcccagggtaccccagactccagtttcatcctgaacctctcccgctgctgggattgacgcctgccattggtcaggctgacctggcctcccgtggaccactcgctgccttaggtgccttctgctctctggaaccagaggactagctgacttttgccaaggagcagtgccaacgggcatggcatggtgccctgcctgcccccgggcgccacctctgtacacttccctgacaccttcccaggtgtgggtcactgccacctgtgcccatgggcaccccagagcacccactgtgaccactgcagttctctcatgcccacaggcactggcctgtgaccttcgcaggggtcccggcccctcccaccactctagcctttctcaggctgcaccaaagattccatcatcagggccaactgagagtgagggagtctcacccaccgcttaccccagccctcccctgggagcagagagagaaaccctcttcatggaccagactctgcacccggtgagtgaggacagtcccagctgagtcccatcgatgttgaatctcatgccactgcaagtgccattcaccactgcgtcctgggctttacgagaccatgcaagacgggggttagtgaggaaggaggatttggggtgggggtggggtgattgaatatttgtataaaaagcaaaaagaaaaaaaaaatgtttgtttactgattggggaggggcaatatttatttgttgtaaatagcaaatgctagacttgaatattatattaaaatcctgtttctacta

SEQ ID NO: 466938 - DNA, 4087 bp, Homo sapiens
gggcgttgtcttcacagagctccacgcaggagatcggtgaggagctgatcaacggagtcatctactccatctccctgcgcaaggtgcagctgcaccacggaggcaacaaggggcagcgctggctcgggtatgagaatgagtcggccctgaacctttatgagacttgcaaggtgcggaccgtgaaggctggcacgctggagaagctggtggagcacctggtgccagccttccagggcagcgacctctcctacgtcaccatcttcctgtgtacctatagagccttcaccaccacccaacaggtcctggacctgctgttcaaaaggtacggtagatgtgacgccctcacggctcctctagatacggctgcatcctcccctattccgacgaggatggtggaccccaggaccaacttaaaaatgccatctcctccatcctgggcacctggctggaccagtactcggaggatttctgtcaacctccggactttccctgcctcaagcagctggtggcctacgtgcagctcaacatgccaggctcagacctggagcgccgtgcccaccttctcctggcccagctggagcactcggaacccattgaggcagagcctgaggctctgtcaccagtgccagctctaaaaccaactccagagctcgagctagctctaacaccagctcgagcacccagcccagtgccggctccagccccggagccagagccagctccaacaccagctccaggttcagagctagaagtagctccagcaccagctccggagctccagcaggctccagagccagctgtgggactagaatcggctccagcgccagctctggaactagagccagctccagaacaggatccagctccctcacaaactctagagctggagccagctccagcgccagttccatcattacagccttcctggccttcacctgtggttgcagagaacgggctgagtgaggagaagcctcacctcttggtgttccctccagatctggtggcagagcagtttacactgatggatgcggaactgttcaagaaggtggtgccctaccactgcctgggctccatctggtcccagcgggacaagaagggcaaggagcacctggcgcccaccatccgcgccactgtcacccagttcaacagtgtggccaactgtgtcatcaccacctgcctcgggaaccgaagcacgaaagccccagacagggccagggtggtggagcactggatcgaggtggccagggagtgccggatcctcaagaacttctcgtcactgtatgccatcctctcggccctgcagagcaactccatccaccgtctgaagaagacgtgggaagacgtttccagggacagtttccggatctttcagaagctgtcagagatcttctcagatgagaacaactactcattgagccgggagctgctcatcaaggagggcacctccaagtttgccaccctggagatgaaccccaagagagcccagaaacggccgaaggagacgggcatcatccagggcaccgttccctacctgggcacgttcctcaccgacctggtgatgctggacactgccatgaaggactatctgtatggcagactcatcaactttgagaagaggaggaaggagttcgaggtgatcgcccagatcaagctgctgcagtcggcctgcaacaactacagcatcgcgccagatgagcaatttggggcctggttccgggccgtggagcggctcagcgagactgagagctacaacctgtcgtgcgagctggagcccccatccgagtcagccagcaacaccctcaggaccaagaagaacacagccattgtcaagcgctggagcgaccgccaggcccccagcactgagctcagtaccagtggcagctcccactccaagtcctgtgaccagctcaggtgtggcccctacctcagcagcggggacatcgctgacgcgctcagcgtgcactcggccggctcctctagctccgacgtggaggagatcaacatcagcttcgtcccggagtctcctgatggccaggaaaagaagttctgggaatcagcctcacagtcatccccggagacctccggcatcagctcagcctccagcagcacctcgtcctcctcagcctccaccacgcccgtggctgccacacgcacccacaagcgctctgtctcagggctctgcaactccagctccgcgctgccgctctacaaccagcaggtgggcgactgctgtatcatccgcgtcagcctggacgtggacaatggcaacatgtacaagagcatcctggtgaccagccaagataaggctccggctgtaatccgcaaggccatggacaaacacaacctggaggaggaggagccggaggactatgagctgctgcagattctctcagatgaccggaagctgaagatccctgaaaacgccaacgtcttctatgccatgaactctaccgccaactatgactttgtcctgaagaagcggaccttcaccaagggagtgaaggtcaagcacggagccagctccaccctccctcgcatgaagcagaaaggactcaagattgccaagggcatcttctgagggcatcctcccagggtctggctggctggtagccaagcacttatggaccagagtggcccaggccagctgggcgccttcctcccacctgccagcccagggtaccccagactccagtttcatcctgaacctctcccgctgctgggattgacgcctgccattggtcaggctgacctggcctcccgtggaccactcgctgccttaggtgccttctgctctctggaaccagaggactagctgacttttgccaaggagcagtgccaacgggcatggcatggtgccctgcctgcccccgggcgccacctctgtacacttccctgacaccttcccaggtgtgggtcactgccacctgtgcccatgggcaccccagagcacccactgtgaccactgcagttctctcatgcccacaggcactggcctgtgaccttcgcaggggtcccggcccctcccaccactctagcctttctcaggctgcaccaaagattccatcatcagggccaactgagagtgagggagtctcacccaccgcttaccccagccctcccctgggagcagagagagaaaccctcttcatggaccagactctgcacccggtgagtgaggacagtcccagctgagtcccatcgatgttgaatctcatgccactgcaagtgccattcaccactgcgtcctgggctttacgagaccatgcaagacgggggttagtgaggaaggaggatttggggtgggggtggggtgattgaatatttgtataaaaagcaaaaagaaaaaaaaaatgtttgtttactgattggggaggggcaatatttatttgttgtaaatagcaaatgctagacttgaatattatattaaaatcctgtttctactaaaaaaaaaacaaaaaaaaaaaaaaccacacaaacaaaaaacacaaaaaaaaacaaaacaaaaaaaaacacaaaaacaaaaaaaaaaccaaacaaaaaaacacacacacacaacacaacaccacaaacaaaacatgaggtaagagagaggcaagaacagcaagacacgagtcagtcaagatagggaatctcacgcaacaagatgcagacgcggcgcacacgacggtagcgcgcgagccaggacggagcagcggagggagacatctgggcgtgccacgcgcgcgtcacccagcacgcggcccacgcgacagcggcccgcgcccccgcacacactgtgccggctcgaagcagcacgcagacagaaagaaagaagagaaaacaacgagcaagaacagcaggaagccgcggcgcgacagaccgaccacgagctgcgacgcacaggaggcaacgcgcggaccacgcccacccgagcgcacgggagagcacgtggaggggcgagggagggagcacccggtccaccagacctaccggacccacaccgacgggggccagctcgacggccgggaaccgagcagcaaaaagcaacaacacggggcagagtgagctagagaagggccggcagcgggcaacacgcaaccggaggcgc

SEQ ID NO: 466939 - DNA, 3553 bp, Homo sapiens
  misc_feature (230)..(230): n is a, c, g, or t
gggcgttgtcttcacagagctccacgcaggagatcggtgaggagctgatcaacggagtcatctactccatctccctgcgcaaggtgcagctgcaccacggaggcaacaaggggcagcgctggctcgggagctccacgcaggagatcggtgaggagctgatcaacggagtcatctactccatctccccgcgcaagtgcagctgcaccacggaggcaacaaggggcagcgcnggctcgggtatgagaatgagtcggccctgaacctttatgagacttgcaaggtgcggaccgtgaaggctggcacgctggagaagctggtggagcacctggtgccagccttccagggcagcgacctctcctacgtcaccatcttcctgtgtacctatagagccttcaccaccacccaacaggtcctggacctgctgttcaaaaggtacggtagatgtgacgccctcacggctcctctagatacggctgcatcctcccctattccgacgaggatggtggaccccaggaccaacttaaaaatgccatctcctccatcctgggcacctggctggaccagtactcggaggatttctgtcaacctccggactttccctgcctcaagcagctggtggcctacgtgcagctcaacatgccaggctcagacctggagcgccgtgcccaccttctcctggcccagctggagcactcggaacccattgaggcagagcctgaggctctgtcaccagtgccagctctaaaaccaactccagagctcgagctagctctaacaccagctcgagcacccagcccagtgccggctccagccccggagccagagccagctccaacaccagctccaggttcagagctagaagtagctccagcaccagctccggagctccagcaggctccagagccagctgtgggactagaatcggctccagcgccagctctggaactagagccagctccagaacaggatccagctccctcacaaactctagagctggagccagctccagcgccagttccatcattacagccttcctggccttcacctgtggttgcagagaacgggctgagtgaggagaagcctcacctcttggtgttccctccagatctggtggcagagcagtttacactgatggatgcggaactgttcaagaaggtggtgccctaccactgcctgggctccatctggtcccagcgggacaagaagggcaaggagcacctggcgcccaccatccgcgccactgtcacccagttcaacagtgtggccaactgtgtcatcaccacctgcctcgggaaccgaagcacgaaagccccagacagggccagggtggtggagcactggatcgaggtggccagggagtgccggatcctcaagaacttctcgtcactgtatgccatcctctcggccctgcagagcaactccatccaccgtctgaagaagacgtgggaagacgtttccagggacagtttccggatctttcagaagctgtcagagatcttctcagatgagaacaactactcattgagccgggagctgctcatcaaggagggcacctccaagtttgccaccctggagatgaaccccaagagagcccagaaacggccgaaggagacgggcatcatccagggcaccgttccctacctgggcacgttcctcaccgacctggtgatgctggacactgccatgaaggactatctgtatggcagactcatcaactttgagaagaggaggaaggagttcgaggtgatcgcccagatcaagctgctgcagtcggcctgcaacaactacagcatcgcgccagatgagcaatttggggcctggttccgggccgtggagcggctcagcgagactgagagctacaacctgtcgtgcgagctggagcccccatccgagtcagccagcaacaccctcaggaccaagaagaacacagccattgtcaagcgctggagcgaccgccaggcccccagcactgagctcagtaccagtggcagctcccactccaagtcctgtgaccagctcaggtgtggcccctacctcagcagcggggacatcgctgacgcgctcagcgtgcactcggccggctcctctagctccgacgtggaggagatcaacatcagcttcgtcccggagtctcctgatggccaggaaaagaagttctgggaatcagcctcacagtcatccccggagacctccggcatcagctcagcctccagcagcacctcgtcctcctcagcctccaccacgcccgtggctgccacacgcacccacaagcgctctgtctcagggctctgcaactccagctccgcgctgccgctctacaaccagcaggtgggcgactgctgtatcatccgcgtcagcctggacgtggacaatggcaacatgtacaagagcatcctggtgaccagccaagataaggctccggctgtaatccgcaaggccatggacaaacacaacctggaggaggaggagccggaggactatgagctgctgcagattctctcagatgaccggaagctgaagatccctgaaaacgccaacgtcttctatgccatgaactctaccgccaactatgactttgtcctgaagaagcggaccttcaccaagggagtgaaggtcaagcacggagccagctccaccctccctcgcatgaagcagaaaggactcaagattgccaagggcatcttctgagggcatcctcccagggtctggctggctggtagccaagcacttatggaccagagtggcccaggccagctgggcgccttcctcccacctgccagcccagggtaccccagactccagtttcatcctgaacctctcccgctgctgggattgacgcctgccattggtcaggctgacctggcctcccgtggaccactcgctgccttaggtgccttctgctctctggaaccagaggactagctgacttttgccaaggagcagtgccaacgggcatggcatggtgccctgcctgcccccgggcgccacctctgtacacttccctgacaccttcccaggtgtgggtcactgccacctgtgcccatgggcaccccagagcacccactgtgaccactgcagttctctcatgcccacaggcactggcctgtgaccttcgcaggggtcccggcccctcccaccactctagcctttctcaggctgcaccaaagattccatcatcagggccaactgagagtgagggagtctcacccaccgcttaccccagccctcccctgggagcagagagagaaaccctcttcatggaccagactctgcacccggtgagtgaggacagtcccagctgagtcccatcgatgttgaatctcatgccactgcaagtgccattcaccactgcgtcctgggctttacgagaccatgcaagacgggggttagtgaggaaggaggatttggggtgggggtggggtgattgaatatttgtataaaaagcaaaaagaaaaaaaaaatgtttgtttactgattggggaggggcaatatttatttgttgtaaatagcaaatgctagacttgaatattatattaaaatcctgtttctacta

SEQ ID NO: 466940 - DNA, 898 bp, Homo sapiens
tgagtctgggcagtgtggggctgagggaggccggacggcgcgcgtgcgtgctggcgtgcgttcactttcagcctggtgtggggcttgtaaacatataacataaaaatggcttccaaaagagctctggtcatcctggctaaaggagcagaggaaatggagacggtcatccctgtagatgtcatgaggcgagctgggattaaggtcaccgttgcaggcctggctggaaaagacccagtacagtgtagccgtgatgtggtcatttgtcctgatgccagccttgaagatgcaaaaaaagagggaccatatgatgtggtggttctaccaggaggtaatctgggcgcacagaatttatctgagtctgctgctgtgaaggagatactgaaggagcaggaaaaccggaagggcctgatagccgccatctgtgcaggtcctactgctctgttggctcatgaaataggttttggaagtaaagttacaacacaccctcttgctaaagacaaaatgatgaatggaggtcattacacctactctgagaatcgtgtggaaaaagacggcctgattcttacaagccgggggcctgggaccagcttcgagtttgcgcttgcaattgttgaagccctgaatggcaaggaggtggcggctcaagtgaaggctccacttgttcttaaagactagagcagcgaactgcgacgatcacttagagaaacaggccgttaggaatccattctcactgtgttcgctctaaacaaaacagtggtaggttaatgtgttcagaagtcgctgtccttactacttttgcggaagtatggaagtcacaactacacagagatttctcagcctacaaattgtgtctatacatttctaagccttgtttgcagaataaacagggcatttagca

SEQ ID NO: 466941 - DNA, 286 bp, Homo sapiens
cgagctcggtaccccacacgccgaaggaccatatgatgtggtggttctaccaggaggtaatctgggcgcacagaatttatctgagtctgctgctgtgaaggagatactgaaggagcaggaaaaccggaagggcctgatagccgccatctgtgcaggtcctactgctctgttggctcatgaaataggttttggaagtaaagttacaacacaccctcttgctaaagacaaaatgatgaatggagcactactcctactctgagaatcgtgtggagtctcggcgtgtgca

SEQ ID NO: 466942 - DNA, 964 bp, Homo sapiens
tgagtctgggcagtgtggggctgagggaggccggacggcgcgcgtgcgtgctggcgtgcgttcactttcagcctggtgtggggcttgtaaacatataacataaaaatggcttccaaaagagctctggtcatcctggctaaaggagcagaggaaatggagacggtcatccctgtagatgtcatgaggcgagctgggattaaggtcaccgttgcaggcctggctggaaaagacccagtacagtgtagccgtgatgtggtcatttgtcctgatgccagccttgaagatgcaaaaaaagagggaccatatgatgtggtggttctaccaggaggtaatctgggcgcacagaatttatctgagtctgctgctgtgaaggagatactgaaggagcaggaaaaccggaagggcctgatagccgccatctgtgcaggtcctactgctctgttggctcatgaaataggttttggaagtaaagttacaacacaccctcttgctaaagacaaaatgatgaatggaggtcattacacctactctgagaatcgtgtggaaaaagacggcctgattcttacaagccgggggcctgggaccagcttcgagtttgcgcttgcaattgttgaagccctgaatggcaaggaggtggcggctcaagtgaaggctccacttgttcttaaagactagagcagcgaactgcgacgatcacttagagaaacaggccgttaggaatccattctcactgtgttcgctctaaacaaaacagtggtaggttaatgtgttcagaagtcgctgtccttactacttttgcggaagtatggaagtcacaactacacagagatttctcagcctacaaattgtgtctatacatttctaagccttgtttgcagaataaacagggcatttagcaaactactgattgtttcttgttttgtctctcatttcttttgtgaaattaaattccgtatcaccttca

SEQ ID NO: 466943 - DNA, 1075 bp, Homo sapiens
ggctcagaaccggcgcggggcctgggtcggggccgccctcgcttccggcctcccagtcgggccctgtcgctggcgttggatttgactgaccgccagcgtggtggcaacgctgaagcgtccagaatcttctgcctaacctctcgccggcatggaactggctagccgttttattaaactctgttttgcgtggacggcttgtaaacatataacataaaaatggcttccaaaagagctctggtcatcctggctaaaggagcagaggaaatggagacggtcatccctgtagatgtcatgaggcgagctgggattaaggtcaccgttgcaggcctggctggaaaagacccagtacagtgtagccgtgatgtggtcatttgtcctgatgccagccttgaagatgcaaaaaaagagggaccatatgatgtggtggttctaccaggaggtaatctgggcgcacagaatttatctgagtctgctgctgtgaaggagatactgaaggagcaggaaaaccggaagggcctgatagccgccatctgtgcaggtcctactgctctgttggctcatgaaataggttttggaagtaaagttacaacacaccctcttgctaaagacaaaatgatgaatggaggtcattacacctactctgagaatcgtgtggaaaaagacggcctgattcttacaagccgggggcctgggaccagcttcgagtttgcgcttgcaattgttgaagccctgaatggcaaggaggtggcggctcaagtgaaggctccacttgttcttaaagactagagcagcgaactgcgacgatcacttagagaaacaggccgttaggaatccattctcactgtgttcgctctaaacaaaacagtggtaggttaatgtgttcagaagtcgctgtccttactacttttgcggaagtatggaagtcacaactacacagagatttctcagcctacaaattgtgtctatacatttctaagccttgtttgcagaataaacagggcatttagcaaactactgattgtttcttgttttgtctctcatttcttttgtgaaattaaattccgtatcaccttca

SEQ ID NO: 466944 - DNA, 1095 bp, Homo sapiens
tgagtctgggcagtgtggggctgagggaggccggacggcgcgcgtgcgtgctggcgtgcgttcactttcagcctggtgtggggcttgtaaacatataacataaaaatggcttccaaaagagctctggtcatcctggctaaaggagcagaggaaatggagacggtcatccctgtagatgtcatgaggcgagctgggattaaggtcaccgttgcaggcctggctggaaaagacccagtacagtgtagccgtgatgtggtcatttgtcctgatgccagccttgaagatgcaaaaaaagagggaccatatgatgtggtggttctaccaggaggtaatctgggcgcacagaatttatctgagtctgctgctgtgaaggagatactgaaggagcaggaaaaccggaagggcctgatagccgccatctgtgcaggtcctactgctctgttggctcatgaaataggttttggaagtaaagttacaacacaccctcttgctaaagacaaaatgatgaatggaggtcattacacctactctgagaatcgtgtggaaaaagacggcctgattcttacaagccgggggcctgggaccagcttcgagtttgcgcttgcaattgttgaagccctgaatggcaaggaggtggcggctcaagtgaaggctccacttgttcttaaagactagagcagcgaactgcgacgatcacttagagaaacaggccgttaggaatccattctcactgtgttcgctctaaacaaaacagtggtaggttaatgtgttcagaagtcgctgtccttactacttttgcggaagtatggaagtcacaactacacagagatttctcagcctacaaattgtgtctatacatttctaagccttgtttgcagaataaacagggcatttagcaaaaaaaaaaaaaaaaaaaaaaaaaaaaaaaaaaaaaaaaaaaaaaaaaaaaaaaaaagaaaaaacccattgcccggtgttttcaaaaggggggcctgggaaaaccctggggtaaccaaactaaattggcttgggggcatccccttttttgcccctaggttgatatactgagcccctccccgttcgcccatgcgtggc

SEQ ID NO: 466945 - DNA, 1072 bp, Homo sapiens
tgagtctgggcagtgtggggctgagggaggccggacggcgcgcgtgcgtgctggcgtgcgttcactttcagcctggtgtggggcttgtaaacatataacataaaaatggcttccaaaagagctctggtcatcctggctaaaggagcagaggaaatggagacggtcatccctgtagatgtcatgaggcgagctgggattaaggtcaccgttgcaggcctggctggaaaagacccagtacagtgtagccgtgatgtggtcatttgtcctgatgccagccttgaagatgcaaaaaaagagggaccatatgatgtggtggttctaccaggaggtaatctgggcgcacagaatttatctgagtctgctgctgtgaaggagatactgaaggagcaggaaaaccggaagggcctgatagccgccatctgtgcaggtcctactgctctgttggctcatgaaataggttttggaagtaaagttacaacacaccctcttgctaaagacaaaatgatgaatggaggtcattacacctactctgagaatcgtgtggaaaaagacggcctgattcttacaagccgggggcctgggaccagcttcgagtttgcgcttgcaattgttgaagccctgaatggcaaggaggtggcggctcaagtgaaggctccacttgttcttaaagactagagcagcgaactgcgacgatcacttagagaaacaggccgttaggaatccattctcactgtgttcgctctaaacaaaacagtggtaggttaatgtgttcagaagtcgctgtccttactacttttgcggaagtatggaagtcacaactacacagagatttctcagcctacaaattgtgtctatacatttctaagccttgtttgcagaataaacagggcatttagcaaaaaaaaaaaaaaaaaaaaaaaaaaaagggggcggtaaattccgggggaaaggcaccgttttgaaaggcaagggtaaaaagcagggggaaacgagggaaggctggttgaggacacggggaggacccaaacgaaaaatgggcgtgggttgtaataagaggaggagatataaagag

SEQ ID NO: 466946 - DNA, 1192 bp, Homo sapiens
tgagtctgggcagtgtggggctgagggaggccggacggcgcgcgtgcgtgctggcgtgcgttcactttcagcctggtgtggggtgagtggtacccaacgggccggggcgccgcgtccgcaggaagaggcgcggggtgcaggcttgtaaacatataacataaaaatggcttccaaaagagctctggtcatcctggctaaaggagcagaggaaatggagacggtcatccctgtagatgtcatgaggcgagctgggattaaggtcaccgttgcaggcctggctggaaaagacccagtacagtgtagccgtgatgtggtcatttgtcctgatgccagccttgaagatgcaaaaaaagagggaccatatgatgtggtggttctaccaggaggtaatctgggcgcacagaatttatctgagtctgctgctgtgaaggagatactgaaggagcaggaaaaccggaagggcctgatagccgccatctgtgcaggtcctactgctctgttggctcatgaaataggttttggaagtaaagttacaacacaccctcttgctaaagacaaaatgatgaatggaggtcattacacctactctgagaatcgtgtggaaaaagacggcctgattcttacaagccgggggcctgggaccagcttcgagtttgcgcttgcaattgttgaagccctgaatggcaaggaggtggcggctcaagtgaaggctccacttgttcttaaagactagagcagcgaactgcgacgatcacttagagaaacaggccgttaggaatccattctcactgtgttcgctctaaacaaaacagtggtaggttaatgtgttcagaagtcgctgtccttactacttttgcggaagtatggaagtcacaactacacagagatttctcagcctacaaattgtgtctatacatttctaagccttgtttgcagaataaacagggcatttagcaaaaaaaaaaaaaaaaaaaaactcgagactagttctctcgtctactactccgggatatctcctttggcgcgacacggtctacagcggtcaccgcctgaggacgagtgacgctggccgcacaacgaggtatacagtaccggggaccctcgccctcagacatagaaaccggggaggggaaacctgccccgtatcccggtgagtggacatgctccagggcagagagccgcaatggcaggc

SEQ ID NO: 466947 - DNA, 831 bp, Homo sapiens
tagaggatccccgatacatacttccgacgggcatccctgtagatgtcatgatgcgagctgggattaaggtcaccgttgcaggcctggctggaaaagacccagtacagtgtagccgtgatgtggtcatttgtcctgatgccagccttgaagatgcaaaaaaagagggaccatatgatgtggtggttctaccaggaggtaatctgggcgcacagaatttatctgagtctgctgctgtgaaggagatactgaaggagcaggaaaaccggaagggcctgatagccgccatctgtgcaggtcctactgctctgttggctcatgaaataggttttggaagtaaagttacaacacaccctcttgctaaagacaaaatgatgaatggaggtcattacacctactctgagaatcgtgtggaaaaagacggcctgattcttacaagccgggggcctgggaccagcttcgagtttgcgcttgcaattgttgaagccctgaatggcaaggaggtggcggctcaagtgaaggctccacttgttcttaaagactagagcagcgaactgcgacgatcacttagagaaacaggccgttaggaatccattctcactgtgttcgctctaaacaaaacagtggtaggttaatgtgttcagaagtcgctgtccttactacttttgcggaagtatggaagtcacaactacacagagatttctcagcctacaaattgtgtctatacatttctaagccttgtttgcagaataaacagggcatttagcaaactactgattgtttcttgttttgtctctcatttcttttgtgaaattaaattccgtatcaccttca

SEQ ID NO: 466948 - DNA, 822 bp, Homo sapiens
tgagtctgggcagtgtggggctgagggaggccggacggcgcgcgtgcgtgctggcgtgcgttcactttcagcctggtgtggggtgagtggtacccaacgggccggggcgccgcgtccgcaggaagaggcgcggggtgcaggcttgtaaacatataacataaaaatggcttccaaaagagctctggtcatcctggctaaaggagcagaggaaatggagacggtcatccctgtagatgtcatgaggcgagctgggattaaggtcaccgttgcaggcctggctggaaaagacccagtacagtgtagccgtgatgtggtcatttgtcctgatgccagccttgaagatgcaaaaaaagagggaccatatgatgtggtggttctaccaggaggtaatctgggcgcacagaatttatctgagtctgctgctgtgaaggagatactgaaggagcaggaaaaccggaagggcctgatagccgccatctgtgcaggtcctactgctctgttggctcatgaaataggttttggaagtaaagttacaacacaccctcttgctaaagacaaaatgatgaatggaggtcattacacctactctgagaatcgtgtggaaaaagacggcctgattcttacaagccgggggcctgggaccagcttcgagtttgcgcttgcaattgttgaagccctgaatggcaaggaggtggcggctcaagtgaaggctccacttgttcttaaagactagagcagcgaactgcgacgatcacttagagaaacaggccgttaggaatccattctcactgtgttcgctctaatttccgggggatcctctag

SEQ ID NO: 466949 - DNA, 1057 bp, Homo sapiens
tgagtctgggcagtgtggggctgagggaggccggacggcgcgcgtgcgtgctggcgtgcgttcactttcagcctggtgtggggcttgtaaacatataacataaaaatggcttccaaaagagctctggtcatcctggctaaaggagcagaggaaatggagacggtcatccctgtagatgtcatgaggcgagctgggattaaggtcaccgttgcaggcctggctggaaaagacccagtacagtgtagccgtgatgtggtcatttgtcctgatgccagccttgaagatgcaaaaaaagagggaccatatgatgtggtggttctaccaggaggtaatctgggcgcacagaatttatctgagtctgctgctgtgaaggagatactgaaggagcaggaaaaccggaagggcctgatagccgccatctgtgcaggtcctactgctctgttggctcatgaaataggttttggaagtaaagttacaacacaccctcttgctaaagacaaaatgatgaatggagattcagggtctcactatgttgcccaagcagtacttaaactcctgggctcaaatgaccctcccaccttggtctcccaaagtgctggaattacaggtcattacacctactctgagaatcgtgtggaaaaagacggcctgattcttacaagccgggggcctgggaccagcttcgagtttgcgcttgcaattgttgaagccctgaatggcaaggaggtggcggctcaagtgaaggctccacttgttcttaaagactagagcagcgaactgcgacgatcacttagagaaacaggccgttaggaatccattctcactgtgttcgctctaaacaaaacagtggtaggttaatgtgttcagaagtcgctgtccttactacttttgcggaagtatggaagtcacaactacacagagatttctcagcctacaaattgtgtctatacatttctaagccttgtttgcagaataaacagggcatttagcaaactactgattgtttcttgttttgtctctcatttcttttgtgaaattaaattccgtatcaccttca

SEQ ID NO: 466950 - DNA, 593 bp, Homo sapiens
ctgatccgcttaaggcaggaggggccggaagggctgatagccgccatctgtgcagtgtcctactgctctgttggctcatgaaataggttttggaagtaaagttacaacacaccctcttgctaaagacaaaatgatgaatggaggtcattacacctactctgagaatcgtgtggaaaaagacggcctgattcttacaagccgggggcctgggaccagcttcgagtttgcgcttgcaattgttgaagccctgaatggcaaggaggtggcggctcaagtgaaggctccacttgttcttaaagactagagcagcgaactgcgacgatcacttagagaaacaggccgttaggaatccattctcactgtgttcgctctaaacaaaacagtggtaggttaatgtgttcagaagtcgctgtccttactacttttgcggaagtatggaagtcacaactacacagagatttctcagcctacaaattgtgtctatacatttctaagccttgtttgcagaataaacagggcatttagcaaactactgattgtttcttgttttgtctctcatttcttttgtgaaattaaattccgtatcaccttca

SEQ ID NO: 466951 - DNA, 902 bp, Homo sapiens
tgagtctgggcagtgtggggctgagggaggccggacggcgcgcgtgcgtgctggcgtgcgttcactttcagcctggtgtggggtgagtggtacccaacgggccggggcgccgcgtccgcaggaagaggcgcggggtgcaggcttgtaaacatataacataaaaatggcttccaaaagagctctggtcatcctggctaaaggagcagaggaaatggagacggtcatccctgtagatgtcatgaggcgagctgggattaaggtcaccgttgcaggcctggctggaaaagacccagtacagtgtagccgtgatgtggtcatttgtcctgatgccagccttgaagatgcaaaaaaagagggaccatatgatgtggtggttctaccaggaggtaatctgggcgcacagaatttatctgagtctgctgctgtgaaggagatactgaaggagcaggaaaaccggaagggcctgatagccgccatctgtgcaggtcctactgctctgttggctcatgaaataggttttggaagtaaagttacaacacaccctcttgctaaagacaaaatgatgaatggaggtcattacacctactctgagaatcgtgtggagcttgcaattgttgaagccctgaatggcaaggaggtggcggctcaagtgaaggctccacttgttcttaaagactagagcagcgaactgcgacgatcacttagagaaacaggccgttaggaatccattctcactgtgttcgctctaaacaaaacagtggtaggttaatgtgttcagaagtcgctgtccttactacttttgcggaagtatggaagtcacaactacacagagatttctcagcctacaaattgtgtctatacatttctaagccttgtttgcagaataaacagggcatttagca

SEQ ID NO: 466952 - DNA, 910 bp, Homo sapiens
tgagtctgggcagtgtggggctgagggaggccggacggcgcgcgtgcgtgctggcgtgcgttcactttcagcctggtgtggggcttgtaaacatataacataaaaatggcttccaaaagagctctggtcatcctggctaaaggagcagaggaaatggagacggtcatccctgtagatgtcatgaggcgagctgggattaaggtcaccgttgcaggcctggctggaaaagacccagtacagtgtagccgtgatgtggtcatttgtcctgatgccagccttgaagatgcaaaaaaagagggaccatatgatgtggtggttctaccaggaggtaatctgggcgcacagaatttatctgagtctgctgctgtgaaggagatactgaaggagcaggaaaaccggaagggcctgatagccgccatctgtgcaggtcctactgctctgttggctcatgaaataggttttggaagtaaagttacaacacaccctcttgctaaagacaaaatgatgaatggaggtcattacacctactctgagaatcgtgtggagcttgcaattgttgaagccctgaatggcaaggaggtggcggctcaagtgaaggctccacttgttcttaaagactagagcagcgaactgcgacgatcacttagagaaacaggccgttaggaatccattctcactgtgttcgctctaaacaaaacagtggtaggttaatgtgttcagaagtcgctgtccttactacttttgcggaagtatggaagtcacaactacacagagatttctcagcctacaaattgtgtctatacatttctaagccttgtttgcagaataaacagggcatttagcaaactactgattgtttcttgttttgtctctcatttcttttgtgaaattaaattccgtatcaccttca

SEQ ID NO: 466953 - DNA, 838 bp, Homo sapiens
tgagtctgggcagtgtggggctgagggaggccggacggcgcgcgtgcgtgctggcgtgcgttcactttcagcctggtgtggggcttgtaaacatataacataaaaatggcttccaaaagagctctggtcatcctggctaaaggagcagaggaaatggagacggtcatccctgtagatgtcatgaggcgagctgggattaaggtcaccgttgcaggcctggctggaaaagacccagtacagtgtagccgtgatgtggtcatttgtcctgatgccagccttgaagatgcaaaaaaagagtctgctgctgtgaaggagatactgaaggagcaggaaaaccggaagggcctgatagccgccatctgtgcaggtcctactgctctgttggctcatgaaataggttttggaagtaaagttacaacacaccctcttgctaaagacaaaatgatgaatggaggtcattacacctactctgagaatcgtgtggaaaaagacggcctgattcttacaagccgggggcctgggaccagcttcgagtttgcgcttgcaattgttgaagccctgaatggcaaggaggtggcggctcaagtgaaggctccacttgttcttaaagactagagcagcgaactgcgacgatcacttagagaaacaggccgttaggaatccattctcactgtgttcgctctaaacaaaacagtggtaggttaatgtgttcagaagtcgctgtccttactacttttgcggaagtatggaagtcacaactacacagagatttctcagcctacaaattgtgtctatacatttctaagccttgtttgcagaataaacagggcatttagca

SEQ ID NO: 466954 - DNA, 675 bp, Homo sapiens
tgagtctgggcagtgtggggctgagggaggccggacggcgcgcgtgcgtgctggcgtgcgttcactttcagcctggtgtggggtgagtggtacccaacgggccggggcgccgcgtccgcaggaagaggcgcggggtgcaggcttgtaaacatataacataaaaatggcttccaaaagagctctggtcatcctggctaaaggagcagaggaaatggagacggtcatccctgtagatgtcatgaggcgagctgggattaaggtcaccgttgcaggcctggctggaaaagacccagtacagtgtagccgtgatgtggtcatttgtcctgatgccagccttgaagatgcaaaaaaagagggaccatatgatgtggtggttctaccaggaggtaatctgggcgcacagaatttatctgagtctgctgctgtgaaggagatactgaaggagcaggaaaaccggaagggcctgatagccgccatctgtgcaggtcctactgctctgttggctcatgaaataggttttggaagtaaagttacaacacaccctctttttttgcatcttcaaggctggcatcaggacaaatgaccacatcacggctacactgtactgggtcttttccagccaggcctgcaacggtgaccttaatcccagctcgcctcatgacggccagtagtggt

SEQ ID NO: 466955 - DNA, 725 bp, Homo sapiens
acatctcccccaacacttaaagtcttagcagctgcatttaactcacgcatatttgtttcattctaacagtggtttctgtcaccctttgctctgcacagttttaaaaatacctttgtagggggcttctaagagcttggagtgcctagtaaatgtttttgaatggttagctacagtgttgggtttatatgctgtaatagtgaatttaattggtaagtaatcgtctttctcgtcacatagcccattaggatgtcaccttttctgtttctactttgcaggtcattacacctactctgagaatcgtgtggaaaaagacggcctgattcttacaagccgggggcctgggaccagcttcgagtttgcgcttgcaattgttgaagccctgaatggcaaggaggtggcggctcaagtgaaggctccacttgttcttaaagactagagcagcgaactgcgacgatcacttagagaaacaggccgttaggaatccattctcactgtgttcgctctaaacaaaacagtggtaggttaatgtgttcagaagtcgctgtccttactacttttgcggaagtatggaagtcacaactacacagagatttctcagcctacaaattgtgtctatacatttctaagccttgtttgcagaataaacagggcatttagcaaactactgattgtttcttgttttgtctctcatttcttttgtgaaattaaattccgtatcaccttca

SEQ ID NO: 466956 - DNA, 717 bp, Homo sapiens
tgagtctgggcagtgtggggctgagggaggccggacggcgcgcgtgcgtgctggcgtgcgttcactttcagcctggtgtggggtgagtggtacccaacgggccggggcgccgcgtccgcaggaagaggcgcggggtgcaggcttgtaaacatataacataaaaatggcttccaaaagagctctggtcatcctggctaaaggagcagaggaaatggagacggtcatccctgtagatgtcatgaggcgagctgggattaaggtcaccgttgcaggcctggctggaaaagacccagtacagtgtagccgtgatgtggtcatttgtcctgatgccagccttgaagatgcaaaaaaagagggaccatatgatgtggtggttctaccaggaggtaatctgggcgcacagaatttatctgagtctgctgctgtgaaggagatactgaaggagcaggaaaaccggaagggcctgatagccgccatctgtgcagcctactgctctgttgctcatcgaaataggttttggaaaaaaaaaaaaaaaaaaaaaaaaaaaaaaaaaaaaaaaaaaaaaaaaaaaaaaaaagaaaaaacccattgcccggtgttttcaaaaggggggcctgggaaaaccctggggtaaccaaactaaattggcttgggggcatccccttttttgcccctaggttgatatactgagcccctccccgttcgcccatgcgtggc

SEQ ID NO: 466957 - DNA, 750 bp, Homo sapiens
tgagtctgggcagtgtggggctgagggaggccggacggcgcgcgtgcgtgctggcgtgcgttcactttcagcctggtgtggggtgagtggtacccaacgggccggggcgccgcgtccgcaggaagaggcgcggggtgcaggcttgtaaacatataacataaaaatggcttccaaaagagctctggtcatcctggctaaaggagcagaggaaatggagacggtcatccctgtagatgtcatgaggcgagctgggattaaggtcaccgttgcaggcctggctggaaaagacccagtacagtgtagccgtgatgtggtcatttgtcctgatgccagccttgaagatgcaaaaaaagagggaccatatgatgtggtggttctaccaggaggtaatctgggcgcacagaatttatctgagtctgctgctgtgaaggagatactgaaggagcaggaaaaccggaagggcctgatagccgccatctgtgcaggtcttcattaaatatttgtcagggccgggcgcagtggctcacgcctgtaatcccagcactttgggaggctgaggcgggcagatcacctgaggtcaggagttcaagaccagcctggccaccatggtgaaaccccatctctactaaaaatacagaaattagccaggcgtggtggcgggcgcctgtaatcccagctactcgggaggctgaggcaggagaatcgcttgaacccgggaggcggaggttgcagtgagccgagattgtgccg

SEQ ID NO: 466958 - DNA, 581 bp, Homo sapiens
tgagtctgggcagtgtggggctgagggaggccggacggcgcgcgtgcgtgctggcgtgcgttcactttcagcctggtgtggggcttgtaaacatataacataaaaatggcttccaaaagagctctggtcatcctggctaaaggagcagaggaaatggagacggtcatccctgtagatgtcatgaggcgagctgggattaaggtcaccgttgcaggcctggctggaaaagacccagtacagtgtagccgtgatgtggtcatttgtcctgatgccagccttgaagatgcaaaaaaagagaggaaggagattatactacccctgctactctgcagcgtggacatccttgcatgtcactacatacagggaccatatgatgtggtggttctaccaggaggtaatctgggcgcacagaatttatctgagtctgctgctgtgaaggagatactgaaggagcaggaaaaccggaagggcctgatagccgccatctgtgcagaggtgacgtgcaggggcagcctgtgttgcagcgtcattggtgggtggggtagcctttcattcgatggtttgattccaaatagctcttc

SEQ ID NO: 466959 - DNA, 465 bp, Homo sapiens
tgagtctgggcagtgtggggctgagggaggccggacggcgcgcgtgcgtgctggcgtgcgttcactttcagcctggtgtggggtgagtggtacccaacgggccggggcgccgcgtccgcaggaagaggcgcggggtgcaggcttgtaaacatataacataaaaatggcttccaaaagagctctggtcatcctggctaaaggagcagaggaaatggagacggtcatccctgtagatgtcatgaggcgagctgggattaaggtcaccgttgcaggcctggctggaaaagacccagtacagtgtagccgtgatgtggtcatttgtcctgatgccagccttgaagatgcaaaaaaagaggaccaactcatccccctcctatgaaaaaacttcttaccactcaccctagcattatttatataatatgtctccatacccattacaatttccagcattccccctcaaaccta

SEQ ID NO: 466960 - DNA, 491 bp, Homo sapiens
gcggccgcctactactactaaattcgcggccgcgtcgacaggtcattacacctactctgagaatcgtgtggaaaaagacggcctgattcttacaagccgggggcctgggaccagcttcgagtttgcgcttgcaattgttgaagccctgaatggcaaggaggtggcggctcaagtgaaggctccacttgttcttaaagactagagcagcgaactgcgacgatcacttagagaaacaggccgttaggaatccattctcactgtgttcgctctaaacaaaacagtggtaggttaatgtgttcagaagtcgctgtccttactacttttgcggaagtatggaagtcacaactacacagagatttctcagcctacaaattgtgtctatacatttctaagccttgtttgcagaataaacagggcatttagcaaactactgattgtttcttgttttgtctctcatttcttttgtgaaattaaattccgtatcaccttca

SEQ ID NO: 466961 - DNA, 921 bp, Homo sapiens
tgagtctgggcagtgtggggctgagggaggccggacggcgcgcgtgcgtgctggcgtgcgttcactttcagcctggtgtggggtgagtggtacccaacgggccggggcgccgcgtccgcaggaagaggcgcggggtgcaggcttgtaaacatataacataaaaatggcttccaaaagagctctggtcatcctggctaaaggagcagaggaaatggagacggtcatccctgtagatgtcatgaggcgagctgggattaaggtcaccgttgcaggcctggctggaaaagacccagtacagtgtagccgtgatgtggtcatttgtcctgatgccagccttgaagatgcaaaaaaagagggaccatatgatgtggtggttctaccaggaggtaatctgggcgcacagaatttatctgagtctgctgctgtgaaggagatactgaaggagcaggaaaaccggaagggcctgatagccgccatctgtgcagggaagtaaagttacaacacaccctcttgctaaagacaaaatgatgaatggaggtcattacacctactctgagaatcgtgtggaaaaagacggcctgattcttacaagccgggggcctgggaccagcttcgagtttgcgcttgcaattgttgaagccctgaatggcaaggaggtggcggctcaagtgaaggctccacttgttcttaaagactagagcagcgaactgcgacgatcacttagagaaacaggccgttaggaatccattctcactgtgttcgctctaaacaaaacagtggtaggttaatgtgttcagaagtcgctgtccttactacttttgcggaagtatggaagtcacaactacacagagatttctcagcctacaaattgtgtctatacatttctaagccttgtttgcagaataaacagggcatttagca

SEQ ID NO: 466962 - DNA, 896 bp, Homo sapiens
tgagtctgggcagtgtggggctgagggaggccggacggcgcgcgtgcgtgctggcgtgcgttcactttcagcctggtgtggggtgagtggtacccaacgggccggggcgccgcgtccgcaggaagaggcgcggggtgcaggcttgtaaacatataacataaaaatggcttccaaaagagctctggtcatcctggctaaaggagcagaggaaatggagacggtcatccctgtagatgtcatgaggcgagctgggattaaggtcaccgttgcaggcctggctggaaaagacccagtacagtgtagccgtgatgtggtcatttgtcctgatgccagccttgaagatgcaaaaaaagagtctgctgctgtgaaggagatactgaaggagcaggaaaaccggaagggcctgatagccgccatctgtgcaggtcctactgctctgttggctcatgaaataggttttggaagtaaagttacaacacaccctcttgctaaagacaaaatgatgaatggaggtcattacacctactctgagaatcgtgtggaaaaagacggcctgattcttacaagccgggggcctgggaccagcttcgagtttgcgcttgcaattgttgaagccctgaatggcaaggaggtggcggctcaagtgaaggctccacttgttcttaaagactagagcagcgaactgcgacgatcacttagagaaacaggccgttaggaatccattctcactgtgttcgctctaaacaaaacagtggtaggttaatgtgttcagaagtcgctgtccttactacttttgcggaagtatggaagtcacaactacacagagatttctcagcctacaaattgtgtctatacatttctaagccttgtttgcagaataaacagggcatttagca

SEQ ID NO: 466963 - DNA, 936 bp, Homo sapiens
  misc_feature (22)..(22): n is a, c, g, or t
  misc_feature (78)..(79): n is a, c, g, or t
  misc_feature (94)..(94): n is a, c, g, or t
  misc_feature (112)..(112): n is a, c, g, or t
  misc_feature (114)..(114): n is a, c, g, or t
  misc_feature (175)..(175): n is a, c, g, or t
  misc_feature (197)..(197): n is a, c, g, or t
  misc_feature (221)..(221): n is a, c, g, or t
  misc_feature (251)..(251): n is a, c, g, or t
  misc_feature (268)..(268): n is a, c, g, or t
  misc_feature (279)..(279): n is a, c, g, or t
  misc_feature (284)..(284): n is a, c, g, or t
  misc_feature (332)..(333): n is a, c, g, or t
  misc_feature (366)..(366): n is a, c, g, or t
  misc_feature (392)..(392): n is a, c, g, or t
ccctgggctaaaagggaggcangagggaatattggacgaaccggtcattccccttgtacgattgttcattgacggcgnngcgtgggatttaaanggtccaccccgtttgcangncccttggcttggaaaaatgaccccacgtaccacgtgttatgcccgttgattgttggttcantttcgtcccttgattgcccacnccgttcgaacgattgcaaaaaaanaacgacgggacccattattgattgtgggtnggttcttacccacgganggtaactcgtngggcngcaccacgaatttatattcttgacgtcgtgcgtgcttgtcgaacggannatacttgaacggacgcacggaaaaccccggaangggcgctgactaggcctgccactctngtgcacggtcctactgctctgttggctcatgaaataggttttggaagtaaagttacaacacaccctcttgctaaagacaaaatgatgaatggaggtcattacacctactctgagaatcgtgtggaaaaagacggcctgattcttacaagccgggggcctgggaccagcttcgagtttgcgcttgcaattgttgaagccctgaatggcaaggaggtggcggctcaagtgaaggctccacttgttcttaaagactagagcagcgaactgcgacgatcacttagagaaacaggccgttaggaatccattctcactgtgttcgctctaaacaaaacagtggtaggttaatgtgttcagaagtcgctgtccttactacttttgcggaagtatggaagtcacaactacacagagatttctcagcctacaaattgtgtctatacatttctaagccttgtttgcagaataaacagggcatttagcaaactactgattgtttcttgttttgtctctcatttcttttgtgaaattaaattccgtatcaccttca

SEQ ID NO: 466964 - DNA, 968 bp, Homo sapiens
tgagtctgggcagtgtggggctgagggaggccggacggcgcgcgtgcgtgctggcgtgcgttcactttcagcctggtgtggggtgagtggtacccaacgggccggggcgccgcgtccgcaggaagaggcgcggggtgcaggcttgtaaacatataacataaaaatggcttccaaaagagctctggtcatcctggctaaaggagcagaggaaatggagacggtcatccctgtagatgtcatgaggcgagctgggattaaggtcaccgttgcaggcctggctggaaaagacccagtacagtgtagccgtgatgtggtcatttgtcctgatgccagccttgaagatgcaaaaaaagagggaccatatgatgtggtggttctaccaggaggtaatctgggcgcacagaatttatctgagtctgctgctgtgaaggagatactgaaggagcaggaaaaccggaagggcctgatagccgccatctgtgcaggtcctactgctctgttggctcatgaaataggttttggaagtaaagttacaacacaccctcttgctaaagacaaaatgatgaatggaggtcattacacctactctgagaatcgtgtggagcttgcaattgttgaagccctgaatggcaaggaggtggcggctcaagtgaaggctccacttgttcttaaagactagagcagcgaactgcgacgatcacttagagaaacaggccgttaggaatccattctcactgtgttcgctctaaacaaaacagtggtaggttaatgtgttcagaagtcgctgtccttactacttttgcggaagtatggaagtcacaactacacagagatttctcagcctacaaattgtgtctatacatttctaagccttgtttgcagaataaacagggcatttagcaaactactgattgtttcttgttttgtctctcatttcttttgtgaaattaaattccgtatcaccttca

SEQ ID NO: 466965 - DNA, 862 bp, Homo sapiens
tgagtctgggcagtgtggggctgagggaggccggacggcgcgcgtgcgtgctggcgtgcgttcactttcagcctggtgtggggcttgtaaacatataacataaaaatggcttccaaaagagctctggtcatcctggctaaaggagcagaggaaatggagacggtcatccctgtagatgtcatgaggcgagctgggggaccatatgatgtggtggttctaccaggaggtaatctgggcgcacagaatttatctgagtctgctgctgtgaaggagatactgaaggagcaggaaaaccggaagggcctgatagccgccatctgtgcaggtcctactgctctgttggctcatgaaataggttttggaagtaaagttacaacacaccctcttgctaaagacaaaatgatgaatggaggtcattacacctactctgagaatcgtgtggaaaaagacggcctgattcttacaagccgggggcctgggaccagcttcgagtttgcgcttgcaattgttgaagccctgaatggcaaggaggtggcggctcaagtgaaggctccacttgttcttaaagactagagcagcgaactgcgacgatcacttagagaaacaggccgttaggaatccattctcactgtgttcgctctaaacaaaacagtggtaggttaatgtgttcagaagtcgctgtccttactacttttgcggaagtatggaagtcacaactacacagagatttctcagcctacaaattgtgtctatacatttctaagccttgtttgcagaataaacagggcatttagcaaactactgattgtttcttgttttgtctctcatttcttttgtgaaattaaattccgtatcaccttca

SEQ ID NO: 466966 - DNA, 846 bp, Homo sapiens
gcggccgcctactactactaaattcgcggccgcgtcgacagacggtcatccctgtagatgtcatgaggcgagctgggattaaggtcaccgttgcaggcctggctggaaaagacccagtacagtgtagccgtgatgtggtcatttgtcctgatgccagccttgaagatgcaaaaaaagagggaccatatgatgtggtggttctaccaggaggtaatctgggcgcacagaatttatctgagtctgctgctgtgaaggagatactgaaggagcaggaaaaccggaagggcctgatagccgccatctgtgcaggtcctactgctctgttggctcatgaaataggttttggaagtaaagttacaacacaccctcttgctaaagacaaaatgatgaatggaggtcattacacctactctgagaatcgtgtggaaaaagacggcctgattcttacaagccgggggcctgggaccagcttcgagtttgcgcttgcaattgttgaagccctgaatggcaaggaggtggcggctcaagtgaaggctccacttgttcttaaagactagagcagcgaactgcgacgatcacttagagaaacaggccgttaggaatccattctcactgtgttcgctctaaacaaaacagtggtaggttaatgtgttcagaagtcgctgtccttactacttttgcggaagtatggaagtcacaactacacagagatttctcagcctacaaattgtgtctatacatttctaagccttgtttgcagaataaacagggcatttagcaaactactgattgtttcttgttttgtctctcatttcttttgtgaaattaaattccgtatcaccttca

SEQ ID NO: 466967 - DNA, 1095 bp, Homo sapiens
ggctcagaaccggcgcggggcctgggtcggggccgccctcgcttccggcctcccagtcgggccctgtcgctggcgttggatttgactgaccgccagcgtggtggcaacgctgaagcgtccagaatcttctgcctaacctctcgccggcatggaactggctagccgttttattaaactctgttttgcgtggacggtaaaccctccagataatctgcttgtaaacatataacataaaaatggcttccaaaagagctctggtcatcctggctaaaggagcagaggaaatggagacggtcatccctgtagatgtcatgaggcgagctgggattaaggtcaccgttgcaggcctggctggaaaagacccagtacagtgtagccgtgatgtggtcatttgtcctgatgccagccttgaagatgcaaaaaaagagggaccatatgatgtggtggttctaccaggaggtaatctgggcgcacagaatttatctgagtctgctgctgtgaaggagatactgaaggagcaggaaaaccggaagggcctgatagccgccatctgtgcaggtcctactgctctgttggctcatgaaataggttttggaagtaaagttacaacacaccctcttgctaaagacaaaatgatgaatggaggtcattacacctactctgagaatcgtgtggaaaaagacggcctgattcttacaagccgggggcctgggaccagcttcgagtttgcgcttgcaattgttgaagccctgaatggcaaggaggtggcggctcaagtgaaggctccacttgttcttaaagactagagcagcgaactgcgacgatcacttagagaaacaggccgttaggaatccattctcactgtgttcgctctaaacaaaacagtggtaggttaatgtgttcagaagtcgctgtccttactacttttgcggaagtatggaagtcacaactacacagagatttctcagcctacaaattgtgtctatacatttctaagccttgtttgcagaataaacagggcatttagcaaactactgattgtttcttgttttgtctctcatttcttttgtgaaattaaattccgtatcaccttca

SEQ ID NO: 466968 - DNA, 952 bp, Homo sapiens
gccgcgtcgacacggctgcgagagacgacagaagggggctggcgtgcgttcattttcagcctggtgtggggcttgtaaacatataacataaaaatggcttccaaaagagctctggtcatcctggctaaaggagcagaggaaatggagacggtcatccctgtagatgtcatgaggcgagctgggattaaggtcaccgttgcaggcctggctggaaaagacccagtacagtgtagccgtgatgtggtcatttgtcctgatgccagccttgaagatgcaaaaaaagagggaccatatgatgtggtggttctaccaggaggtaatctgggcgcacagaatttatctgagtctgctgctgtgaaggagatactgaaggagcaggaaaaccggaagggcctgatagccgccatctgtgcaggtcctactgctctgttggctcatgaaataggttttggaagtaaagttacaacacaccctcttgctaaagacaaaatgatgaatggaggtcattacacctactctgagaatcgtgtggaaaaagacggcctgattcttacaagccgggggcctgggaccagcttcgagtttgcgcttgcaattgttgaagccctgaatggcaaggaggtggcggctcaagtgaaggctccacttgttcttaaagactagagcagcgaactgcgacgatcacttagagaaacaggccgttaggaatccattctcactgtgttcgctctaaacaaaacagtggtaggttaatgtgttcagaagtcgctgtccttactacttttgcggaagtatggaagtcacaactacacagagatttctcagcctacaaattgtgtctatacatttctaagccttgtttgcagaataaacagggcatttagcaaactactgattgtttcttgttttgtctctcatttcttttgtgaaattaaattccgtatcaccttca

SEQ ID NO: 466969 - DNA, 956 bp, Homo sapiens
tgagtctgggcagtgtggggctgagggaggccggacggcgcgcgtgcgtgctggcgtgcgttcactttcagcctggtgtggggtgagtggtacccaacgggccggggcgccgcgtccgcaggaagaggcgcggggtgcaggcttgtaaacatataacataaaaatggcttccaaaagagctctggtcatcctggctaaaggagcagaggaaatggagacggtcatccctgtagatgtcatgaggcgagctgggattaaggtcaccgttgcaggcctggctggaaaagacccagtacagtgtagccgtgatgtggtcatttgtcctgatgccagccttgaagatgcaaaaaaagagggaccatatgatgtggtggttctaccaggaggtaatctgggcgcacagaatttatctgagtctgctgctgtgaaggagatactgaaggagcaggaaaaccggaagggcctgatagccgccatctgtgcaggtcctactgctctgttggctcatgaaataggttttggaagtaaagttacaacacaccctcttgctaaagacaaaatgatgaatggaggtcattacacctactctgagaatcgtgtggaaaaagacggcctgattcttacaagccgggggcctgggaccagcttcgagtttgcgcttgcaattgttgaagccctgaatggcaaggaggtggcggctcaagtgaaggctccacttgttcttaaagactagagcagcgaactgcgacgatcacttagagaaacaggccgttaggaatccattctcactgtgttcgctctaaacaaaacagtggtaggttaatgtgttcagaagtcgctgtccttactacttttgcggaagtatggaagtcacaactacacagagatttctcagcctacaaattgtgtctatacatttctaagccttgtttgcagaataaacagggcatttagca

SEQ ID NO: 466970 - DNA, 1022 bp, Homo sapiens
tgagtctgggcagtgtggggctgagggaggccggacggcgcgcgtgcgtgctggcgtgcgttcactttcagcctggtgtggggtgagtggtacccaacgggccggggcgccgcgtccgcaggaagaggcgcggggtgcaggcttgtaaacatataacataaaaatggcttccaaaagagctctggtcatcctggctaaaggagcagaggaaatggagacggtcatccctgtagatgtcatgaggcgagctgggattaaggtcaccgttgcaggcctggctggaaaagacccagtacagtgtagccgtgatgtggtcatttgtcctgatgccagccttgaagatgcaaaaaaagagggaccatatgatgtggtggttctaccaggaggtaatctgggcgcacagaatttatctgagtctgctgctgtgaaggagatactgaaggagcaggaaaaccggaagggcctgatagccgccatctgtgcaggtcctactgctctgttggctcatgaaataggttttggaagtaaagttacaacacaccctcttgctaaagacaaaatgatgaatggaggtcattacacctactctgagaatcgtgtggaaaaagacggcctgattcttacaagccgggggcctgggaccagcttcgagtttgcgcttgcaattgttgaagccctgaatggcaaggaggtggcggctcaagtgaaggctccacttgttcttaaagactagagcagcgaactgcgacgatcacttagagaaacaggccgttaggaatccattctcactgtgttcgctctaaacaaaacagtggtaggttaatgtgttcagaagtcgctgtccttactacttttgcggaagtatggaagtcacaactacacagagatttctcagcctacaaattgtgtctatacatttctaagccttgtttgcagaataaacagggcatttagcaaactactgattgtttcttgttttgtctctcatttcttttgtgaaattaaattccgtatcaccttca

SEQ ID NO: 466971 - DNA, 815 bp, Homo sapiens
gccgcgtcgacacggctgcgagagacgacagaagggggctggcgtgcgttcattttcagcctggtgtggggcttgtaaacatataacataaaaatggcttccaaaagagctctggtcatcctggctaaaggagcagaggaaatggagacggtcatccctgtagatgtcatgaggcgagctgggattaaggtcaccgttgcaggcctggctggaaaagacccagtacagtgtagccgtgatgtggtcatttgtcctgatgccagccttgaagatgcaaaaaaagagggaccatatgatgtggtggttctaccaggaggtaatctgggcgcacagaatttatctgagtctgctgctgtgaaggagatactgaaggagcaggaaaaccggaagggcctgatagccgccatctgtgcaggtcctactgctctgttggctcatgaaataggttttggaagtaaagttacaacacaccctcttgctaaagacaaaatgatgaatggaggtcattacacctactctgagaatcgtgtggaaaaagacggcctgattcttacaagccgggggcctgggaccagcttcgagtttgcgcttgcaattgttgaagccctgaatggcaaggaggtggcggctcaagtgaaggctccacttgttcttaaagactagagcagcgaactgcgacgatcacttagagaaacaggccgttaggaatccattctcactgtgttcgctctaaggggaggtttgggtcacgttgtcctacttactttggggaggttgggaggcacactacacacagattcttaccctctggggct

SEQ ID NO: 466972 - DNA, 11677 bp, Homo sapiens
ctgcatccaacctggggagtgctgtcgatgagctcatgagacatcagcccacccttaaaacagatgcaacgactgccatcatcaagttacttgaagaaatctgtaatcttggaagggaccccaaatacatctgtcagaagccatcaatccagaaggcagatggcactgccactgctcctcccccaaggtctaatcatgccgcagaagaagcctctagtgaggatgaggaggaagaggaagtacaggccatgcagagctttaattctacccagcaaaatgaaactgagcctaatcagcaggttgttggtacagaggaacgtattcctattcccctcatggattacatccttaatgtgatgaaatttgtggaatctattctgagcaacaatacaacagatgaccactgccaggaatttgtgaatcagaaaggactgttgcctttggttaccattttgggtcttcccaatctgcccattgactttcccacatctgctgcctgtcaggctgttgcaggtgtctgcaaatccatattgacactgtcacatgaacccaaagtccttcaagagggtctccttcagttggactccatcctctcctccctggagcccttacaccgccccattgaatcccctgggggctcagtgttgttgcgagaactggcttgcgcaggcaatgttgctgatgctaccctctcagcccaggccacacctctgctgcatgcactcactgctgcccatgcctacatcatgatgtttgttcatacttgcagagttggacagagtgaaattcgttccatctccgtaaaccagtggggctctcaattgggtctgagtgttttgagcaagctgagccagttatactgttccctggtgtgggaaagcactgtcctcctctctctgtgtaccccaaacagcctaccatctgggtgtgaatttggccaggcagatatgcagaaactggttccaaaggatgagaaggcaggtacgacccagggcggaaaaagatcagatggggaacaggatggagcagctggaagtatggatgcttctacccagggcttattagaaggcattgggctagatggtgacacattggctcccatggagacagatgaacctactgcttcagactctaagggcaaatctaaaatcacaccagcaatggctgccagaattaagcaaatcaagcctttgttatcagcttcctccagattaggccgagcacttgctgagctatttggacttcttgttaaactttgtgtgggatctcctgtccgccagagaaggagccatcatgctgccagcaccactacagcaccgacacctgccgcgcgatcaacagcctcagctctcactaagctcttgactaaggggttatcttggcagcccccaccatatacacctactccccgattcaggctgacattcttcatctgttcagttggtttcacatccccaatgctgtttgatgagaggaagtatccctaccacctcatgctgcaaaaatttctctgctccggaggccacaatgctctttttgaaactttcaactgggctctgtccatgggaggtaaagttcctgtttctgagggattggaacactcagacttgcctgatggcacaggagaattcctagatgcctggcttatgctggtggagaagatggtgaatcccaccacggtgcttgaatctccacattcgctgcctgccaaattgcctggaggtgtccagaactttccccagttcagtgcactgcgcttccttgtggtaactcagaaagcagcctttacttgcatcaaaaacttatggaaccggaaacccctgaaggtatatggtggacgaatggctgaatcgatgctggccattctatgccacatcctccgaggagaacctgtgattcgagagagactaagcaaggagaaggaggggtctcgaggagaagaggatacagggcaagaggaaggtggctcccgccgggaacctcaagtcaaccagcaacaactgcaacagctcatggacatgggcttcacaagggaacatgcaatggaggcactgttgaacaccagcaccatggagcaggccacagagtaccttttaacccaccctcctccaatcatgggaggagttgttcgggatctcagcatgtctgaagaggaccagatgatgagagcaattgctatgtctctgggacaggatattccaatggatcaaagggcagagtcacctgaggaagttgcttgccggaaggaggaagaggaacggaaagctcgggaaaagcaggaggaggaagaggctaaatgtctagagaagttccaggatgctgacccgttggaacaagatgagctccacactttcacagatactatgttgccaggctgcttccaccttcttgatgagctgccagacacagtataccgtgtgtgtgacctgatcatgacagcaatcaaacgtaatggagcagattatcgtgacatgattctgaagcaagtagtcaatcaggtgtgggaagctgctgatgtattgatcaaagctgctcttcccctgacaacaagtgacacaaaaaccgtgtcagagtggataagtcagatggccacactgccccaggcctccaatttggctactagaatcttgcttttaacgctactttttgaggagttgaagctaccttgtgcttgggtggttgaatcaagtggcatccttaatgtcctaatcaaactcttggaagtggttcagccctgcctccaggcagccaaggagcagaaggaagtccagaccccaaagtggatcacaccagtgttgctcctgattgatttctatgaaaagacagccatctcctcaaaaaggagagcccagatgactaagtacctgcaatccaacagcaacaactggcgctggtttgatgatcgctctgggcgttggtgtagttacagtgcaagcaacaatagcactattgattctgcctggaaatctggagagacaagcgtgcgattcactgcaggccgaagaagatacacggtccaattcactacaatggtgcaggttaatgaggaaacagggaaccgacgccctgtgatgctgactctcctcagggtacctcggctgaataaaaattcaaaaaacagcaatggacaggaactagagaagacgctggaagaaagcaaagaaatggatatcaaacgtaaagaaaataaaggcaatgatacccctttggccctagagagtacaaacactgaaaaggagacaagcctggaggaaacaaaaatcggggagatcctgatccagggcttgacagaagatatggtgactgttttaatccgggcctgcgtgagcatgctgggagtccctgtggacccagatactttgcatgccacccttcgtctctgtctgaggctcacccgggaccacaaatatgccatgatgtttgcagaactgaagagtacccgcatgatcttgaatttgacccagagctcaggcttcaatgggtttactcccctggtcacccttctcttaagacacatcattgaggacccctgtacccttcgtcataccatggaaaaggttgttcgctcagcagctacaagtggagctggtagcactacctctggtgttgtgtctggcagcctcggctctcgggagatcaactacatccttcgtgtccttgggccagccgcatgccgcaatccagacatattcacagaagtggccaactgctgtatccgcatcgcccttcctgcccctcgaggctcaggaactgcttcagatgatgaatttgagaatcttagaattaaaggccctaatgctgtacagctggtgaagaccacccctttgaagccctcacctctgcctgtcatccctgatactatcaaggaagtgatctatgatatgctgaatgctctggctgcataccatgctccagaggaagcagataaatctgatcctaaacctggggttatgacccaagaggttggccagctcctgcaagacatgggtgatgatgtataccagcagtaccggtcacttacgcgtcagagcagtgactttgatacgcagtcaggtttttccattaatagtcaggtctttgctgcagatggtgcctccactgagacttccgcatctgggacctcccaaggagaggcttcaactccagaggagtctcgagatgggaagaaagataaagaaggggaccgggcctctgaggaaggcaaacagaaaggcaagggcagcaaacctttaatgcctacctccactatccttcgtcttctggcagagttggtgaggtcctatgttggtattgctaccctgattgccaactacagctacactgtgggccagtctgaactgatcaaagaggactgcagtgtgctagcttttgttctggaccacctgctcccacatacccagaatgcagaagacaaggacacccctgccttggcccgcctgttcctcgcaagcctggctgctgcagggagtggcacagatgcccaggtggccctagtgaatgaagtaaaagcagcccttggacgggcactggctatggctgagagtacagagaaacatgccaggcttcaggcagtgatgtgtatcatcagtactatcatggagtcctgcccctccacctccagcttctacagcagtgccacagcgaagacccagcacaatggcatgaacaacatcattcggcttttcctgaagaagggactggttaatgacctggccagagtacctcacagcttagacctgtccagtcccaacatggccaacacagtcaatgctgctctgaagcctttggaaacactttcccggattgtgaaccagcccagtagcctttttggcagcaagagtgcttctagcaagaacaagtctgagcaggatgcccaaggagcctctcaagattccagtagcaaccagcaggacccaggcgagcctggggaagcagaagtgcaggaggaggatcatgatgtcactcagacagaggtggcagatggggatatcatggatggggaggctgaaaccgactcagtggtgattgctgggcagcctgaggtgctcagttcacaagagatgcaggttgagaatgagctggaggacctgatagatgagttgcttgagagggatggcggatctgggaacagtacaattatagtgagcagaagtggagaggatgaatcacaagaggacgtgctgatggatgaagctccttccaacctcagccaagcttccaccttgcaggccaaccgagaagattccatgaatatcctggaccctgaggatgaggaggagcacactcaggaagaggacagcagtggcagtaacgaggatgaggatgatagtcaggatgaagaggaggaggaggaggaagatgaggaagatgatcaggaggatgatgaaggtgaagagggagatgaagacgatgacgacgatggctctgagatggaattggatgaggattatcctgatatgaacgcttctcccttggtccgatttgagcgctttgaccgggaggatgatctcatcattgagtttgacaacatgttctccagtgctacagacatccccccatccccaggaaatatccctaccacccatccactgatggtgcgccatgcagaccacagttctctgacactgggcagtggctcttcaacaactcgtctcacccagggcatcgggcgcagtcagaggaccctaaggcagctgacggccaatactggccacaccattcatgttcactaccctgggaatcgccagcccaaccctcctcttatactgcagaggttgcttggtccctcagctgctgctgacatccttcagctgagcagcagccttcccctacaaagccggggtcgggcccgcctcctggtaggcaacgatgacgtccacatcatcgcccgttctgatgatgagctgctggatgactttttccatgatcagagcacagctaccagccaagcaggaaccctgtccagcatccccacagccctgacccgctggacagaagaatgcaaagttctcgatgctgagagcatgcatgactgtgtttcagtggttaaagtgtccattgtcaatcacctggaattcctgagggatgaggagctggaagaaaggcgagagaagcgcaggaaacaactggctgaggaagaaacaaagataactgataaaggcaaagaagataaggagaacagggatcagagtgcacagtgtactgcatctaagtcaaatgactccactgaacagaatctctcagatgggacgcctatgcctgacagctacccaacaaccccatcttcaactgatgcagctacatctgagtccaaggagacccttggcactctgcaatcctcacaacagcaaccaacactcccaaccccaccagctttgggagaggttcctcaggagctgcagtctccagctggagaagggggcagctctacacagctattgatgcctgtagagccagaggaattgggtcccacaaggccaagtggggaagcagaaacaactcagatggagttatccccagctcccactataacctcactttccccagagagagctgaggattctgatgcactgacggctgtcagcagtcagctagaaggctctcctatggatacaagcagcctggcttcctgtaccttagaggaggctgtgggtgacacttcagcagctggcagttctgagcagcccagagcaggcagctccactcctggggatgccccaccagctgtggcggaagtgcaaggcaggagtgatgggtcaggggaatctgcccagccacctgaggacagctccccacctgcatcctctgagagctcttccaccagagattctgccgtggccatttctggagcagattcccgaggaatcctagaagagccgttgccttcaacaagcagtgaagaagaagatccccttgcgggtatcagtctccctgaaggtgtggacccctcttttctggctgccctgcctgatgacatccgtcgggaagttctacagaaccagctaggcattcgtccaccaacccggactgccccctccacaaatagctcagcgcctgcagtggtggggaatcctggtgtgactgaagtgagccctgagtttctggctgccctgcctccagccattcaggaggaagtactggcacagcagagagctgagcagcagcgacgagaactagcacagaatgccagctcagacacccctatggaccctgtgaccttcatccagactctgccctcagacctgcgccgtagtgtcctagaggatatggaggacagtgtgttagctgtgatgccacctgacattgcagctgaggctcaagccctgagacgagagcaagaagcccggcagcgacagctcatgcatgagcgtctgtttgggcacagtagcacctccgcactctctgctattctccgaagcccggctttcaccagtcgcttaagtggcaaccgtggggtccagtatactcgccttgctgtgcagagaggtggcaccttccagatggggggtagcagcagccataacaggccttctggcagtaatgtagatactctcctccgcctccgaggacggctccttctggaccacgaagccctttcttgtctcttggtcctactttttgtggatgagccaaagctcaatactagccgtctacaccgagtactgagaaatctctgctaccatgcccagacccgccactgggtcatccgcagtctgctctccatcttgcagcgcagcagtgagagtgagctatgcattgaaacacccaaactcactacaagtgaggaaaagggcaaaaagtcgagcaagagctgtgggtcaagtagccatgagaaccgtcccctggacctgctacacaagatggagtcaaagagctccaaccagctttcctggctctcagtatccatggatgcagccctaggctgcaggactaatatatttcagatccagcgttcaggggggcgtaaacataccgagaagcatgcaagcggtggctccaccgtccacatccatccccaagctgctcctgttgtctgcagacacgttttggatacactcattcaattggccaaggtatttcccagccacttcacacagcagcggaccaaagaaacaaactgtgagagtgatcgggaaaggggcaataaggcctgtagcccatgctcctcacagtcctccagcagtggcatttgcacagacttctgggacttattggtaaaactggacaacatgaatgtcagccggaaaggcaagaactccgtgaagtcagtgccagtgagcgctggcggtgagggggaaacctctccatacagcctcgaggcctctccactggggcagctcatgaacatgttgtcacacccagtcatccgccggagctctctcttaactgagaaactcctcagactcctttctctcatctcaattgctctcccagaaaacaaggtgtcagaagcacaggctaattctggcagcggtgcttcctccaccaccactgccacctcaaccacatctaccaccaccaccactgccgcctccaccacgcccacaccccctactgcacccacccctgtcacttctgctccagccctggttgctgccacggctatttccaccattgtcgtagctgcttcgaccacagtgactacccccacgactgctaccactactgtttcaatttctcccactactaagggcagcaaatctccagcgaaggtgagtgatgggggcagcagcagtacagactttaagatggtgtcctctggcctcactgaaaaccagctacagctctctgtagaggtgttgacatcccactcttgttctgaggaaggcttagaggatgcagccaacgtactactgcagctctcccggggggactctgggacccgggacactgttctcaagctgctactgaatggagcccgccatctgggttataccctttgtaaacaaataggtaccctgctggccgagctgcgggaatacaacctcgagcagcagcggcgagcccaatgtgaaaccctctctcctgatggcctgcctgaggagcagccacagaccaccaagctgaagggcaaaatgcagagcaggtttgacatggctgagaatgtggtaattgtggcatctcagaagcgacctttgggtggccgggagctccagctgccttctatgtccatgttgacatccaagacatctacccagaagttcttcttgagggtactacaggtcatcatccagctccgggacgacacgcgccgggctaacaagaaagccaagcagacaggcaggctaggttcctccggtttaggctcagctagcagcatccaggcagctgttcggcagctggaggctgaggctgatgccattatacaaatggtacgtgagggtcaaagggcgcggagacagcaacaagcagcaacgtcggagtctagccagtcagaggcgtctgtccggagggaggaatcacccatggatgtggaccagccatctcccagtgctcaagatactcaatccattgcctccgatggaaccccacagggggagaaggaaaaggaagaaagaccacctgagttacccctgctcagcgagcagctgagtttggacgagctgtgggacatgcttggggagtgtctaaaggaactagaggaatcccatgaccagcatgcggtgctagtgctacagcctgctgtcgaggccttctttctggtccatgccacagagcgggagagcaagcctcctgtccgagacacccgtgagagccagctggcacacatcaaggacgagcctcctccactctcccctgcccccttaaccccagccacgccttcctcccttgacccattcttctcccgggagccctcatctatgcacatctcctcaagcctgccccctgacacacagaagttccttcgctttgcagagactcaccgcactgtgttaaaccagatcctacggcagtccacgacccaccttgctgatgggccttttgctgtcctggtagactacattcgtgtcctcgactttgatgtcaagcgcaaatatttccgccaagagctggagcgtttagatgaggggctccggaaagaagacatggctgtgcatgtccgtcgtgaccatgtgtttgaagactcctatcgtgagctgcatcgcaaatcccccgaagaaatgaagaatcgattgtatatagtatttgaaggagaagaagggcaggatgctggcgggctcctgcgggagtggtatatgatcatctctcgagagatgtttaaccctatgtatgccttgttccgtacctcacctggtgatcgagtcacctacaccatcaatccatcttcccactgcaaccccaaccacctcagctacttcaagtttgtcggacgcattgtggccaaagctgtatatgacaaccgtcttctggagtgctactttactcgatccttttacaaacacatcttgggcaagtcagtcagatatacagatatggagagtgaagattaccacttctaccaaggtctggtttatctgctggaaaatgatgtctccacactaggctatgacctcaccttcagcactgaggtccaagagtttggagtttgtgaagttcgtgacctcaaacccaatggggccaacatcttggtaacagaggagaataagaaggagtatgtacacctggtatgccagatgagaatgacaggagccatccgcaagcagttggcggctttcttagaaggcttctatgagatcattccaaagcgcctcatttccatcttcactgagcaggagttagagctgcttatatcaggactgcccaccattgacatcgatgatctgaaatccaacactgaataccacaagtaccagtccaactctattcagatccagtggttctggagagcattgcgttctttcgatcaagctgaccgtgccaagttcctccagtttgtcacgggtacttccaaggtacccctgcaaggctttgctgccctcgaaggcatgaatggcattcagaagtttcagatccatcgagatgacaggtccacagatcgcctgccttcagctcacacatgttttaatcagctggatctgcctgcctatgagagctttgagaagctccgccacatgctactgttggctatccaggagtgctctgaaggctttgggctggcctaataaggccctgcccaactccgtggggttttttttaccattgttggacctggggaggggggagttaaaaaaagaaccagaaagaaattgtcaaaaaccaataaatgaaatccaccaactcaccgtgtgtgtcccagctgccccatcttccccagcgcatacctgttcctcttctcattctctccccgccgcctgtttcctcaccttctctcccctttccatgccgtccatgatccccaccccatgtgttttaaaaaggcagtagcctttgcagggacctgtctgtcccaactgtttgaacagtgtgctcctcagattctgtgttcagaaggatttgctgcattgagacttgaaacctttggataggggaaaaaattatatatatatatatttttttgttctgtttgcatttcttaatttgtgcttggaatgtgttgatgtgcacagctaatgattcaatgcgagacaagattggcgtctgtgttgtggaggtttcaaataaagagcactcttcataa

SEQ ID NO: 466973 - DNA, 11375 bp, Homo sapiens
gttattggctcaccaagtttgaaagtagtgtgttgctctagaaagagatgttaaggtatgttgtacctgacttcatatttgggttccaccatttaccaggtgagagaccatggccatatccaaaatctgagaggcttccatttaattgtcacttccattgtgactattaaaagacatgatgaatttgaagttcattgtatattaacactttaattattcttcctgtttcagacactgtcacatgaacccaaagtccttcaagagggtctccttcagttggactccatcctctcctccctggagcccttacaccgccccattgaatcccctgggggctcagtgttgttgcgagaactggcttgcgcaggcaatgttgctgatgctaccctctcagcccaggccacacctctgctgcatgcactcactgctgcccatgcctacatcatgatgtttgttcatacttgcagagttggacagagtgaaattcgttccatctccgtaaaccagtggggctctcaattgggtctgagtgttttgagcaagctgagccagttatactgttccctggtgtgggaaagcactgtcctcctctctctgtgtaccccaaacagcctaccatctgggtgtgaatttggccaggcagatatgcagaaactggttccaaaggatgagaaggcaggtacgacccagggcggaaaaagatcagatggggaacaggatggagcagctggaagtatggatgcttctacccagggcttattagaaggcattgggctagatggtgacacattggctcccatggagacagatgaacctactgcttcagactctaagggcaaatctaaaatcacaccagcaatggctgccagaattaagcaaatcaagcctttgttatcagcttcctccagattaggccgagcacttgctgagctatttggacttcttgttaaactttgtgtgggatctcctgtccgccagagaaggagccatcatgctgccagcaccactacagcaccgacacctgccgcgcgatcaacagcctcagctctcactaagctcttgactaaggggttatcttggcagcccccaccatatacacctactccccgattcaggctgacattcttcatctgttcagttggtttcacatccccaatgctgtttgatgagaggaagtatccctaccacctcatgctgcaaaaatttctctgctccggaggccacaatgctctttttgaaactttcaactgggctctgtccatgggaggtaaagttcctgtttctgagggattggaacactcagacttgcctgatggcacaggagaattcctagatgcctggcttatgctggtggagaagatggtgaatcccaccacggtgcttgaatctccacattcgctgcctgccaaattgcctggaggtgtccagaactttccccagttcagtgcactgcgcttccttgtggtaactcagaaagcagcctttacttgcatcaaaaacttatggaaccggaaacccctgaaggtatatggtggacgaatggctgaatcgatgctggccattctatgccacatcctccgaggagaacctgtgattcgagagagactaagcaaggagaaggaggggtctcgaggagaagaggatacagggcaagaggaaggtggctcccgccgggaacctcaagtcaaccagcaacaactgcaacagctcatggacatgggcttcacaagggaacatgcaatggaggcactgttgaacaccagcaccatggagcaggccacagagtaccttttaacccaccctcctccaatcatgggaggagttgttcgggatctcagcatgtctgaagaggaccagatgatgagagcaattgctatgtctctgggacaggatattccaatggatcaaagggcagagtcacctgaggaagttgcttgccggaaggaggaagaggaacggaaagctcgggaaaagcaggaggaggaagaggctaaatgtctagagaagttccaggatgctgacccgttggaacaagatgagctccacactttcacagatactatgttgccaggctgcttccaccttcttgatgagctgccagacacagtataccgtgtgtgtgacctgatcatgacagcaatcaaacgtaatggagcagattatcgtgacatgattctgaagcaagtagtcaatcaggtgtgggaagctgctgatgtattgatcaaagctgctcttcccctgacaacaagtgacacaaaaaccgtgtcagagtggataagtcagatggccacactgccccaggcctccaatttggctactagaatcttgcttttaacgctactttttgaggagttgaagctaccttgtgcttgggtggttgaatcaagtggcatccttaatgtcctaatcaaactcttggaagtggttcagccctgcctccaggcagccaaggagcagaaggaagtccagaccccaaagtggatcacaccagtgttgctcctgattgatttctatgaaaagacagccatctcctcaaaaaggagagcccagatgactaagtacctgcaatccaacagcaacaactggcgctggtttgatgatcgctctgggcgttggtgtagttacagtgcaagcaacaatagcactattgattctgcctggaaatctggagagacaagcgtgcgattcactgcaggccgaagaagatacacggtccaattcactacaatggtgcaggttaatgaggaaacagggaaccgacgccctgtgatgctgactctcctcagggtacctcggctgaataaaaattcaaaaaacagcaatggacaggaactagagaagacgctggaagaaagcaaagaaatggatatcaaacgtaaagaaaataaaggcaatgatacccctttggccctagagagtacaaacactgaaaaggagacaagcctggaggaaacaaaaatcggggagatcctgatccagggcttgacagaagatatggtgactgttttaatccgggcctgcgtgagcatgctgggagtccctgtggacccagatactttgcatgccacccttcgtctctgtctgaggctcacccgggaccacaaatatgccatgatgtttgcagaactgaagagtacccgcatgatcttgaatttgacccagagctcaggcttcaatgggtttactcccctggtcacccttctcttaagacacatcattgaggacccctgtacccttcgtcataccatggaaaaggttgttcgctcagcagctacaagtggagctggtagcactacctctggtgttgtgtctggcagcctcggctctcgggagatcaactacatccttcgtgtccttgggccagccgcatgccgcaatccagacatattcacagaagtggccaactgctgtatccgcatcgcccttcctgcccctcgaggctcaggaactgcttcagatgatgaatttgagaatcttagaattaaaggccctaatgctgtacagctggtgaagaccacccctttgaagccctcacctctgcctgtcatccctgatactatcaaggaagtgatctatgatatgctgaatgctctggctgcataccatgctccagaggaagcagataaatctgatcctaaacctggggttatgacccaagaggttggccagctcctgcaagacatgggtgatgatgtataccagcagtaccggtcacttacgcgtcagagcagtgactttgatacgcagtcaggtttttccattaatagtcaggtctttgctgcagatggtgcctccactgagacttccgcatctgggacctcccaaggagaggcttcaactccagaggagtctcgagatgggaagaaagataaagaaggggaccgggcctctgaggaaggcaaacagaaaggcaagggcagcaaacctttaatgcctacctccactatccttcgtcttctggcagagttggtgaggtcctatgttggtattgctaccctgattgccaactacagctacactgtgggccagtctgaactgatcaaagaggactgcagtgtgctagcttttgttctggaccacctgctcccacatacccagaatgcagaagacaaggacacccctgccttggcccgcctgttcctcgcaagcctggctgctgcagggagtggcacagatgcccaggtggccctagtgaatgaagtaaaagcagcccttggacgggcactggctatggctgagagtacagagaaacatgccaggcttcaggcagtgatgtgtatcatcagtactatcatggagtcctgcccctccacctccagcttctacagcagtgccacagcgaagacccagcacaatggcatgaacaacatcattcggcttttcctgaagaagggactggttaatgacctggccagagtacctcacagcttagacctgtccagtcccaacatggccaacacagtcaatgctgctctgaagcctttggaaacactttcccggattgtgaaccagcccagtagcctttttggcagcaagagtgcttctagcaagaacaagtctgagcaggatgcccaaggagcctctcaagattccagtagcaaccagcaggacccaggcgagcctggggaagcagaagtgcaggaggaggatcatgatgtcactcagacagaggtggcagatggggatatcatggatggggaggctgaaaccgactcagtggtgattgctgggcagcctgaggtgctcagttcacaagagatgcaggttgagaatgagctggaggacctgatagatgagttgcttgagagggatggcggatctgggaacagtacaattatagtgagcagaagtggagaggatgaatcacaagaggacgtgctgatggatgaagctccttccaacctcagccaagcttccaccttgcaggccaaccgagaagattccatgaatatcctggaccctgaggatgaggaggagcacactcaggaagaggacagcagtggcagtaacgaggatgaggatgatagtcaggatgaagaggaggaggaggaggaagatgaggaagatgatcaggaggatgatgaaggtgaagagggagatgaagacgatgacgacgatggctctgagatggaattggatgaggattatcctgatatgaacgcttctcccttggtccgatttgagcgctttgaccgggaggatgatctcatcattgagtttgacaacatgttctccagtgctacagacatccccccatccccaggaaatatccctaccacccatccactgatggtgcgccatgcagaccacagttctctgacactgggcagtggctcttcaacaactcgtctcacccagggcatcgggcgcagtcagaggaccctaaggcagctgacggccaatactggccacaccattcatgttcactaccctgggaatcgccagcccaaccctcctcttatactgcagaggttgcttggtccctcagctgctgctgacatccttcagctgagcagcagccttcccctacaaagccggggtcgggcccgcctcctggtaggcaacgatgacgtccacatcatcgcccgttctgatgatgagctgctggatgactttttccatgatcagagcacagctaccagccaagcaggaaccctgtccagcatccccacagccctgacccgctggacagaagaatgcaaagttctcgatgctgagagcatgcatgactgtgtttcagtggttaaagtgtccattgtcaatcacctggaattcctgagggatgaggagctggaagaaaggcgagagaagcgcaggaaacaactggctgaggaagaaacaaagataactgataaaggcaaagaagataaggagaacagggatcagagtgcacagtgtactgcatctaagtcaaatgactccactgaacagaatctctcagatgggacgcctatgcctgacagctacccaacaaccccatcttcaactgatgcagctacatctgagtccaaggagacccttggcactctgcaatcctcacaacagcaaccaacactcccaaccccaccagctttgggagaggttcctcaggagctgcagtctccagctggagaagggggcagctctacacagctattgatgcctgtagagccagaggaattgggtcccacaaggccaagtggggaagcagaaacaactcagatggagttatccccagctcccactataacctcactttccccagagagagctgaggattctgatgcactgacggctgtcagcagtcagctagaaggctctcctatggatacaagcagcctggcttcctgtaccttagaggaggctgtgggtgacacttcagcagctggcagttctgagcagcccagagcaggcagctccactcctggggatgccccaccagctgtggcggaagtgcaaggcaggagtgatgggtcaggggaatctgcccagccacctgaggacagctccccacctgcatcctctgagagctcttccaccagagattctgccgtggccatttctggagcagattcccgaggaatcctagaagagccgttgccttcaacaagcagtgaagaagaagatccccttgcgggtatcagtctccctgaaggtgtggacccctcttttctggctgccctgcctgatgacatccgtcgggaagttctacagaaccagctaggcattcgtccaccaacccggactgccccctccacaaatagctcagcgcctgcagtggtggggaatcctggtgtgactgaagtgagccctgagtttctggctgccctgcctccagccattcaggaggaagtactggcacagcagagagctgagcagcagcgacgagaactagcacagaatgccagctcagacacccctatggaccctgtgaccttcatccagactctgccctcagacctgcgccgtagtgtcctagaggatatggaggacagtgtgttagctgtgatgccacctgacattgcagctgaggctcaagccctgagacgagagcaagaagcccggcagcgacagctcatgcatgagcgtctgtttgggcacagtagcacctccgcactctctgctattctccgaagcccggctttcaccagtcgcttaagtggcaaccgtggggtccagtatactcgccttgctgtgcagagaggtggcaccttccagatggggggtagcagcagccataacaggccttctggcagtaatgtagatactctcctccgcctccgaggacggctccttctggaccacgaagccctttcttgtctcttggtcctactttttgtggatgagccaaagctcaatactagccgtctacaccgagtactgagaaatctctgctaccatgcccagacccgccactgggtcatccgcagtctgctctccatcttgcagcgcagcagtgagagtgagctatgcattgaaacacccaaactcactacaagtgaggaaaagggcaaaaagtcgagcaagagctgtgggtcaagtagccatgagaaccgtcccctggacctgctacacaagatggagtcaaagagctccaaccagctttcctggctctcagtatccatggatgcagccctaggctgcaggactaatatatttcagatccagcgttcaggggggcgtaaacataccgagaagcatgcaagcggtggctccaccgtccacatccatccccaagctgctcctgttgtctgcagacacgttttggatacactcattcaattggccaaggtatttcccagccacttcacacagcagcggaccaaagaaacaaactgtgagagtgatcgggaaaggggcaataaggcctgtagcccatgctcctcacagtcctccagcagtggcatttgcacagacttctgggacttattggtaaaactggacaacatgaatgtcagccggaaaggcaagaactccgtgaagtcagtgccagtgagcgctggcggtgagggggaaacctctccatacagcctcgaggcctctccactggggcagctcatgaacatgttgtcacacccagtcatccgccggagctctctcttaactgagaaactcctcagactcctttctctcatctcaattgctctcccagaaaacaaggtgtcagaagcacaggctaattctggcagcggtgcttcctccaccaccactgccacctcaaccacatctaccaccaccaccactgccgcctccaccacgcccacaccccctactgcacccacccctgtcacttctgctccagccctggttgctgccacggctatttccaccattgtcgtagctgcttcgaccacagtgactacccccacgactgctaccactactgtttcaatttctcccactactaagggcagcaaatctccagcgaaggtgagtgatgggggcagcagcagtacagactttaagatggtgtcctctggcctcactgaaaaccagctacagctctctgtagaggtgttgacatcccactcttgttctgaggaaggcttagaggatgcagccaacgtactactgcagctctcccggggggactctgggacccgggacactgttctcaagctgctactgaatggagcccgccatctgggttataccctttgtaaacaaataggtaccctgctggccgagctgcgggaatacaacctcgagcagcagcggcgagcccaatgtgaaaccctctctcctgatggcctgcctgaggagcagccacagaccaccaagctgaagggcaaaatgcagagcaggtttgacatggctgagaatgtggtaattgtggcatctcagaagcgacctttgggtggccgggagctccagctgccttctatgtccatgttgacatccaagacatctacccagaagttcttcttgagggtactacaggtcatcatccagctccgggacgacacgcgccgggctaacaagaaagccaagcagacaggcaggctaggttcctccggtttaggctcagctagcagcatccaggcagctgttcggcagctggaggctgaggctgatgccattatacaaatggtacgtgagggtcaaagggcgcggagacagcaacaagcagcaacgtcggagtctagccagtcagaggcgtctgtccggagggaggaatcacccatggatgtggaccagccatctcccagtgctcaagatactcaatccattgcctccgatggaaccccacagggggagaaggaaaaggaagaaagaccacctgagttacccctgctcagcgagcagctgagtttggacgagctgtgggacatgcttggggagtgtctaaaggaactagaggaatcccatgaccagcatgcggtgctagtgctacagcctgctgtcgaggccttctttctggtccatgccacagagcgggagagcaagcctcctgtccgagacacccgtgagagccagctggcacacatcaaggacgagcctcctccactctcccctgcccccttaaccccagccacgccttcctcccttgacccattcttctcccgggagccctcatctatgcacatctcctcaagcctgccccctgacacacagaagttccttcgctttgcagagactcaccgcactgtgttaaaccagatcctacggcagtccacgacccaccttgctgatgggccttttgctgtcctggtagactacattcgtgtcctcgactttgatgtcaagcgcaaatatttccgccaagagctggagcgtttagatgaggggctccggaaagaagacatggctgtgcatgtccgtcgtgaccatgtgtttgaagactcctatcgtgagctgcatcgcaaatcccccgaagaaatgaagaatcgattgtatatagtatttgaaggagaagaagggcaggatgctggcgggctcctgcgggagtggtatatgatcatctctcgagagatgtttaaccctatgtatgccttgttccgtacctcacctggtgatcgagtcacctacaccatcaatccatcttcccactgcaaccccaaccacctcagctacttcaagtttgtcggacgcattgtggccaaagctgtatatgacaaccgtcttctggagtgctactttactcgatccttttacaaacacatcttgggcaagtcagtcagatatacagatatggagagtgaagattaccacttctaccaaggtctggtttatctgctggaaaatgatgtctccacactaggctatgacctcaccttcagcactgaggtccaagagtttggagtttgtgaagttcgtgacctcaaacccaatggggccaacatcttggtaacagaggagaataagaaggagtatgtacacctggtatgccagatgagaatgacaggagccatccgcaagcagttggcggctttcttagaaggcttctatgagatcattccaaagcgcctcatttccatcttcactgagcaggagttagagctgcttatatcaggactgcccaccattgacatcgatgatctgaaatccaacactgaataccacaagtaccagtccaactctattcagatccagtggttctggagagcattgcgttctttcgatcaagctgaccgtgccaagttcctccagtttgtcacgggtacttccaaggtacccctgcaaggctttgctgccctcgaaggcatgaatggcattcagaagtttcagatccatcgagatgacaggtccacagatcgcctgccttcagctcacacatgttttaatcagctggatctgcctgcctatgagagctttgagaagctccgccacatgctactgttggctatccaggagtgctctgaaggctttgggctggcctaataaggccctgcccaactccgtggggttttttttaccattgttggacctggggaggggggagttaaaaaaagaaccagaaagaaattgtcaaaaaccaataaatgaaatccaccaactcaccgtgtgtgtcccagctgccccatcttccccagcgcatacctgttcctcttctcattctctccccgccgcctgtttcctcaccttctctcccctttccatgccgtccatgatccccaccccatgtgttttaaaaaggcagtagcctttgcagggacctgtctgtcccaactgtttgaacagtgtgctcctcagattctgtgttcagaaggatttgctgcattgagacttgaaacctttggataggggaaaaaattatatatatatatatttttttgttctgtttgcatttcttaatttgtgcttggaatgtgttgatgtgcacagctaatgattcaatgcgagacaagattggcgtctgtgttgtggaggtttcaaataaagagcactcttcataa

SEQ ID NO: 466974 - DNA, 6564 bp, Homo sapiens
  misc_feature (25)..(25): n is a, c, g, or t
cccgcgggcatggggctgtacaatnatagtgagcagaagtggagaggatgaatcacaagaggacgtgctgatggatgaagctccttccaacctcagccaagcttccaccttgcaggccaaccgagaagattccatgaatatcctggaccctgaggatgaggaggagcacactcaggaagaggacagcagtggcagtaacgaggatgaggatgatagtcaggatgaagaggaggaggaggaggaagatgaggaagatgatcaggaggatgatgaaggtgaagagggagatgaagacgatgacgacgatggctctgagatggaattggatgaggattatcctgatatgaacgcttctcccttggtccgatttgagcgctttgaccgggaggatgatctcatcattgagtttgacaacatgttctccagtgctacagacatccccccatccccaggaaatatccctaccacccatccactgatggtgcgccatgcagaccacagttctctgacactgggcagtggctcttcaacaactcgtctcacccagggcatcgggcgcagtcagaggaccctaaggcagctgacggccaatactggccacaccattcatgttcactaccctgggaatcgccagcccaaccctcctcttatactgcagaggttgcttggtccctcagctgctgctgacatccttcagctgagcagcagccttcccctacaaagccggggtcgggcccgcctcctggtaggcaacgatgacgtccacatcatcgcccgttctgatgatgagctgctggatgactttttccatgatcagagcacagctaccagccaagcaggaaccctgtccagcatccccacagccctgacccgctggacagaagaatgcaaagttctcgatgctgagagcatgcatgactgtgtttcagtggttaaagtgtccattgtcaatcacctggaattcctgagggatgaggagctggaagaaaggcgagagaagcgcaggaaacaactggctgaggaagaaacaaagataactgataaaggcaaagaagataaggagaacagggatcagagtgcacagtgtactgcatctaagtcaaatgactccactgaacagaatctctcagatgggacgcctatgcctgacagctacccaacaaccccatcttcaactgatgcagctacatctgagtccaaggagacccttggcactctgcaatcctcacaacagcaaccaacactcccaaccccaccagctttgggagaggttcctcaggagctgcagtctccagctggagaagggggcagctctacacagctattgatgcctgtagagccagaggaattgggtcccacaaggccaagtggggaagcagaaacaactcagatggagttatccccagctcccactataacctcactttccccagagagagctgaggattctgatgcactgacggctgtcagcagtcagctagaaggctctcctatggatacaagcagcctggcttcctgtaccttagaggaggctgtgggtgacacttcagcagctggcagttctgagcagcccagagcaggcagctccactcctggggatgccccaccagctgtggcggaagtgcaaggcaggagtgatgggtcaggggaatctgcccagccacctgaggacagctccccacctgcatcctctgagagctcttccaccagagattctgccgtggccatttctggagcagattcccgaggaatcctagaagagccgttgccttcaacaagcagtgaagaagaagatccccttgcgggtatcagtctccctgaaggtgtggacccctcttttctggctgccctgcctgatgacatccgtcgggaagttctacagaaccagctaggcattcgtccaccaacccggactgccccctccacaaatagctcagcgcctgcagtggtggggaatcctggtgtgactgaagtgagccctgagtttctggctgccctgcctccagccattcaggaggaagtactggcacagcagagagctgagcagcagcgacgagaactagcacagaatgccagctcagacacccctatggaccctgtgaccttcatccagactctgccctcagacctgcgccgtagtgtcctagaggatatggaggacagtgtgttagctgtgatgccacctgacattgcagctgaggctcaagccctgagacgagagcaagaagcccggcagcgacagctcatgcatgagcgtctgtttgggcacagtagcacctccgcactctctgctattctccgaagcccggctttcaccagtcgcttaagtggcaaccgtggggtccagtatactcgccttgctgtgcagagaggtggcaccttccagatggggggtagcagcagccataacaggccttctggcagtaatgtagatactctcctccgcctccgaggacggctccttctggaccacgaagccctttcttgtctcttggtcctactttttgtggatgagccaaagctcaatactagccgtctacaccgagtactgagaaatctctgctaccatgcccagacccgccactgggtcatccgcagtctgctctccatcttgcagcgcagcagtgagagtgagctatgcattgaaacacccaaactcactacaagtgaggaaaagggcaaaaagtcgagcaagagctgtgggtcaagtagccatgagaaccgtcccctggacctgctacacaagatggagtcaaagagctccaaccagctttcctggctctcagtatccatggatgcagccctaggctgcaggactaatatatttcagatccagcgttcaggggggcgtaaacataccgagaagcatgcaagcggtggctccaccgtccacatccatccccaagctgctcctgttgtctgcagacacgttttggatacactcattcaattggccaaggtatttcccagccacttcacacagcagcggaccaaagaaacaaactgtgagagtgatcgggaaaggggcaataaggcctgtagcccatgctcctcacagtcctccagcagtggcatttgcacagacttctgggacttattggtaaaactggacaacatgaatgtcagccggaaaggcaagaactccgtgaagtcagtgccagtgagcgctggcggtgagggggaaacctctccatacagcctcgaggcctctccactggggcagctcatgaacatgttgtcacacccagtcatccgccggagctctctcttaactgagaaactcctcagactcctttctctcatctcaattgctctcccagaaaacaaggtgtcagaagcacaggctaattctggcagcggtgcttcctccaccaccactgccacctcaaccacatctaccaccaccaccactgccgcctccaccacgcccacaccccctactgcacccacccctgtcacttctgctccagccctggttgctgccacggctatttccaccattgtcgtagctgcttcgaccacagtgactacccccacgactgctaccactactgtttcaatttctcccactactaagggcagcaaatctccagcgaaggtgagtgatgggggcagcagcagtacagactttaagatggtgtcctctggcctcactgaaaaccagctacagctctctgtagaggtgttgacatcccactcttgttctgaggaaggcttagaggatgcagccaacgtactactgcagctctcccggggggactctgggacccgggacactgttctcaagctgctactgaatggagcccgccatctgggttataccctttgtaaacaaataggtaccctgctggccgagctgcgggaatacaacctcgagcagcagcggcgagcccaatgtgaaaccctctctcctgatggcctgcctgaggagcagccacagaccaccaagctgaagggcaaaatgcagagcaggtttgacatggctgagaatgtggtaattgtggcatctcagaagcgacctttgggtggccgggagctccagctgccttctatgtccatgttgacatccaagacatctacccagaagttcttcttgagggtactacaggtcatcatccagctccgggacgacacgcgccgggctaacaagaaagccaagcagacaggcaggctaggttcctccggtttaggctcagctagcagcatccaggcagctgttcggcagctggaggctgaggctgatgccattatacaaatggtacgtgagggtcaaagggcgcggagacagcaacaagcagcaacgtcggagtctagccagtcagaggcgtctgtccggagggaggaatcacccatggatgtggaccagccatctcccagtgctcaagatactcaatccattgcctccgatggaaccccacagggggagaaggaaaaggaagaaagaccacctgagttacccctgctcagcgagcagctgagtttggacgagctgtgggacatgcttggggagtgtctaaaggaactagaggaatcccatgaccagcatgcggtgctagtgctacagcctgctgtcgaggccttctttctggtccatgccacagagcgggagagcaagcctcctgtccgagacacccgtgagagccagctggcacacatcaaggacgagcctcctccactctcccctgcccccttaaccccagccacgccttcctcccttgacccattcttctcccgggagccctcatctatgcacatctcctcaagcctgccccctgacacacagaagttccttcgctttgcagagactcaccgcactgtgttaaaccagatcctacggcagtccacgacccaccttgctgatgggccttttgctgtcctggtagactacattcgtgtcctcgactttgatgtcaagcgcaaatatttccgccaagagctggagcgtttagatgaggggctccggaaagaagacatggctgtgcatgtccgtcgtgaccatgtgtttgaagactcctatcgtgagctgcatcgcaaatcccccgaagaaatgaagaatcgattgtatatagtatttgaaggagaagaagggcaggatgctggcgggctcctgcgggagtggtatatgatcatctctcgagagatgtttaaccctatgtatgccttgttccgtacctcacctggtgatcgagtcacctacaccatcaatccatcttcccactgcaaccccaaccacctcagctacttcaagtttgtcggacgcattgtggccaaagctgtatatgacaaccgtcttctggagtgctactttactcgatccttttacaaacacatcttgggcaagtcagtcagatatacagatatggagagtgaagattaccacttctaccaaggtctggtttatctgctggaaaatgatgtctccacactaggctatgacctcaccttcagcactgaggtccaagagtttggagtttgtgaagttcgtgacctcaaacccaatggggccaacatcttggtaacagaggagaataagaaggagtatgtacacctggtatgccagatgagaatgacaggagccatccgcaagcagttggcggctttcttagaaggcttctatgagatcattccaaagcgcctcatttccatcttcactgagcaggagttagagctgcttatatcaggactgcccaccattgacatcgatgatctgaaatccaacactgaataccacaagtaccagtccaactctattcagatccagtggttctggagagcattgcgttctttcgatcaagctgaccgtgccaagttcctccagtttgtcacgggtacttccaaggtacccctgcaaggctttgctgccctcgaaggcatgaatggcattcagaagtttcagatccatcgagatgacaggtccacagatcgcctgccttcagctcacacatgttttaatcagctggatctgcctgcctatgagagctttgagaagctccgccacatgctactgttggctatccaggagtgctctgaaggctttgggctggcctaataaggccctgcccaactccgtggggttttttttaccattgttggacctggggaggggggagttaaaaaaagaaccagaaagaaattgtcaaaaaccaataaatgaaatccaccaactcaccgtgtgtgtcccagctgccccatcttccccagcgcatacctgttcctcttctcattctctccccgccgcctgtttcctcaccttctctcccctttccatgccgtccatgatccccaccccatgtgttttaaaaaggcagtagcctttgcagggacctgtctgtcccaactgtttgaacagtgtgctcctcagattctgtgttcagaaggatttgctgcattgagacttgaaacctttggataggggaaaaaattatatatatatatatttttttgttctgtttgcatttcttaatttgtgcttggaatgtgttgatgtgcacagctaatgattcaatgcgagacaagattggcgtctgtgttgtggaggtttcaaataaagagcactcttcataa

SEQ ID NO: 466975 - DNA, 12382 bp, Homo sapiens
ctgcatccaacctggggagtgctgtcgatgagctcatgagacatcagcccacccttaaaacagatgcaacgactgccatcatcaagttacttgaagaaatctgtaatcttggaagggaccccaaatacatctgtcagaagccatcaatccagaaggcagatggcactgccactgctcctcccccaaggtctaatcatgccgcagaagaagcctctagtgaggatgaggaggaagaggaagtacaggccatgcagagctttaattctacccagcaaaatgaaactgagcctaatcagcaggttgttggtacagaggaacgtattcctattcccctcatggattacatccttaatgtgatgaaatttgtggaatctattctgagcaacaatacaacagatgaccactgccaggaatttgtgaatcagaaaggactgttgcctttggttaccattttgggtcttcccaatctgcccattgactttcccacatctgctgcctgtcaggctgttgcaggtgtctgcaaatccatattgacactgtcacatgaacccaaagtccttcaagagggtctccttcagttggactccatcctctcctccctggagcccttacaccgccccattgaatcccctgggggctcagtgttgttgcgagaactggcttgcgcaggcaatgttgctgatgctaccctctcagcccaggccacacctctgctgcatgcactcactgctgcccatgcctacatcatgatgtttgttcatacttgcagagttggacagagtgaaattcgttccatctccgtaaaccagtggggctctcaattgggtctgagtgttttgagcaagctgagccagttatactgttccctggtgtgggaaagcactgtcctcctctctctgtgtaccccaaacagcctaccatctgggtgtgaatttggccaggcagatatgcagaaactggttccaaaggatgagaaggcaggtacgacccagggcggaaaaagatcagatggggaacaggatggagcagctggaagtatggatgcttctacccagggcttattagaaggcattgggctagatggtgacacattggctcccatggagacagatgaacctactgcttcagactctaagggcaaatctaaaatcacaccagcaatggctgccagaattaagcaaatcaagcctttgttatcagcttcctccagattaggccgagcacttgctgagctatttggacttcttgttaaactttgtgtgggatctcctgtccgccagagaaggagccatcatgctgccagcaccactacagcaccgacacctgccgcgcgatcaacagcctcagctctcactaagctcttgactaaggggttatcttggcagcccccaccatatacacctactccccgattcaggctgacattcttcatctgttcagttggtttcacatccccaatgctgtttgatgagaggaagtatccctaccacctcatgctgcaaaaatttctctgctccggaggccacaatgctctttttgaaactttcaactgggctctgtccatgggaggtaaagttcctgtttctgagggattggaacactcagacttgcctgatggcacaggagaattcctagatgcctggcttatgctggtggagaagatggtgaatcccaccacggtgcttgaatctccacattcgctgcctgccaaattgcctggaggtgtccagaactttccccagttcagtgcactgcgcttccttgtggtaactcagaaagcagcctttacttgcatcaaaaacttatggaaccggaaacccctgaaggtatatggtggacgaatggctgaatcgatgctggccattctatgccacatcctccgaggagaacctgtgattcgagagagactaagcaaggagaaggaggggtctcgaggagaagaggatacagggcaagaggaaggtggctcccgccgggaacctcaagtcaaccagcaacaactgcaacagctcatggacatgggcttcacaagggaacatgcaatggaggcactgttgaacaccagcaccatggagcaggccacagagtaccttttaacccaccctcctccaatcatgggaggagttgttcgggatctcagcatgtctgaagaggaccagatgatgagagcaattgctatgtctctgggacaggatattccaatggatcaaagggcagagtcacctgaggaagttgcttgccggaaggaggaagaggaacggaaagctcgggaaaagcaggaggaggaagaggctaaatgtctagagaagttccaggatgctgacccgttggaacaagatgagctccacactttcacagatactatgttgccaggctgcttccaccttcttgatgagctgccagacacagtataccgtgtgtgtgacctgatcatgacagcaatcaaacgtaatggagcagattatcgtgacatgattctgaagcaagtagtcaatcaggtgtgggaagctgctgatgtattgatcaaagctgctcttcccctgacaacaagtgacacaaaaaccgtgtcagagtggataagtcagatggccacactgccccaggcctccaatttggctactagaatcttgcttttaacgctactttttgaggagttgaagctaccttgtgcttgggtggttgaatcaagtggcatccttaatgtcctaatcaaactcttggaagtggttcagccctgcctccaggcagccaaggagcagaaggaagtccagaccccaaagtggatcacaccagtgttgctcctgattgatttctatgaaaagacagccatctcctcaaaaaggagagcccagatgactaagtacctgcaatccaacagcaacaactggcgctggtttgatgatcgctctgggcgttggtgtagttacagtgcaagcaacaatagcactattgattctgcctggaaatctggagagacaagcgtgcgattcactgcaggccgaagaagatacacggtccaattcactacaatggtgcaggttaatgaggaaacagggaaccgacgccctgtgatgctgactctcctcagggtacctcggctgaataaaaattcaaaaaacagcaatggacaggaactagagaagacgctggaagaaagcaaagaaatggatatcaaacgtaaagaaaataaaggcaatgatacccctttggccctagagagtacaaacactgaaaaggagacaagcctggaggaaacaaaaatcggggagatcctgatccagggcttgacagaagatatggtgactgttttaatccgggcctgcgtgagcatgctgggagtccctgtggacccagatactttgcatgccacccttcgtctctgtctgaggctcacccgggaccacaaatatgccatgatgtttgcagaactgaagagtacccgcatgatcttgaatttgacccagagctcaggcttcaatgggtttactcccctggtcacccttctcttaagacacatcattgaggacccctgtacccttcgtcataccatggaaaaggttgttcgctcagcagctacaagtggagctggtagcactacctctggtgttgtgtctggcagcctcggctctcgggagatcaactacatccttcgtgtccttgggccagccgcatgccgcaatccagacatattcacagaagtggccaactgctgtatccgcatcgcccttcctgcccctcgaggctcaggaactgcttcagatgatgaatttgagaatcttagaattaaaggccctaatgctgtacagctggtgaagaccacccctttgaagccctcacctctgcctgtcatccctgatactatcaaggaagtgatctatgatatgctgaatgctctggctgcataccatgctccagaggaagcagataaatctgatcctaaacctggggttatgacccaagaggttggccagctcctgcaagacatgggtgatgatgtataccagcagtaccggtcacttacgcgtcagagcagtgactttgatacgcagtcaggtttttccattaatagtcaggtctttgctgcagatggtgcctccactgagacttccgcatctgggacctcccaaggagaggcttcaactccagaggagtctcgagatgggaagaaagataaagaaggggaccgggcctctgaggaaggcaaacagaaaggcaagggcagcaaacctttaatgcctacctccactatccttcgtcttctggcagagttggtgaggtcctatgttggtattgctaccctgattgccaactacagctacactgtgggccagtctgaactgatcaaagaggactgcagtgtgctagcttttgttctggaccacctgctcccacatacccagaatgcagaagacaaggacacccctgccttggcccgcctgttcctcgcaagcctggctgctgcagggagtggcacagatgcccaggtggccctagtgaatgaagtaaaagcagcccttggacgggcactggctatggctgagagtacagagaaacatgccaggcttcaggcagtgatgtgtatcatcagtactatcatggagtcctgcccctccacctccagcttctacagcagtgccacagcgaagacccagcacaatggcatgaacaacatcattcggcttttcctgaagaagggactggttaatgacctggccagagtacctcacagcttagacctgtccagtcccaacatggccaacacagtcaatgctgctctgaagcctttggaaacactttcccggattgtgaaccagcccagtagcctttttggcagcaagagtgcttctagcaagaacaagtctgagcaggatgcccaaggagcctctcaagattccagtagcaaccagcaggacccaggcgagcctggggaagcagaagtgcaggaggaggatcatgatgtcactcagacagaggtggcagatggggatatcatggatggggaggctgaaaccgactcagtggtgattgctgggcagcctgaggtgctcagttcacaagagatgcaggttgagaatgagctggaggacctgatagatgagttgcttgagagggatggcggatctgggaacagtacaattatagtgagcagaagtggagaggatgaatcacaagaggacgtgctgatggatgaagctccttccaacctcagccaagcttccaccttgcaggccaaccgagaagattccatgaatatcctggaccctgaggatgaggaggagcacactcaggaagaggacagcagtggcagtaacgaggatgaggatgatagtcaggatgaagaggaggaggaggaggaagatgaggaagatgatcaggaggatgatgaaggtgaagagggagatgaagacgatgacgacgatggctctgagatggaattggatgaggattatcctgatatgaacgcttctcccttggtccgatttgagcgctttgaccgggaggatgatctcatcattgagtttgacaacatgttctccagtgctacagacatccccccatccccaggaaatatccctaccacccatccactgatggtgcgccatgcagaccacagttctctgacactgggcagtggctcttcaacaactcgtctcacccagggcatcgggcgcagtcagaggaccctaaggcagctgacggccaatactggccacaccattcatgttcactaccctgggaatcgccagcccaaccctcctcttatactgcagaggttgcttggtccctcagctgctgctgacatccttcagctgagcagcagccttcccctacaaagccggggtcgggcccgcctcctggtaggcaacgatgacgtccacatcatcgcccgttctgatgatgagctgctggatgactttttccatgatcagagcacagctaccagccaagcaggaaccctgtccagcatccccacagccctgacccgctggacagaagaatgcaaagttctcgatgctgagagcatgcatgactgtgtttcagtggttaaagtgtccattgtcaatcacctggaattcctgagggatgaggagctggaagaaaggcgagagaagcgcaggaaacaactggctgaggaagaaacaaagataactgataaaggcaaagaagataaggagaacagggatcagagtgcacagtgtactgcatctaagtcaaatgactccactgaacagaatctctcagatgggacgcctatgcctgacagctacccaacaaccccatcttcaactgatgcagctacatctgagtccaaggagacccttggcactctgcaatcctcacaacagcaaccaacactcccaaccccaccagctttgggagaggttcctcaggagctgcagtctccagctggagaagggggcagctctacacagctattgatgcctgtagagccagaggaattgggtcccacaaggccaagtggggaagcagaaacaactcagatggagttatccccagctcccactataacctcactttccccagagagagctgaggattctgatgcactgacggctgtcagcagtcagctagaaggctctcctatggatacaagcagcctggcttcctgtaccttagaggaggctgtgggtgacacttcagcagctggcagttctgagcagcccagagcaggcagctccactcctggggatgccccaccagctgtggcggaagtgcaaggcaggagtgatgggtcaggggaatctgcccagccacctgaggacagctccccacctgcatcctctgagagctcttccaccagagattctgccgtggccatttctggagcagattcccgaggaatcctagaagagccgttgccttcaacaagcagtgaagaagaagatccccttgcgggtatcagtctccctgaaggtgtggacccctcttttctggctgccctgcctgatgacatccgtcgggaagttctacagaaccagctaggcattcgtccaccaacccggactgccccctccacaaatagctcagcgcctgcagtggtggggaatcctggtgtgactgaagtgagccctgagtttctggctgccctgcctccagccattcaggaggaagtactggcacagcagagagctgagcagcagcgacgagaactagcacagaatgccagctcagacacccctatggaccctgtgaccttcatccagactctgccctcagacctgcgccgtagtgtcctagaggatatggaggacagtgtgttagctgtgatgccacctgacattgcagctgaggctcaagccctgagacgagagcaagaagcccggcagcgacagctcatgcatgagcgtctgtttgggcacagtagcacctccgcactctctgctattctccgaagcccggctttcaccagtcgcttaagtggcaaccgtggggtccagtatactcgccttgctgtgcagagaggtggcaccttccagatggggggtagcagcagccataacaggccttctggcagtaatgtagatactctcctccgcctccgaggacggctccttctggaccacgaagccctttcttgtctcttggtcctactttttgtggatgagccaaagctcaatactagccgtctacaccgagtactgagaaatctctgctaccatgcccagacccgccactgggtcatccgcagtctgctctccatcttgcagcgcagcagtgagagtgagctatgcattgaaacacccaaactcactacaagtgaggaaaagggcaaaaagtcgagcaagagctgtgggtcaagtagccatgagaaccgtcccctggacctgctacacaagatggagtcaaagagctccaaccagctttcctggctctcagtatccatggatgcagccctaggctgcaggactaatatatttcagatccagcgttcaggggggcgtaaacataccgagaagcatgcaagcggtggctccaccgtccacatccatccccaagctgctcctgttgtctgcagacacgttttggatacactcattcaattggccaaggtatttcccagccacttcacacagcagcggaccaaagaaacaaactgtgagagtgatcgggaaaggggcaataaggcctgtagcccatgctcctcacagtcctccagcagtggcatttgcacagacttctgggacttattggtaaaactggacaacatgaatgtcagccggaaaggcaagaactccgtgaagtcagtgccagtgagcgctggcggtgagggggaaacctctccatacagcctcgaggcctctccactggggcagctcatgaacatgttgtcacacccagtcatccgccggagctctctcttaactgagaaactcctcagactcctttctctcatctcaattgctctcccagaaaacaaggtgtcagaagcacaggctaattctggcagcggtgcttcctccaccaccactgccacctcaaccacatctaccaccaccaccactgccgcctccaccacgcccacaccccctactgcacccacccctgtcacttctgctccagccctggttgctgccacggctatttccaccattgtcgtagctgcttcgaccacagtgactacccccacgactgctaccactactgtttcaatttctcccactactaagggcagcaaatctccagcgaaggtgagtgatgggggcagcagcagtacagactttaagatggtgtcctctggcctcactgaaaaccagctacagctctctgtagaggtgttgacatcccactcttgttctgaggaaggcttagaggatgcagccaacgtactactgcagctctcccggggggactctgggacccgggacactgttctcaagctgctactgaatggagcccgccatctgggttataccctttgtaaacaaataggtaccctgctggccgagctgcgggaatacaacctcgagcagcagcggcgagcccaatgtgaaaccctctctcctgatggcctgcctgaggagcagccacagaccaccaagctgaagggcaaaatgcagagcaggtttgacatggctgagaatgtggtaattgtggcatctcagaagcgacctttgggtggccgggagctccagctgccttctatgtccatgttgacatccaagacatctacccagaagttcttcttgagggtactacaggtcatcatccagctccgggacgacacgcgccgggctaacaagaaagccaagcagacaggcaggctaggttcctccggtttaggctcagctagcagcatccaggcagctgttcggcagctggaggctgaggctgatgccattatacaaatggtacgtgagggtcaaagggcgcggagacagcaacaagcagcaacgtcggagtctagccagtcagaggcgtctgtccggagggaggaatcacccatggatgtggaccagccatctcccagtgctcaagatactcaatccattgcctccgatggaaccccacagggggagaaggaaaaggaagaaagaccacctgagttacccctgctcagcgagcagctgagtttggacgagctgtgggacatgcttggggagtgtctaaaggaactagaggaatcccatgaccagcatgcggtgctagtgctacagcctgctgtcgaggccttctttctggtccatgccacagagcgggagagcaagcctcctgtccgagacacccgtgagagccagctggcacacatcaaggacgagcctcctccactctcccctgcccccttaaccccagccacgccttcctcccttgacccattcttctcccgggagccctcatctatgcacatctcctcaagcctgccccctgacacacagaagttccttcgctttgcagagactcaccgcactgtgttaaaccagatcctacggcagtccacgacccaccttgctgatgggccttttgctgtcctggtagactacattcgtgtcctcgactttgatgtcaagcgcaaatatttccgccaagagctggagcgtttagatgaggggctccggaaagaagacatggctgtgcatgtccgtcgtgaccatgtgtttgaagactcctatcgtgagctgcatcgcaaatcccccgaagaaatgaagaatcgattgtatatagtatttgaaggagaagaagggcaggatgctggcgggctcctgcgggagtggtatatgatcatctctcgagagatgtttaaccctatgtatgccttgttccgtacctcacctggtgatcgagtcacctacaccatcaatccatcttcccactgcaaccccaaccacctcagctacttcaagtttgtcggacgcattgtggccaaagctgtatatgacaaccgtcttctggagtgctactttactcgatccttttacaaacacatcttgggcaagtcagtcagatatacagatatggagagtgaagattaccacttctaccaaggtctggtttatctgctggaaaatgatgtctccacactaggctatgacctcaccttcagcactgaggtccaagagtttggagtttgtgaagttcgtgacctcaaacccaatggggccaacatcttggtaacagaggagaataagaaggagtatgtacacctggtatgccagatgagaatgacaggagccatccgcaagcagttggcggctttcttagaaggcttctatgagatcattccaaagcgcctcatttccatcttcactgagcaggagttagagctgcttatatcaggactgcccaccattgacatcgatgatctgaaatccaacactgaataccacaagtaccagtccaactctattcagatccagtggttctggagagcattgcgttctttcgatcaagctgaccgtgccaagttcctccagtttgtcacgggtacttccaaggtacccctgcaaggctttgctgccctcgaaggcatgaatggcattcagaagtttcagatccatcgagatgacaggtccacagatcgcctgccttcagctcacacatgttttaatcagctggatctgcctgcctatgagagctttgagaagctccgccacatgctactgttggctatccaggagtgctctgaaggctttgggctggcctaataaggccctgcccaactccgtggggttttttttaccattgttggacctggggaggggggagttaaaaaaagaaccagaaagaaattgtcaaaaaccaataaatgaaatccaccaactcaccgtgtgtgtcccagctgccccatcttccccagcgcatacctgttcctcttctcattctctccccgccgcctgtttcctcaccttctctcccctttccatgccgtccatgatccccaccccatgtgttttaaaaaggcagtagcctttgcagggacctgtctgtcccaactgtttgaacagtgtgctcctcagattctgtgttcagaaggatttgctgcattgagacttgaaacctttggataggggaaaaaattatatatatatatatttttttgttctgtttgcatttcttaatttgtgcttggaatgtgttgatgtgcacagctaatgattcaatgcgagacaagattggcgtctgtgttgtggaggtttcaaataaagagcactcttcataactcacttttcacaatggagtttttttcaaacttaaaaaaaaaaacaaaaaactcttaagcacatgctaggcatctggagaaaagatggattctccaggaaaccatccctgccctacccgcttgcccacctgcctccaccactggtgcaacttcctccttcagagtcagtttctgcagtcaggagagatgagcagttcaccaggaattgggggtgggggcatctgtttttttttttttagaatgggagctgcacttggggatggtgatggtgttagagattgcagcccaggacaaagcatcaccttgctcaaggggaacaaactgcagcaggttgtacaaaacattcagagagctcacttgacccaaccgagggttttacttggtgagcctttctagtagtcttgagtctggggctcagttttagatttttatttcattaatgtttgtttatttctaataaattttaataagcgagtaatttaactaggtcgccagaagaccattatttttgtttgtctatttttgttgtcgtcactccctctctcgtcatctgtctgccagtctgttcacagatcaccttgtagtcccttgtggtttttactccatccagtgcttaaagctgatctaaggacttcgatggttccagccttcaaagaaaaaataatttaataaaaatttagttagaaaaaataaccccaagtggtg

SEQ ID NO: 466976 - DNA, 11765 bp, Homo sapiens
ctgcatccaacctggggagtgctgtcgatgagctcatgagacatcagcccacccttaaaacagatgcaacgactgccatcatcaagttacttgaagaaatctgtaatcttggaagggaccccaaatacatctgtcagaagccatcaatccagaaggcagatggcactgccactgctcctcccccaaggtctaatcatgccgcagaagaagcctctagtgaggatgaggaggaagaggaagtacaggccatgcagagctttaattctacccagcaaaatgaaactgagcctaatcagcaggttgttggtacagaggaacgtattcctattcccctcatggattacatccttaatgtgatgaaatttgtggaatctattctgagcaacaatacaacagatgaccactgccaggaatttgtgaatcagaaaggactgttgcctttggttaccattttgggtcttcccaatctgcccattgactttcccacatctgctgcctgtcaggctgttgcaggtgtctgcaaatccatattgacactgtcacatgaacccaaagtccttcaagagggtctccttcagttggactccatcctctcctccctggagcccttacaccgccccattgaatcccctgggggctcagtgttgttgcgagaactggcttgcgcaggcaatgttgctgatgctaccctctcagcccaggccacacctctgctgcatgcactcactgctgcccatgcctacatcatgatgtttgttcatacttgcagagttggacagagtgaaattcgttccatctccgtaaaccagtggggctctcaattgggtctgagtgttttgagcaagctgagccagttatactgttccctggtgtgggaaagcactgtcctcctctctctgtgtaccccaaacagcctaccatctgggtgtgaatttggccaggcagatatgcagaaactggttccaaaggatgagaaggcaggtacgacccagggcggaaaaagatcagatggggaacaggatggagcagctggaagtatggatgcttctacccagggcttattagaaggcattgggctagatggtgacacattggctcccatggagacagatgaacctactgcttcagactctaagggcaaatctaaaatcacaccagcaatggctgccagaattaagcaaatcaagcctttgttatcagcttcctccagattaggccgagcacttgctgagctatttggacttcttgttaaactttgtgtgggatctcctgtccgccagagaaggagccatcatgctgccagcaccactacagcaccgacacctgccgcgcgatcaacagcctcagctctcactaagctcttgactaaggggttatcttggcagcccccaccatatacacctactccccgattcaggctgacattcttcatctgttcagttggtttcacatccccaatgctgtttgatgagaggaagtatccctaccacctcatgctgcaaaaatttctctgctccggaggccacaatgctctttttgaaactttcaactgggctctgtccatgggaggtaaagttcctgtttctgagggattggaacactcagacttgcctgatggcacaggagaattcctagatgcctggcttatgctggtggagaagatggtgaatcccaccacggtgcttgaatctccacattcgctgcctgccaaattgcctggaggtgtccagaactttccccagttcagtgcactgcgcttccttgtggtaactcagaaagcagcctttacttgcatcaaaaacttatggaaccggaaacccctgaaggtatatggtggacgaatggctgaatcgatgctggccattctatgccacatcctccgaggagaacctgtgattcgagagagactaagcaaggagaaggaggggtctcgaggagaagaggatacagggcaagaggaaggtggctcccgccgggaacctcaagtcaaccagcaacaactgcaacagctcatggacatgggcttcacaagggaacatgcaatggaggcactgttgaacaccagcaccatggagcaggccacagagtaccttttaacccaccctcctccaatcatgggaggagttgttcgggatctcagcatgtctgaagaggaccagatgatgagagcaattgctatgtctctgggacaggatattccaatggatcaaagggcagagtcacctgaggaagttgcttgccggaaggaggaagaggaacggaaagctcgggaaaagcaggaggaggaagaggctaaatgtctagagaagttccaggatgctgacccgttggaacaagatgagctccacactttcacagatactatgttgccaggctgcttccaccttcttgatgagctgccagacacagtataccgtgtgtgtgacctgatcatgacagcaatcaaacgtaatggagcagattatcgtgacatgattctgaagcaagtagtcaatcaggtgtgggaagctgctgatgtattgatcaaagctgctcttcccctgacaacaagtgacacaaaaaccgtgtcagagtggataagtcagatggccacactgccccaggcctccaatttggctactagaatcttgcttttaacgctactttttgaggagttgaagctaccttgtgcttgggtggttgaatcaagtggcatccttaatgtcctaatcaaactcttggaagtggttcagccctgcctccaggcagccaaggagcagaaggaagtccagaccccaaagtggatcacaccagtgttgctcctgattgatttctatgaaaagacagccatctcctcaaaaaggagagcccagatgactaagtacctgcaatccaacagcaacaactggcgctggtttgatgatcgctctgggcgttggtgtagttacagtgcaagcaacaatagcactattgattctgcctggaaatctggagagacaagcgtgcgattcactgcaggccgaagaagatacacggtccaattcactacaatggtgcaggttaatgaggaaacagggaaccgacgccctgtgatgctgactctcctcagggtacctcggctgaataaaaattcaaaaaacagcaatggacaggaactagagaagacgctggaagaaagcaaagaaatggatatcaaacgtaaagaaaataaaggcaatgatacccctttggccctagagagtacaaacactgaaaaggagacaagcctggaggaaacaaaaatcggggagatcctgatccagggcttgacagaagatatggtgactgttttaatccgggcctgcgtgagcatgctgggagtccctgtggacccagatactttgcatgccacccttcgtctctgtctgaggctcacccgggaccacaaatatgccatgatgtttgcagaactgaagagtacccgcatgatcttgaatttgacccagagctcaggcttcaatgggtttactcccctggtcacccttctcttaagacacatcattgaggacccctgtacccttcgtcataccatggaaaaggttgttcgctcagcagctacaagtggagctggtagcactacctctggtgttgtgtctggcagcctcggctctcgggagatcaactacatccttcgtgtccttgggccagccgcatgccgcaatccagacatattcacagaagtggccaactgctgtatccgcatcgcccttcctgcccctcgaggctcaggaactgcttcagatgatgaatttgagaatcttagaattaaaggccctaatgctgtacagctggtgaagaccacccctttgaagccctcacctctgcctgtcatccctgatactatcaaggaagtgatctatgatatgctgaatgctctggctgcataccatgctccagaggaagcagataaatctgatcctaaacctggggttatgacccaagaggttggccagctcctgcaagacatgggtgatgatgtataccagcagtaccggtcacttacgcgtcagagcagtgactttgatacgcagtcaggtttttccattaatagtcaggtctttgctgcagatggtgcctccactgagacttccgcatctgggacctcccaaggagaggcttcaactccagaggagtctcgagatgggaagaaagataaagaaggggaccgggcctctgaggaaggcaaacagaaaggcaagggcagcaaacctttaatgcctacctccactatccttcgtcttctggcagagttggtgaggtcctatgttggtattgctaccctgattgccaactacagctacactgtgggccagtctgaactgatcaaagaggactgcagtgtgctagcttttgttctggaccacctgctcccacatacccagaatgcagaagacaaggacacccctgccttggcccgcctgttcctcgcaagcctggctgctgcagggagtggcacagatgcccaggtggccctagtgaatgaagtaaaagcagcccttggacgggcactggctatggctgagagtacagagaaacatgccaggcttcaggcagtgatgtgtatcatcagtactatcatggagtcctgcccctccacctccagcttctacagcagtgccacagcgaagacccagcacaatggcatgaacaacatcattcggcttttcctgaagaagggactggttaatgacctggccagagtacctcacagcttagacctgtccagtcccaacatggccaacacagtcaatgctgctctgaagcctttggaaacactttcccggattgtgaaccagcccagtagcctttttggcagcaagagtgcttctagcaagaacaagtctgagcaggatgcccaaggagcctctcaagattccagtagcaaccagcaggacccaggcgagcctggggaagcagaagtgcaggaggaggatcatgatgtcactcagacagaggtggcagatggggatatcatggatggggaggctgaaaccgactcagtggtgattgctgggcagcctgaggtgctcagttcacaagagatgcaggttgagaatgagctggaggacctgatagatgagttgcttgagagggatggcggatctgggaacagtacaattatagtgagcagaagtggagaggatgaatcacaagaggacgtgctgatggatgaagctccttccaacctcagccaagcttccaccttgcaggccaaccgagaagattccatgaatatcctggaccctgaggatgaggaggagcacactcaggaagaggacagcagtggcagtaacgaggatgaggatgatagtcaggatgaagaggaggaggaggaggaagatgaggaagatgatcaggaggatgatgaaggtgaagagggagatgaagacgatgacgacgatggctctgagatggaattggatgaggattatcctgatatgaacgcttctcccttggtccgatttgagcgctttgaccgggaggatgatctcatcattgagtttgacaacatgttctccagtgctacagacatccccccatccccaggaaatatccctaccacccatccactgatggtgcgccatgcagaccacagttctctgacactgggcagtggctcttcaacaactcgtctcacccagggcatcgggcgcagtcagaggaccctaaggcagctgacggccaatactggccacaccattcatgttcactaccctgggaatcgccagcccaaccctcctcttatactgcagaggttgcttggtccctcagctgctgctgacatccttcagctgagcagcagccttcccctacaaagccggggtcgggcccgcctcctggtaggcaacgatgacgtccacatcatcgcccgttctgatgatgagctgctggatgactttttccatgatcagagcacagctaccagccaagcaggaaccctgtccagcatccccacagccctgacccgctggacagaagaatgcaaagttctcgatgctgagagcatgcatgactgtgtttcagtggttaaagtgtccattgtcaatcacctggaattcctgagggatgaggagctggaagaaaggcgagagaagcgcaggaaacaactggctgaggaagaaacaaagataactgataaaggcaaagaagataaggagaacagggatcagagtgcacagtgtactgcatctaagtcaaatgactccactgaacagaatctctcagatgggacgcctatgcctgacagctacccaacaaccccatcttcaactgatgcagctacatctgagtccaaggagacccttggcactctgcaatcctcacaacagcaaccaacactcccaaccccaccagctttgggagaggttcctcaggagctgcagtctccagctggagaagggggcagctctacacagctattgatgcctgtagagccagaggaattgggtcccacaaggccaagtggggaagcagaaacaactcagatggagttatccccagctcccactataacctcactttccccagagagagctgaggattctgatgcactgacggctgtcagcagtcagctagaaggctctcctatggatacaagcagcctggcttcctgtaccttagaggaggctgtgggtgacacttcagcagctggcagttctgagcagcccagagcaggcagctccactcctggggatgccccaccagctgtggcggaagtgcaaggcaggagtgatgggtcaggggaatctgcccagccacctgaggacagctccccacctgcatcctctgagagctcttccaccagagattctgccgtggccatttctggagcagattcccgaggaatcctagaagagccgttgccttcaacaagcagtgaagaagaagatccccttgcgggtatcagtctccctgaaggtgtggacccctcttttctggctgccctgcctgatgacatccgtcgggaagttctacagaaccagctaggcattcgtccaccaacccggactgccccctccacaaatagctcagcgcctgcagtggtggggaatcctggtgtgactgaagtgagccctgagtttctggctgccctgcctccagccattcaggaggaagtactggcacagcagagagctgagcagcagcgacgagaactagcacagaatgccagctcagacacccctatggaccctgtgaccttcatccagactctgccctcagacctgcgccgtagtgtcctagaggatatggaggacagtgtgttagctgtgatgccacctgacattgcagctgaggctcaagccctgagacgagagcaagaagcccggcagcgacagctcatgcatgagcgtctgtttgggcacagtagcacctccgcactctctgctattctccgaagcccggctttcaccagtcgcttaagtggcaaccgtggggtccagtatactcgccttgctgtgcagagaggtggcaccttccagatggggggtagcagcagccataacaggccttctggcagtaatgtagatactctcctccgcctccgaggacggctccttctggaccacgaagccctttcttgtctcttggtcctactttttgtggatgagccaaagctcaatactagccgtctacaccgagtactgagaaatctctgctaccatgcccagacccgccactgggtcatccgcagtctgctctccatcttgcagcgcagcagtgagagtgagctatgcattgaaacacccaaactcactacaagtgaggaaaagggcaaaaagtcgagcaagagctgtgggtcaagtagccatgagaaccgtcccctggacctgctacacaagatggagtcaaagagctccaaccagctttcctggctctcagtatccatggatgcagccctaggctgcaggactaatatatttcagatccagcgttcaggggggcgtaaacataccgagaagcatgcaagcggtggctccaccgtccacatccatccccaagctgctcctgttgtctgcagacacgttttggatacactcattcaattggccaaggtatttcccagccacttcacacagcagcggaccaaagaaacaaactgtgagagtgatcgggaaaggggcaataaggcctgtagcccatgctcctcacagtcctccagcagtggcatttgcacagacttctgggacttattggtaaaactggacaacatgaatgtcagccggaaaggcaagaactccgtgaagtcagtgccagtgagcgctggcggtgagggggaaacctctccatacagcctcgaggcctctccactggggcagctcatgaacatgttgtcacacccagtcatccgccggagctctctcttaactgagaaactcctcagactcctttctctcatctcaattgctctcccagaaaacaaggtgtcagaagcacaggctaattctggcagcggtgcttcctccaccaccactgccacctcaaccacatctaccaccaccaccactgccgcctccaccacgcccacaccccctactgcacccacccctgtcacttctgctccagccctggttgctgccacggctatttccaccattgtcgtagctgcttcgaccacagtgactacccccacgactgctaccactactgtttcaatttctcccactactaagggcagcaaatctccagcgaaggtgagtgatgggggcagcagcagtacagactttaagatggtgtcctctggcctcactgaaaaccagctacagctctctgtagaggtgttgacatcccactcttgttctgaggaaggcttagaggatgcagccaacgtactactgcagctctcccggggggactctgggacccgggacactgttctcaagctgctactgaatggagcccgccatctgggttataccctttgtaaacaaataggtaccctgctggccgagctgcgggaatacaacctcgagcagcagcggcgagcccaatgtgaaaccctctctcctgatggcctgcctgaggagcagccacagaccaccaagctgaagggcaaaatgcagagcaggtttgacatggctgagaatgtggtaattgtggcatctcagaagcgacctttgggtggccgggagctccagctgccttctatgtccatgttgacatccaagacatctacccagaagttcttcttgagggtactacaggtcatcatccagctccgggacgacacgcgccgggctaacaagaaagccaagcagacaggcaggctaggttcctccggtttaggctcagctagcagcatccaggcagctgttcggcagctggaggctgaggctgatgccattatacaaatggtacgtgagggtcaaagggcgcggagacagcaacaagcagcaacgtcggagtctagccagtcagaggcgtctgtccggagggaggaatcacccatggatgtggaccagccatctcccagtgctcaagatactcaatccattgcctccgatggaaccccacagggggagaaggaaaaggaagaaagaccacctgagttacccctgctcagcgagcagctgagtttggacgagctgtgggacatgcttggggagtgtctaaaggaactagaggaatcccatgaccagcatgcggtgctagtgctacagcctgctgtcgaggccttctttctggtccatgccacagagcgggagagcaagcctcctgtccgagacacccgtgagagccagctggcacacatcaaggacgagcctcctccactctcccctgcccccttaaccccagccacgccttcctcccttgacccattcttctcccgggagccctcatctatgcacatctcctcaagcctgccccctgacacacagaagttccttcgctttgcagagactcaccgcactgtgttaaaccagatcctacggcagtccacgacccaccttgctgatgggccttttgctgtcctggtagactacattcgtgtcctcgactttgatgtcaagcgcaaatatttccgccaagagctggagcgtttagatgaggggctccggaaagaagacatggctgtgcatgtccgtcgtgaccatgtgtttgaagactcctatcgtgagctgcatcgcaaatcccccgaagaaatgaagaatcgattgtatatagtatttgaaggagaagaagggcaggatgctggcgggctcctgcgggagtggtatatgatcatctctcgagagatgtttaaccctatgtatgccttgttccgtacctcacctggtgatcgagtcacctacaccatcaatccatcttcccactgcaaccccaaccacctcagctacttcaagtttgtcggacgcattgtggccaaagctgtatatgacaaccgtcttctggagtgctactttactcgatccttttacaaacacatcttgggcaagtcagtcagatatacagatatggagagtgaagattaccacttctaccaaggtctggtttatctgctggaaaatgatgtctccacactaggctatgacctcaccttcagcactgaggtccaagagtttggagtttgtgaagttcgtgacctcaaacccaatggggccaacatcttggtaacagaggagaataagaaggagtatgtacacctggtatgccagatgagaatgacaggagccatccgcaagcagttggcggctttcttagaaggcttctatgagatcattccaaagcgcctcatttccatcttcactgagcaggagttagagctgcttatatcaggactgcccaccattgacatcgatgatctgaaatccaacactgaataccacaagtaccagtccaactctattcagatccagtggttctggagagcattgcgttctttcgatcaagctgaccgtgccaagttcctccagtttgtcacgggtacttccaaggtacccctgcaaggctttgctgccctcgaaggcatgaatggcattcagaagtttcagatccatcgagatgacaggtccacagatcgcctgccttcagctcacacatgttttaatcagctggatctgcctgcctatgagagctttgagaagctccgccacatgctactgttggctatccaggagtgctctgaaggctttgggctggcctaataaggccctgcccaactccgtggggttttttttaccattgttggacctggggaggggggagttaaaaaaagaaccagaaagaaattgtcaaaaaccaataaatgaaatccaccaactcaccgtgtgtgtcccagctgccccatcttccccagcgcatacctgttcctcttctcattctctccccgccgcctgtttcctcaccttctctcccctttccatgccgtccatgatccccaccccatgtgttttaaaaaggcagtagcctttgcagggacctgtctgtcccaactgtttgaacagtgtgctcctcagattctgtgttcagaaggatttgctgcattgagacttgaaacctttggataggggaaaaaattatatatatatatatttttttgttctgtttgcatttcttaatttgtgcttggaatgtgttgatgtgcacagctaatgattcaatgcgagacaagattggcgtctgtgttgtggaggtttcaaataaagagcactcttcataaaaaaggaaaatcgggttagcggggggaaagggagaggcaggaagtgtccgacagtttgtcaagggatcggcccaaggggaatggagcg

SEQ ID NO: 466977 - DNA, 11838 bp, Homo sapiens
ctgcatccaacctggggagtgctgtcgatgagctcatgagacatcagcccacccttaaaacagatgcaacgactgccatcatcaagttacttgaagaaatctgtaatcttggaagggaccccaaatacatctgtcagaagccatcaatccagaaggcagatggcactgccactgctcctcccccaaggtctaatcatgccgcagaagaagcctctagtgaggatgaggaggaagaggaagtacaggccatgcagagctttaattctacccagcaaaatgaaactgagcctaatcagcaggttgttggtacagaggaacgtattcctattcccctcatggattacatccttaatgtgatgaaatttgtggaatctattctgagcaacaatacaacagatgaccactgccaggaatttgtgaatcagaaaggactgttgcctttggttaccattttgggtcttcccaatctgcccattgactttcccacatctgctgcctgtcaggctgttgcaggtgtctgcaaatccatattgacactgtcacatgaacccaaagtccttcaagagggtctccttcagttggactccatcctctcctccctggagcccttacaccgccccattgaatcccctgggggctcagtgttgttgcgagaactggcttgcgcaggcaatgttgctgatgctaccctctcagcccaggccacacctctgctgcatgcactcactgctgcccatgcctacatcatgatgtttgttcatacttgcagagttggacagagtgaaattcgttccatctccgtaaaccagtggggctctcaattgggtctgagtgttttgagcaagctgagccagttatactgttccctggtgtgggaaagcactgtcctcctctctctgtgtaccccaaacagcctaccatctgggtgtgaatttggccaggcagatatgcagaaactggttccaaaggatgagaaggcaggtacgacccagggcggaaaaagatcagatggggaacaggatggagcagctggaagtatggatgcttctacccagggcttattagaaggcattgggctagatggtgacacattggctcccatggagacagatgaacctactgcttcagactctaagggcaaatctaaaatcacaccagcaatggctgccagaattaagcaaatcaagcctttgttatcagcttcctccagattaggccgagcacttgctgagctatttggacttcttgttaaactttgtgtgggatctcctgtccgccagagaaggagccatcatgctgccagcaccactacagcaccgacacctgccgcgcgatcaacagcctcagctctcactaagctcttgactaaggggttatcttggcagcccccaccatatacacctactccccgattcaggctgacattcttcatctgttcagttggtttcacatccccaatgctgtttgatgagaggaagtatccctaccacctcatgctgcaaaaatttctctgctccggaggccacaatgctctttttgaaactttcaactgggctctgtccatgggaggtaaagttcctgtttctgagggattggaacactcagacttgcctgatggcacaggagaattcctagatgcctggcttatgctggtggagaagatggtgaatcccaccacggtgcttgaatctccacattcgctgcctgccaaattgcctggaggtgtccagaactttccccagttcagtgcactgcgcttccttgtggtaactcagaaagcagcctttacttgcatcaaaaacttatggaaccggaaacccctgaaggtatatggtggacgaatggctgaatcgatgctggccattctatgccacatcctccgaggagaacctgtgattcgagagagactaagcaaggagaaggaggggtctcgaggagaagaggatacagggcaagaggaaggtggctcccgccgggaacctcaagtcaaccagcaacaactgcaacagctcatggacatgggcttcacaagggaacatgcaatggaggcactgttgaacaccagcaccatggagcaggccacagagtaccttttaacccaccctcctccaatcatgggaggagttgttcgggatctcagcatgtctgaagaggaccagatgatgagagcaattgctatgtctctgggacaggatattccaatggatcaaagggcagagtcacctgaggaagttgcttgccggaaggaggaagaggaacggaaagctcgggaaaagcaggaggaggaagaggctaaatgtctagagaagttccaggatgctgacccgttggaacaagatgagctccacactttcacagatactatgttgccaggctgcttccaccttcttgatgagctgccagacacagtataccgtgtgtgtgacctgatcatgacagcaatcaaacgtaatggagcagattatcgtgacatgattctgaagcaagtagtcaatcaggtgtgggaagctgctgatgtattgatcaaagctgctcttcccctgacaacaagtgacacaaaaaccgtgtcagagtggataagtcagatggccacactgccccaggcctccaatttggctactagaatcttgcttttaacgctactttttgaggagttgaagctaccttgtgcttgggtggttgaatcaagtggcatccttaatgtcctaatcaaactcttggaagtggttcagccctgcctccaggcagccaaggagcagaaggaagtccagaccccaaagtggatcacaccagtgttgctcctgattgatttctatgaaaagacagccatctcctcaaaaaggagagcccagatgactaagtacctgcaatccaacagcaacaactggcgctggtttgatgatcgctctgggcgttggtgtagttacagtgcaagcaacaatagcactattgattctgcctggaaatctggagagacaagcgtgcgattcactgcaggccgaagaagatacacggtccaattcactacaatggtgcaggttaatgaggaaacagggaaccgacgccctgtgatgctgactctcctcagggtacctcggctgaataaaaattcaaaaaacagcaatggacaggaactagagaagacgctggaagaaagcaaagaaatggatatcaaacgtaaagaaaataaaggcaatgatacccctttggccctagagagtacaaacactgaaaaggagacaagcctggaggaaacaaaaatcggggagatcctgatccagggcttgacagaagatatggtgactgttttaatccgggcctgcgtgagcatgctgggagtccctgtggacccagatactttgcatgccacccttcgtctctgtctgaggctcacccgggaccacaaatatgccatgatgtttgcagaactgaagagtacccgcatgatcttgaatttgacccagagctcaggcttcaatgggtttactcccctggtcacccttctcttaagacacatcattgaggacccctgtacccttcgtcataccatggaaaaggttgttcgctcagcagctacaagtggagctggtagcactacctctggtgttgtgtctggcagcctcggctctcgggagatcaactacatccttcgtgtccttgggccagccgcatgccgcaatccagacatattcacagaagtggccaactgctgtatccgcatcgcccttcctgcccctcgaggctcaggaactgcttcagatgatgaatttgagaatcttagaattaaaggccctaatgctgtacagctggtgaagaccacccctttgaagccctcacctctgcctgtcatccctgatactatcaaggaagtgatctatgatatgctgaatgctctggctgcataccatgctccagaggaagcagataaatctgatcctaaacctggggttatgacccaagaggttggccagctcctgcaagacatgggtgatgatgtataccagcagtaccggtcacttacgcgtcagagcagtgactttgatacgcagtcaggtttttccattaatagtcaggtctttgctgcagatggtgcctccactgagacttccgcatctgggacctcccaaggagaggcttcaactccagaggagtctcgagatgggaagaaagataaagaaggggaccgggcctctgaggaaggcaaacagaaaggcaagggcagcaaacctttaatgcctacctccactatccttcgtcttctggcagagttggtgaggtcctatgttggtattgctaccctgattgccaactacagctacactgtgggccagtctgaactgatcaaagaggactgcagtgtgctagcttttgttctggaccacctgctcccacatacccagaatgcagaagacaaggacacccctgccttggcccgcctgttcctcgcaagcctggctgctgcagggagtggcacagatgcccaggtggccctagtgaatgaagtaaaagcagcccttggacgggcactggctatggctgagagtacagagaaacatgccaggcttcaggcagtgatgtgtatcatcagtactatcatggagtcctgcccctccacctccagcttctacagcagtgccacagcgaagacccagcacaatggcatgaacaacatcattcggcttttcctgaagaagggactggttaatgacctggccagagtacctcacagcttagacctgtccagtcccaacatggccaacacagtcaatgctgctctgaagcctttggaaacactttcccggattgtgaaccagcccagtagcctttttggcagcaagagtgcttctagcaagaacaagtctgagcaggatgcccaaggagcctctcaagattccagtagcaaccagcaggacccaggcgagcctggggaagcagaagtgcaggaggaggatcatgatgtcactcagacagaggtggcagatggggatatcatggatggggaggctgaaaccgactcagtggtgattgctgggcagcctgaggtgctcagttcacaagagatgcaggttgagaatgagctggaggacctgatagatgagttgcttgagagggatggcggatctgggaacagtacaattatagtgagcagaagtggagaggatgaatcacaagaggacgtgctgatggatgaagctccttccaacctcagccaagcttccaccttgcaggccaaccgagaagattccatgaatatcctggaccctgaggatgaggaggagcacactcaggaagaggacagcagtggcagtaacgaggatgaggatgatagtcaggatgaagaggaggaggaggaggaagatgaggaagatgatcaggaggatgatgaaggtgaagagggagatgaagacgatgacgacgatggctctgagatggaattggatgaggattatcctgatatgaacgcttctcccttggtccgatttgagcgctttgaccgggaggatgatctcatcattgagtttgacaacatgttctccagtgctacagacatccccccatccccaggaaatatccctaccacccatccactgatggtgcgccatgcagaccacagttctctgacactgggcagtggctcttcaacaactcgtctcacccagggcatcgggcgcagtcagaggaccctaaggcagctgacggccaatactggccacaccattcatgttcactaccctgggaatcgccagcccaaccctcctcttatactgcagaggttgcttggtccctcagctgctgctgacatccttcagctgagcagcagccttcccctacaaagccggggtcgggcccgcctcctggtaggcaacgatgacgtccacatcatcgcccgttctgatgatgagctgctggatgactttttccatgatcagagcacagctaccagccaagcaggaaccctgtccagcatccccacagccctgacccgctggacagaagaatgcaaagttctcgatgctgagagcatgcatgactgtgtttcagtggttaaagtgtccattgtcaatcacctggaattcctgagggatgaggagctggaagaaaggcgagagaagcgcaggaaacaactggctgaggaagaaacaaagataactgataaaggcaaagaagataaggagaacagggatcagagtgcacagtgtactgcatctaagtcaaatgactccactgaacagaatctctcagatgggacgcctatgcctgacagctacccaacaaccccatcttcaactgatgcagctacatctgagtccaaggagacccttggcactctgcaatcctcacaacagcaaccaacactcccaaccccaccagctttgggagaggttcctcaggagctgcagtctccagctggagaagggggcagctctacacagctattgatgcctgtagagccagaggaattgggtcccacaaggccaagtggggaagcagaaacaactcagatggagttatccccagctcccactataacctcactttccccagagagagctgaggattctgatgcactgacggctgtcagcagtcagctagaaggctctcctatggatacaagcagcctggcttcctgtaccttagaggaggctgtgggtgacacttcagcagctggcagttctgagcagcccagagcaggcagctccactcctggggatgccccaccagctgtggcggaagtgcaaggcaggagtgatgggtcaggggaatctgcccagccacctgaggacagctccccacctgcatcctctgagagctcttccaccagagattctgccgtggccatttctggagcagattcccgaggaatcctagaagagccgttgccttcaacaagcagtgaagaagaagatccccttgcgggtatcagtctccctgaaggtgtggacccctcttttctggctgccctgcctgatgacatccgtcgggaagttctacagaaccagctaggcattcgtccaccaacccggactgccccctccacaaatagctcagcgcctgcagtggtggggaatcctggtgtgactgaagtgagccctgagtttctggctgccctgcctccagccattcaggaggaagtactggcacagcagagagctgagcagcagcgacgagaactagcacagaatgccagctcagacacccctatggaccctgtgaccttcatccagactctgccctcagacctgcgccgtagtgtcctagaggatatggaggacagtgtgttagctgtgatgccacctgacattgcagctgaggctcaagccctgagacgagagcaagaagcccggcagcgacagctcatgcatgagcgtctgtttgggcacagtagcacctccgcactctctgctattctccgaagcccggctttcaccagtcgcttaagtggcaaccgtggggtccagtatactcgccttgctgtgcagagaggtggcaccttccagatggggggtagcagcagccataacaggccttctggcagtaatgtagatactctcctccgcctccgaggacggctccttctggaccacgaagccctttcttgtctcttggtcctactttttgtggatgagccaaagctcaatactagccgtctacaccgagtactgagaaatctctgctaccatgcccagacccgccactgggtcatccgcagtctgctctccatcttgcagcgcagcagtgagagtgagctatgcattgaaacacccaaactcactacaagtgaggaaaagggcaaaaagtcgagcaagagctgtgggtcaagtagccatgagaaccgtcccctggacctgctacacaagatggagtcaaagagctccaaccagctttcctggctctcagtatccatggatgcagccctaggctgcaggactaatatatttcagatccagcgttcaggggggcgtaaacataccgagaagcatgcaagcggtggctccaccgtccacatccatccccaagctgctcctgttgtctgcagacacgttttggatacactcattcaattggccaaggtatttcccagccacttcacacagcagcggaccaaagaaacaaactgtgagagtgatcgggaaaggggcaataaggcctgtagcccatgctcctcacagtcctccagcagtggcatttgcacagacttctgggacttattggtaaaactggacaacatgaatgtcagccggaaaggcaagaactccgtgaagtcagtgccagtgagcgctggcggtgagggggaaacctctccatacagcctcgaggcctctccactggggcagctcatgaacatgttgtcacacccagtcatccgccggagctctctcttaactgagaaactcctcagactcctttctctcatctcaattgctctcccagaaaacaaggtgtcagaagcacaggctaattctggcagcggtgcttcctccaccaccactgccacctcaaccacatctaccaccaccaccactgccgcctccaccacgcccacaccccctactgcacccacccctgtcacttctgctccagccctggttgctgccacggctatttccaccattgtcgtagctgcttcgaccacagtgactacccccacgactgctaccactactgtttcaatttctcccactactaagggcagcaaatctccagcgaaggtgagtgatgggggcagcagcagtacagactttaagatggtgtcctctggcctcactgaaaaccagctacagctctctgtagaggtgttgacatcccactcttgttctgaggaaggcttagaggatgcagccaacgtactactgcagctctcccggggggactctgggacccgggacactgttctcaagctgctactgaatggagcccgccatctgggttataccctttgtaaacaaataggtaccctgctggccgagctgcgggaatacaacctcgagcagcagcggcgagcccaatgtgaaaccctctctcctgatggcctgcctgaggagcagccacagaccaccaagctgaagggcaaaatgcagagcaggtttgacatggctgagaatgtggtaattgtggcatctcagaagcgacctttgggtggccgggagctccagctgccttctatgtccatgttgacatccaagacatctacccagaagttcttcttgagggtactacaggtcatcatccagctccgggacgacacgcgccgggctaacaagaaagccaagcagacaggcaggctaggttcctccggtttaggctcagctagcagcatccaggcagctgttcggcagctggaggctgaggctgatgccattatacaaatggtacgtgagggtcaaagggcgcggagacagcaacaagcagcaacgtcggagtctagccagtcagaggcgtctgtccggagggaggaatcacccatggatgtggaccagccatctcccagtgctcaagatactcaatccattgcctccgatggaaccccacagggggagaaggaaaaggaagaaagaccacctgagttacccctgctcagcgagcagctgagtttggacgagctgtgggacatgcttggggagtgtctaaaggaactagaggaatcccatgaccagcatgcggtgctagtgctacagcctgctgtcgaggccttctttctggtccatgccacagagcgggagagcaagcctcctgtccgagacacccgtgagagccagctggcacacatcaaggacgagcctcctccactctcccctgcccccttaaccccagccacgccttcctcccttgacccattcttctcccgggagccctcatctatgcacatctcctcaagcctgccccctgacacacagaagttccttcgctttgcagagactcaccgcactgtgttaaaccagatcctacggcagtccacgacccaccttgctgatgggccttttgctgtcctggtagactacattcgtgtcctcgactttgatgtcaagcgcaaatatttccgccaagagctggagcgtttagatgaggggctccggaaagaagacatggctgtgcatgtccgtcgtgaccatgtgtttgaagactcctatcgtgagctgcatcgcaaatcccccgaagaaatgaagaatcgattgtatatagtatttgaaggagaagaagggcaggatgctggcgggctcctgcgggagtggtatatgatcatctctcgagagatgtttaaccctatgtatgccttgttccgtacctcacctggtgatcgagtcacctacaccatcaatccatcttcccactgcaaccccaaccacctcagctacttcaagtttgtcggacgcattgtggccaaagctgtatatgacaaccgtcttctggagtgctactttactcgatccttttacaaacacatcttgggcaagtcagtcagatatacagatatggagagtgaagattaccacttctaccaaggtctggtttatctgctggaaaatgatgtctccacactaggctatgacctcaccttcagcactgaggtccaagagtttggagtttgtgaagttcgtgacctcaaacccaatggggccaacatcttggtaacagaggagaataagaaggagtatgtacacctggtatgccagatgagaatgacaggagccatccgcaagcagttggcggctttcttagaaggcttctatgagatcattccaaagcgcctcatttccatcttcactgagcaggagttagagctgcttatatcaggactgcccaccattgacatcgatgatctgaaatccaacactgaataccacaagtaccagtccaactctattcagatccagtggttctggagagcattgcgttctttcgatcaagctgaccgtgccaagttcctccagtttgtcacgggtacttccaaggtacccctgcaaggctttgctgccctcgaaggcatgaatggcattcagaagtttcagatccatcgagatgacaggtccacagatcgcctgccttcagctcacacatgttttaatcagctggatctgcctgcctatgagagctttgagaagctccgccacatgctactgttggctatccaggagtgctctgaaggctttgggctggcctaataaggccctgcccaactccgtggggttttttttaccattgttggacctggggaggggggagttaaaaaaagaaccagaaagaaattgtcaaaaaccaataaatgaaatccaccaactcaccgtgtgtgtcccagctgccccatcttccccagcgcatacctgttcctcttctcattctctccccgccgcctgtttcctcaccttctctcccctttccatgccgtccatgatccccaccccatgtgttttaaaaaggcagtagcctttgcagggacctgtctgtcccaactgtttgaacagtgtgctcctcagattctgtgttcagaaggatttgctgcattgagacttgaaacctttggataggggaaaaaattatatatatatatattcttaaacaaaaaaacaaacaaaacaaaaaaaaaaaacaacaacaacacaaacaacaaaaacaacaaaaaaaaacaacaaaaaatagaaagacagaaaaaccagaactcacgaaacaaaaaacacaacacacaaagaagaggggcggcgcggcgcagagaagataagtacccacctgagggagccacccccatagcgcgctcacacgcaagacggtgtgtcgacaacagagaggggcgcaacacaaagaggggaacacaaatacaaaggacagcagccggacagcggc

SEQ ID NO: 466978 - DNA, 11632 bp, Homo sapiens
ctgcatccaacctggggagtgctgtcgatgagctcatgagacatcagcccacccttaaaacagatgcaacgactgccatcatcaagttacttgaagaaatctgtaatcttggaagggaccccaaatacatctgtcagaagccatcaatccagaaggcagatggcactgccactgctcctcccccaaggtctaatcatgccgcagaagaagcctctagtgaggatgaggaggaagaggaagtacaggccatgcagagctttaattctacccagcaaaatgaaactgagcctaatcagcaggttgttggtacagaggaacgtattcctattcccctcatggattacatccttaatgtgatgaaatttgtggaatctattctgagcaacaatacaacagatgaccactgccaggaatttgtgaatcagaaaggactgttgcctttggttaccattttgggtcttcccaatctgcccattgactttcccacatctgctgcctgtcaggctgttgcaggtgtctgcaaatccatattgacactgtcacatgaacccaaagtccttcaagagggtctccttcagttggactccatcctctcctccctggagcccttacaccgccccattgaatcccctgggggctcagtgttgttgcgagaactggcttgcgcaggcaatgttgctgatgctaccctctcagcccaggccacacctctgctgcatgcactcactgctgcccatgcctacatcatgatgtttgttcatacttgcagagttggacagagtgaaattcgttccatctccgtaaaccagtggggctctcaattgggtctgagtgttttgagcaagctgagccagttatactgttccctggtgtgggaaagcactgtcctcctctctctgtgtaccccaaacagcctaccatctgggtgtgaatttggccaggcagatatgcagaaactggttccaaaggatgagaaggcaggtacgacccagggcggaaaaagatcagatggggaacaggatggagcagctggaagtatggatgcttctacccagggcttattagaaggcattgggctagatggtgacacattggctcccatggagacagatgaacctactgcttcagactctaagggcaaatctaaaatcacaccagcaatggctgccagaattaagcaaatcaagcctttgttatcagcttcctccagattaggccgagcacttgctgagctatttggacttcttgttaaactttgtgtgggatctcctgtccgccagagaaggagccatcatgctgccagcaccactacagcaccgacacctgccgcgcgatcaacagcctcagctctcactaagctcttgactaaggggttatcttggcagcccccaccatatacacctactccccgattcaggctgacattcttcatctgttcagttggtttcacatccccaatgctgtttgatgagaggaagtatccctaccacctcatgctgcaaaaatttctctgctccggaggccacaatgctctttttgaaactttcaactgggctctgtccatgggaggtaaagttcctgtttctgagggattggaacactcagacttgcctgatggcacaggagaattcctagatgcctggcttatgctggtggagaagatggtgaatcccaccacggtgcttgaatctccacattcgctgcctgccaaattgcctggaggtgtccagaactttccccagttcagtgcactgcgcttccttgtggtaactcagaaagcagcctttacttgcatcaaaaacttatggaaccggaaacccctgaaggtatatggtggacgaatggctgaatcgatgctggccattctatgccacatcctccgaggagaacctgtgattcgagagagactaagcaaggagaaggaggggtctcgaggagaagaggatacagggcaagaggaaggtggctcccgccgggaacctcaagtcaaccagcaacaactgcaacagctcatggacatgggcttcacaagggaacatgcaatggaggcactgttgaacaccagcaccatggagcaggccacagagtaccttttaacccaccctcctccaatcatgggaggagttgttcgggatctcagcatgtctgaagaggaccagatgatgagagcaattgctatgtctctgggacaggatattccaatggatcaaagggcagagtcacctgaggaagttgcttgccggaaggaggaagaggaacggaaagctcgggaaaagcaggaggaggaagaggctaaatgtctagagaagttccaggatgctgacccgttggaacaagatgagctccacactttcacagatactatgttgccaggctgcttccaccttcttgatgagctgccagacacagtataccgtgtgtgtgacctgatcatgacagcaatcaaacgtaatggagcagattatcgtgacatgattctgaagcaagtagtcaatcaggtgtgggaagctgctgatgtattgatcaaagctgctcttcccctgacaacaagtgacacaaaaaccgtgtcagagtggataagtcagatggccacactgccccaggcctccaatttggctactagaatcttgcttttaacgctactttttgaggagttgaagctaccttgtgcttgggtggttgaatcaagtggcatccttaatgtcctaatcaaactcttggaagtggttcagccctgcctccaggcagccaaggagcagaaggaagtccagaccccaaagtggatcacaccagtgttgctcctgattgatttctatgaaaagacagccatctcctcaaaaaggagagcccagatgactaagtacctgcaatccaacagcaacaactggcgctggtttgatgatcgctctgggcgttggtgtagttacagtgcaagcaacaatagcactattgattctgcctggaaatctggagagacaagcgtgcgattcactgcaggccgaagaagatacacggtccaattcactacaatggtgcaggttaatgaggaaacagggaaccgacgccctgtgatgctgactctcctcagggtacctcggctgaataaaaattcaaaaaacagcaatggacaggaactagagaagacgctggaagaaagcaaagaaatggatatcaaacgtaaagaaaataaaggcaatgatacccctttggccctagagagtacaaacactgaaaaggagacaagcctggaggaaacaaaaatcggggagatcctgatccagggcttgacagaagatatggtgactgttttaatccgggcctgcgtgagcatgctgggagtccctgtggacccagatactttgcatgccacccttcgtctctgtctgaggctcacccgggaccacaaatatgccatgatgtttgcagaactgaagagtacccgcatgatcttgaatttgacccagagctcaggcttcaatgggtttactcccctggtcacccttctcttaagacacatcattgaggacccctgtacccttcgtcataccatggaaaaggttgttcgctcagcagctacaagtggagctggtagcactacctctggtgttgtgtctggcagcctcggctctcgggagatcaactacatccttcgtgtccttgggccagccgcatgccgcaatccagacatattcacagaagtggccaactgctgtatccgcatcgcccttcctgcccctcgaggctcaggaactgcttcagatgatgaatttgagaatcttagaattaaaggccctaatgctgtacagctggtgaagaccacccctttgaagccctcacctctgcctgtcatccctgatactatcaaggaagtgatctatgatatgctgaatgctctggctgcataccatgctccagaggaagcagataaatctgatcctaaacctggggttatgacccaagaggttggccagctcctgcaagacatgggtgatgatgtataccagcagtaccggtcacttacgcgtcagagcagtgactttgatacgcagtcaggtttttccattaatagtcaggtctttgctgcagatggtgcctccactgagacttccgcatctgggacctcccaaggagaggcttcaactccagaggagtctcgagatgggaagaaagataaagaaggggaccgggcctctgaggaaggcaaacagaaaggcaagggcagcaaacctttaatgcctacctccactatccttcgtcttctggcagagttggtgaggtcctatgttggtattgctaccctgattgccaactacagctacactgtgggccagtctgaactgatcaaagaggactgcagtgtgctagcttttgttctggaccacctgctcccacatacccagaatgcagaagacaaggacacccctgccttggcccgcctgttcctcgcaagcctggctgctgcagggagtggcacagatgcccaggtggccctagtgaatgaagtaaaagcagcccttggacgggcactggctatggctgagagtacagagaaacatgccaggcttcaggcagtgatgtgtatcatcagtactatcatggagtcctgcccctccacctccagcttctacagcagtgccacagcgaagacccagcacaatggcatgaacaacatcattcggcttttcctgaagaagggactggttaatgacctggccagagtacctcacagcttagacctgtccagtcccaacatggccaacacagtcaatgctgctctgaagcctttggaaacactttcccggattgtgaaccagcccagtagcctttttggcagcaagagtgcttctagcaagaacaagtctgagcaggatgcccaaggagcctctcaagattccagtagcaaccagcaggacccaggcgagcctggggaagcagaagtgcaggaggaggatcatgatgtcactcagacagaggtggcagatggggatatcatggatggggaggctgaaaccgactcagtggtgattgctgggcagcctgaggtgctcagttcacaagagatgcaggttgagaatgagctggaggacctgatagatgagttgcttgagagggatggcggatctgggaacagtacaattatagtgagcagaagtggagaggatgaatcacaagaggacgtgctgatggatgaagctccttccaacctcagccaagcttccaccttgcaggccaaccgagaagattccatgaatatcctggaccctgaggatgaggaggagcacactcaggaagaggacagcagtggcagtaacgaggatgaggatgatagtcaggatgaagaggaggaggaggaggaagatgaggaagatgatcaggaggatgatgaaggtgaagagggagatgaagacgatgacgacgatggctctgagatggaattggatgaggattatcctgatatgaacgcttctcccttggtccgatttgagcgctttgaccgggaggatgatctcatcattgagtttgacaacatgttctccagtgctacagacatccccccatccccaggaaatatccctaccacccatccactgatggtgcgccatgcagaccacagttctctgacactgggcagtggctcttcaacaactcgtctcacccagggcatcgggcgcagtcagaggaccctaaggcagctgacggccaatactggccacaccattcatgttcactaccctgggaatcgccagcccaaccctcctcttatactgcagaggttgcttggtccctcagctgctgctgacatccttcagctgagcagcagccttcccctacaaagccggggtcgggcccgcctcctggtaggcaacgatgacgtccacatcatcgcccgttctgatgatgagctgctggatgactttttccatgatcagagcacagctaccagccaagcaggaaccctgtccagcatccccacagccctgacccgctggacagaagaatgcaaagttctcgatgctgagagcatgcatgactgtgtttcagtggttaaagtgtccattgtcaatcacctggaattcctgagggatgaggagctggaagaaaggcgagagaagcgcaggaaacaactggctgaggaagaaacaaagataactgataaaggcaaagaagataaggagaacagggatcagagtgcacagtgtactgcatctaagtcaaatgactccactgaacagaatctctcagatgggacgcctatgcctgacagctacccaacaaccccatcttcaactgatgcagctacatctgagtccaaggagacccttggcactctgcaatcctcacaacagcaaccaacactcccaaccccaccagctttgggagaggttcctcaggagctgcagtctccagctggagaagggggcagctctacacagctattgatgcctgtagagccagaggaattgggtcccacaaggccaagtggggaagcagaaacaactcagatggagttatccccagctcccactataacctcactttccccagagagagctgaggattctgatgcactgacggctgtcagcagtcagctagaaggctctcctatggatacaagcagcctggcttcctgtaccttagaggaggctgtgggtgacacttcagcagctggcagttctgagcagcccagagcaggcagctccactcctggggatgccccaccagctgtggcggaagtgcaaggcaggagtgatgggtcaggggaatctgcccagccacctgaggacagctccccacctgcatcctctgagagctcttccaccagagattctgccgtggccatttctggagcagattcccgaggaatcctagaagagccgttgccttcaacaagcagtgaagaagaagatccccttgcgggtatcagtctccctgaaggtgtggacccctcttttctggctgccctgcctgatgacatccgtcgggaagttctacagaaccagctaggcattcgtccaccaacccggactgccccctccacaaatagctcagcgcctgcagtggtggggaatcctggtgtgactgaagtgagccctgagtttctggctgccctgcctccagccattcaggaggaagtactggcacagcagagagctgagcagcagcgacgagaactagcacagaatgccagctcagacacccctatggaccctgtgaccttcatccagactctgccctcagacctgcgccgtagtgtcctagaggatatggaggacagtgtgttagctgtgatgccacctgacattgcagctgaggctcaagccctgagacgagagcaagaagcccggcagcgacagctcatgcatgagcgtctgtttgggcacagtagcacctccgcactctctgctattctccgaagcccggctttcaccagtcgcttaagtggcaaccgtggggtccagtatactcgccttgctgtgcagagaggtggcaccttccagatggggggtagcagcagccataacaggccttctggcagtaatgtagatactctcctccgcctccgaggacggctccttctggaccacgaagccctttcttgtctcttggtcctactttttgtggatgagccaaagctcaatactagccgtctacaccgagtactgagaaatctctgctaccatgcccagacccgccactgggtcatccgcagtctgctctccatcttgcagcgcagcagtgagagtgagctatgcattgaaacacccaaactcactacaagtgaggaaaagggcaaaaagtcgagcaagagctgtgggtcaagtagccatgagaaccgtcccctggacctgctacacaagatggagtcaaagagctccaaccagctttcctggctctcagtatccatggatgcagccctaggctgcaggactaatatatttcagatccagcgttcaggggggcgtaaacataccgagaagcatgcaagcggtggctccaccgtccacatccatccccaagctgctcctgttgtctgcagacacgttttggatacactcattcaattggccaaggtatttcccagccacttcacacagcagcggaccaaagaaacaaactgtgagagtgatcgggaaaggggcaataaggcctgtagcccatgctcctcacagtcctccagcagtggcatttgcacagacttctgggacttattggtaaaactggacaacatgaatgtcagccggaaaggcaagaactccgtgaagtcagtgccagtgagcgctggcggtgagggggaaacctctccatacagcctcgaggcctctccactggggcagctcatgaacatgttgtcacacccagtcatccgccggagctctctcttaactgagaaactcctcagactcctttctctcatctcaattgctctcccagaaaacaaggtgtcagaagcacaggctaattctggcagcggtgcttcctccaccaccactgccacctcaaccacatctaccaccaccaccactgccgcctccaccacgcccacaccccctactgcacccacccctgtcacttctgctccagccctggttgctgccacggctatttccaccattgtcgtagctgcttcgaccacagtgactacccccacgactgctaccactactgtttcaatttctcccactactaagggcagcaaatctccagcgaaggtgagtgatgggggcagcagcagtacagactttaagatggtgtcctctggcctcactgaaaaccagctacagctctctgtagaggtgttgacatcccactcttgttctgaggaaggcttagaggatgcagccaacgtactactgcagctctcccggggggactctgggacccgggacactgttctcaagctgctactgaatggagcccgccatctgggttataccctttgtaaacaaataggtaccctgctggccgagctgcgggaatacaacctcgagcagcagcggcgagcccaatgtgaaaccctctctcctgatggcctgcctgaggagcagccacagaccaccaagctgaagggcaaaatgcagagcaggtttgacatggctgagaatgtggtaattgtggcatctcagaagcgacctttgggtggccgggagctccagctgccttctatgtccatgttgacatccaagacatctacccagaagttcttcttgagggtactacaggtcatcatccagctccgggacgacacgcgccgggctaacaagaaagccaagcagacaggcaggctaggttcctccggtttaggctcagctagcagcatccaggcagctgttcggcagctggaggctgaggctgatgccattatacaaatgtcggagtctagccagtcagaggcgtctgtccggagggaggaatcacccatggatgtggaccagccatctcccagtgctcaagatactcaatccattgcctccgatggaaccccacagggggagaaggaaaaggaagaaagaccacctgagttacccctgctcagcgagcagctgagtttggacgagctgtgggacatgcttggggagtgtctaaaggaactagaggaatcccatgaccagcatgcggtgctagtgctacagcctgctgtcgaggccttctttctggtccatgccacagagcgggagagcaagcctcctgtccgagacacccgtgagagccagctggcacacatcaaggacgagcctcctccactctcccctgcccccttaaccccagccacgccttcctcccttgacccattcttctcccgggagccctcatctatgcacatctcctcaagcctgccccctgacacacagaagttccttcgctttgcagagactcaccgcactgtgttaaaccagatcctacggcagtccacgacccaccttgctgatgggccttttgctgtcctggtagactacattcgtgtcctcgactttgatgtcaagcgcaaatatttccgccaagagctggagcgtttagatgaggggctccggaaagaagacatggctgtgcatgtccgtcgtgaccatgtgtttgaagactcctatcgtgagctgcatcgcaaatcccccgaagaaatgaagaatcgattgtatatagtatttgaaggagaagaagggcaggatgctggcgggctcctgcgggagtggtatatgatcatctctcgagagatgtttaaccctatgtatgccttgttccgtacctcacctggtgatcgagtcacctacaccatcaatccatcttcccactgcaaccccaaccacctcagctacttcaagtttgtcggacgcattgtggccaaagctgtatatgacaaccgtcttctggagtgctactttactcgatccttttacaaacacatcttgggcaagtcagtcagatatacagatatggagagtgaagattaccacttctaccaaggtctggtttatctgctggaaaatgatgtctccacactaggctatgacctcaccttcagcactgaggtccaagagtttggagtttgtgaagttcgtgacctcaaacccaatggggccaacatcttggtaacagaggagaataagaaggagtatgtacacctggtatgccagatgagaatgacaggagccatccgcaagcagttggcggctttcttagaaggcttctatgagatcattccaaagcgcctcatttccatcttcactgagcaggagttagagctgcttatatcaggactgcccaccattgacatcgatgatctgaaatccaacactgaataccacaagtaccagtccaactctattcagatccagtggttctggagagcattgcgttctttcgatcaagctgaccgtgccaagttcctccagtttgtcacgggtacttccaaggtacccctgcaaggctttgctgccctcgaaggcatgaatggcattcagaagtttcagatccatcgagatgacaggtccacagatcgcctgccttcagctcacacatgttttaatcagctggatctgcctgcctatgagagctttgagaagctccgccacatgctactgttggctatccaggagtgctctgaaggctttgggctggcctaataaggccctgcccaactccgtggggttttttttaccattgttggacctggggaggggggagttaaaaaaagaaccagaaagaaattgtcaaaaaccaataaatgaaatccaccaactcaccgtgtgtgtcccagctgccccatcttccccagcgcatacctgttcctcttctcattctctccccgccgcctgtttcctcaccttctctcccctttccatgccgtccatgatccccaccccatgtgttttaaaaaggcagtagcctttgcagggacctgtctgtcccaactgtttgaacagtgtgctcctcagattctgtgttcagaaggatttgctgcattgagacttgaaacctttggataggggaaaaaattatatatatatatatttttttgttctgtttgcatttcttaatttgtgcttggaatgtgttgatgtgcacagctaatgattcaatgcgagacaagattggcgtctgtgttgtggaggtttcaaataaagagcactcttcataa

SEQ ID NO: 466979 - DNA, 12565 bp, Homo sapiens
ctgcatccaacctggggagtgctgtcgatgagctcatgagacatcagcccacccttaaaacagatgcaacgactgccatcatcaagttacttgaagaaatctgtaatcttggaagggaccccaaatacatctgtcagaagccatcaatccagaaggcagatggcactgccactgctcctcccccaaggtctaatcatgccgcagaagaagcctctagtgaggatgaggaggaagaggaagtacaggccatgcagagctttaattctacccagcaaaatgaaactgagcctaatcagcaggttgttggtacagaggaacgtattcctattcccctcatggattacatccttaatgtgatgaaatttgtggaatctattctgagcaacaatacaacagatgaccactgccaggaatttgtgaatcagaaaggactgttgcctttggttaccattttgggtcttcccaatctgcccattgactttcccacatctgctgcctgtcaggctgttgcaggtgtctgcaaatccatattgacactgtcacatgaacccaaagtccttcaagagggtctccttcagttggactccatcctctcctccctggagcccttacaccgccccattgaatcccctgggggctcagtgttgttgcgagaactggcttgcgcaggcaatgttgctgatgctaccctctcagcccaggccacacctctgctgcatgcactcactgctgcccatgcctacatcatgatgtttgttcatacttgcagagttggacagagtgaaattcgttccatctccgtaaaccagtggggctctcaattgggtctgagtgttttgagcaagctgagccagttatactgttccctggtgtgggaaagcactgtcctcctctctctgtgtaccccaaacagcctaccatctgggtgtgaatttggccaggcagatatgcagaaactggttccaaaggatgagaaggcaggtacgacccagggcggaaaaagatcagatggggaacaggatggagcagctggaagtatggatgcttctacccagggcttattagaaggcattgggctagatggtgacacattggctcccatggagacagatgaacctactgcttcagactctaagggcaaatctaaaatcacaccagcaatggctgccagaattaagcaaatcaagcctttgttatcagcttcctccagattaggccgagcacttgctgagctatttggacttcttgttaaactttgtgtgggatctcctgtccgccagagaaggagccatcatgctgccagcaccactacagcaccgacacctgccgcgcgatcaacagcctcagctctcactaagctcttgactaaggggttatcttggcagcccccaccatatacacctactccccgattcaggctgacattcttcatctgttcagttggtttcacatccccaatgctgtttgatgagaggaagtatccctaccacctcatgctgcaaaaatttctctgctccggaggccacaatgctctttttgaaactttcaactgggctctgtccatgggaggtaaagttcctgtttctgagggattggaacactcagacttgcctgatggcacaggagaattcctagatgcctggcttatgctggtggagaagatggtgaatcccaccacggtgcttgaatctccacattcgctgcctgccaaattgcctggaggtgtccagaactttccccagttcagtgcactgcgcttccttgtggtaactcagaaagcagcctttacttgcatcaaaaacttatggaaccggaaacccctgaaggtatatggtggacgaatggctgaatcgatgctggccattctatgccacatcctccgaggagaacctgtgattcgagagagactaagcaaggagaaggaggggtctcgaggagaagaggatacagggcaagaggaaggtggctcccgccgggaacctcaagtcaaccagcaacaactgcaacagctcatggacatgggcttcacaagggaacatgcaatggaggcactgttgaacaccagcaccatggagcaggccacagagtaccttttaacccaccctcctccaatcatgggaggagttgttcgggatctcagcatgtctgaagaggaccagatgatgagagcaattgctatgtctctgggacaggatattccaatggatcaaagggcagagtcacctgaggaagttgcttgccggaaggaggaagaggaacggaaagctcgggaaaagcaggaggaggaagaggctaaatgtctagagaagttccaggatgctgacccgttggaacaagatgagctccacactttcacagatactatgttgccaggctgcttccaccttcttgatgagctgccagacacagtataccgtgtgtgtgacctgatcatgacagcaatcaaacgtaatggagcagattatcgtgacatgattctgaagcaagtagtcaatcaggtgtgggaagctgctgatgtattgatcaaagctgctcttcccctgacaacaagtgacacaaaaaccgtgtcagagtggataagtcagatggccacactgccccaggcctccaatttggctactagaatcttgcttttaacgctactttttgaggagttgaagctaccttgtgcttgggtggttgaatcaagtggcatccttaatgtcctaatcaaactcttggaagtggttcagccctgcctccaggcagccaaggagcagaaggaagtccagaccccaaagtggatcacaccagtgttgctcctgattgatttctatgaaaagacagccatctcctcaaaaaggagagcccagatgactaagtacctgcaatccaacagcaacaactggcgctggtttgatgatcgctctgggcgttggtgtagttacagtgcaagcaacaatagcactattgattctgcctggaaatctggagagacaagcgtgcgattcactgcaggccgaagaagatacacggtccaattcactacaatggtgcaggttaatgaggaaacagggaaccgacgccctgtgatgctgactctcctcagggtacctcggctgaataaaaattcaaaaaacagcaatggacaggaactagagaagacgctggaagaaagcaaagaaatggatatcaaacgtaaagaaaataaaggcaatgatacccctttggccctagagagtacaaacactgaaaaggagacaagcctggaggaaacaaaaatcggggagatcctgatccagggcttgacagaagatatggtgactgttttaatccgggcctgcgtgagcatgctgggagtccctgtggacccagatactttgcatgccacccttcgtctctgtctgaggctcacccgggaccacaaatatgccatgatgtttgcagaactgaagagtacccgcatgatcttgaatttgacccagagctcaggcttcaatgggtttactcccctggtcacccttctcttaagacacatcattgaggacccctgtacccttcgtcataccatggaaaaggttgttcgctcagcagctacaagtggagctggtagcactacctctggtgttgtgtctggcagcctcggctctcgggagatcaactacatccttcgtgtccttgggccagccgcatgccgcaatccagacatattcacagaagtggccaactgctgtatccgcatcgcccttcctgcccctcgaggctcaggaactgcttcagatgatgaatttgagaatcttagaattaaaggccctaatgctgtacagctggtgaagaccacccctttgaagccctcacctctgcctgtcatccctgatactatcaaggaagtgatctatgatatgctgaatgctctggctgcataccatgctccagaggaagcagataaatctgatcctaaacctggggttatgacccaagaggttggccagctcctgcaagacatgggtgatgatgtataccagcagtaccggtcacttacgcgtcagagcagtgactttgatacgcagtcaggtttttccattaatagtcaggtctttgctgcagatggtgcctccactgagacttccgcatctgggacctcccaaggagaggcttcaactccagaggagtctcgagatgggaagaaagataaagaaggggaccgggcctctgaggaaggcaaacagaaaggcaagggcagcaaacctttaatgcctacctccactatccttcgtcttctggcagagttggtgaggtcctatgttggtattgctaccctgattgccaactacagctacactgtgggccagtctgaactgatcaaagaggactgcagtgtgctagcttttgttctggaccacctgctcccacatacccagaatgcagaagacaaggacacccctgccttggcccgcctgttcctcgcaagcctggctgctgcagggagtggcacagatgcccaggtggccctagtgaatgaagtaaaagcagcccttggacgggcactggctatggctgagagtacagagaaacatgccaggcttcaggcagtgatgtgtatcatcagtactatcatggagtcctgcccctccacctccagcttctacagcagtgccacagcgaagacccagcacaatggcatgaacaacatcattcggcttttcctgaagaagggactggttaatgacctggccagagtacctcacagcttagacctgtccagtcccaacatggccaacacagtcaatgctgctctgaagcctttggaaacactttcccggattgtgaaccagcccagtagcctttttggcagcaagagtgcttctagcaagaacaagtctgagcaggatgcccaaggagcctctcaagattccagtagcaaccagcaggacccaggcgagcctggggaagcagaagtgcaggaggaggatcatgatgtcactcagacagaggtggcagatggggatatcatggatggggaggctgaaaccgactcagtggtgattgctgggcagcctgaggtgctcagttcacaagagatgcaggttgagaatgagctggaggacctgatagatgagttgcttgagagggatggcggatctgggaacagtacaattatagtgagcagaagtggagaggatgaatcacaagaggacgtgctgatggatgaagctccttccaacctcagccaagcttccaccttgcaggccaaccgagaagattccatgaatatcctggaccctgaggatgaggaggagcacactcaggaagaggacagcagtggcagtaacgaggatgaggatgatagtcaggatgaagaggaggaggaggaggaagatgaggaagatgatcaggaggatgatgaaggtgaagagggagatgaagacgatgacgacgatggctctgagatggaattggatgaggattatcctgatatgaacgcttctcccttggtccgatttgagcgctttgaccgggaggatgatctcatcattgagtttgacaacatgttctccagtgctacagacatccccccatccccaggaaatatccctaccacccatccactgatggtgcgccatgcagaccacagttctctgacactgggcagtggctcttcaacaactcgtctcacccagggcatcgggcgcagtcagaggaccctaaggcagctgacggccaatactggccacaccattcatgttcactaccctgggaatcgccagcccaaccctcctcttatactgcagaggttgcttggtccctcagctgctgctgacatccttcagctgagcagcagccttcccctacaaagccggggtcgggcccgcctcctggtaggcaacgatgacgtccacatcatcgcccgttctgatgatgagctgctggatgactttttccatgatcagagcacagctaccagccaagcaggaaccctgtccagcatccccacagccctgacccgctggacagaagaatgcaaagttctcgatgctgagagcatgcatgactgtgtttcagtggttaaagtgtccattgtcaatcacctggaattcctgagggatgaggagctggaagaaaggcgagagaagcgcaggaaacaactggctgaggaagaaacaaagataactgataaaggcaaagaagataaggagaacagggatcagagtgcacagtgtactgcatctaagtcaaatgactccactgaacagaatctctcagatgggacgcctatgcctgacagctacccaacaaccccatcttcaactgatgcagctacatctgagtccaaggagacccttggcactctgcaatcctcacaacagcaaccaacactcccaaccccaccagctttgggagaggttcctcaggagctgcagtctccagctggagaagggggcagctctacacagctattgatgcctgtagagccagaggaattgggtcccacaaggccaagtggggaagcagaaacaactcagatggagttatccccagctcccactataacctcactttccccagagagagctgaggattctgatgcactgacggctgtcagcagtcagctagaaggctctcctatggatacaagcagcctggcttcctgtaccttagaggaggctgtgggtgacacttcagcagctggcagttctgagcagcccagagcaggcagctccactcctggggatgccccaccagctgtggcggaagtgcaaggcaggagtgatgggtcaggggaatctgcccagccacctgaggacagctccccacctgcatcctctgagagctcttccaccagagattctgccgtggccatttctggagcagattcccgaggaatcctagaagagccgttgccttcaacaagcagtgaagaagaagatccccttgcgggtatcagtctccctgaaggtgtggacccctcttttctggctgccctgcctgatgacatccgtcgggaagttctacagaaccagctaggcattcgtccaccaacccggactgccccctccacaaatagctcagcgcctgcagtggtggggaatcctggtgtgactgaagtgagccctgagtttctggctgccctgcctccagccattcaggaggaagtactggcacagcagagagctgagcagcagcgacgagaactagcacagaatgccagctcagacacccctatggaccctgtgaccttcatccagactctgccctcagacctgcgccgtagtgtcctagaggatatggaggacagtgtgttagctgtgatgccacctgacattgcagctgaggctcaagccctgagacgagagcaagaagcccggcagcgacagctcatgcatgagcgtctgtttgggcacagtagcacctccgcactctctgctattctccgaagcccggctttcaccagtcgcttaagtggcaaccgtggggtccagtatactcgccttgctgtgcagagaggtggcaccttccagatggggggtagcagcagccataacaggccttctggcagtaatgtagatactctcctccgcctccgaggacggctccttctggaccacgaagccctttcttgtctcttggtcctactttttgtggatgagccaaagctcaatactagccgtctacaccgagtactgagaaatctctgctaccatgcccagacccgccactgggtcatccgcagtctgctctccatcttgcagcgcagcagtgagagtgagctatgcattgaaacacccaaactcactacaagtgaggaaaagggcaaaaagtcgagcaagagctgtgggtcaagtagccatgagaaccgtcccctggacctgctacacaagatggagtcaaagagctccaaccagctttcctggctctcagtatccatggatgcagccctaggctgcaggactaatatatttcagatccagcgttcaggggggcgtaaacataccgagaagcatgcaagcggtggctccaccgtccacatccatccccaagctgctcctgttgtctgcagacacgttttggatacactcattcaattggccaaggtatttcccagccacttcacacagcagcggaccaaagaaacaaactgtgagagtgatcgggaaaggggcaataaggcctgtagcccatgctcctcacagtcctccagcagtggcatttgcacagacttctgggacttattggtaaaactggacaacatgaatgtcagccggaaaggcaagaactccgtgaagtcagtgccagtgagcgctggcggtgagggggaaacctctccatacagcctcgaggcctctccactggggcagctcatgaacatgttgtcacacccagtcatccgccggagctctctcttaactgagaaactcctcagactcctttctctcatctcaattgctctcccagaaaacaaggtgtcagaagcacaggctaattctggcagcggtgcttcctccaccaccactgccacctcaaccacatctaccaccaccaccactgccgcctccaccacgcccacaccccctactgcacccacccctgtcacttctgctccagccctggttgctgccacggctatttccaccattgtcgtagctgcttcgaccacagtgactacccccacgactgctaccactactgtttcaatttctcccactactaagggcagcaaatctccagcgaaggtgagtgatgggggcagcagcagtacagactttaagatggtgtcctctggcctcactgaaaaccagctacagctctctgtagaggtgttgacatcccactcttgttctgaggaaggcttagaggatgcagccaacgtactactgcagctctcccggggggactctgggacccgggacactgttctcaagctgctactgaatggagcccgccatctgggttataccctttgtaaacaaataggtaccctgctggccgagctgcgggaatacaacctcgagcagcagcggcgagcccaatgtgaaaccctctctcctgatggcctgcctgaggagcagccacagaccaccaagctgaagggcaaaatgcagagcaggtttgacatggctgagaatgtggtaattgtggcatctcagaagcgacctttgggtggccgggagctccagctgccttctatgtccatgttgacatccaagacatctacccagaagttcttcttgagggtactacaggtcatcatccagctccgggacgacacgcgccgggctaacaagaaagccaagcagacaggcaggctaggttcctccggtttaggctcagctagcagcatccaggcagctgttcggcagctggaggctgaggctgatgccattatacaaatggtacgtgagggtcaaagggcgcggagacagcaacaagcagcaacgtcggagtctagccagtcagaggcgtctgtccggagggaggaatcacccatggatgtggaccagccatctcccagtgctcaagatactcaatccattgcctccgatggaaccccacagggggagaaggaaaaggaagaaagaccacctgagttacccctgctcagcgagcagctgagtttggacgagctgtgggacatgcttggggagtgtctaaaggaactagaggaatcccatgaccagcatgcggtgctagtgctacagcctgctgtcgaggccttctttctggtccatgccacagagcgggagagcaagcctcctgtccgagacacccgtgagagccagctggcacacatcaaggacgagcctcctccactctcccctgcccccttaaccccagccacgccttcctcccttgacccattcttctcccgggagccctcatctatgcacatctcctcaagcctgccccctgacacacagaagttccttcgctttgcagagactcaccgcactgtgttaaaccagatcctacggcagtccacgacccaccttgctgatgggccttttgctgtcctggtagactacattcgtgtcctcgactttgatgtcaagcgcaaatatttccgccaagagctggagcgtttagatgaggggctccggaaagaagacatggctgtgcatgtccgtcgtgaccatgtgtttgaagactcctatcgtgagctgcatcgcaaatcccccgaagaaatgaagaatcgattgtaagggcccaggaacggagaaaagatggcgggtgggaggtggggcctcctgcacagtagcgatggcttgctctagcctcaaatttagggaggtgctgccctccctaataggaattccccataggaatctggttttagataatcttactgagttgtctcctatcttctgggcctgccctgctggctggccctttagctaagctacccaacaattcccagacagacaggaaagtctttggtgtttataaggatatacctgctggctttgcaatgagagctttaatattgctatactaggaatgaccatgtatgagtggcctccaccaaactggtaactgctcactggtgattctgaagccacctagaggagatcagcagtttgtaatactgagcgtaggagctgatgagatgaaagacctattggagttgtttaatgattcctccccatctcttgtggtgtgggctctccaactgtgtaatcacaagaagtcagggagtctccctagacagactgtatgccatgttcttccaccaccaaatacctttagagaatttggactctgggcttatccctctctaataccacttttctcccctccccacttcacctaagcaaggcctcatttatttctctgatacctttcctattggtgttttctggaatatctgttaaccttgactattttgggacatctcctctgtcagtggtgcttttgtttgctcccagatctccaccccatttctgggctgtcctggcactctctgtttacctcttcatctgacactgcactccccagacactgcttcacagtctctcactcacacaaatgactggatgtatcctgggttttctgcacagctcttttctgcttctgctttcttatgcaggtatatagtatttgaaggagaagaagggcaggatgctggcgggctcctgcgggagtggtatatgatcatctctcgagagatgtttaaccctatgtatgccttgttccgtacctcacctggtgatcgagtcacctacaccatcaatccatcttcccactgcaaccccaaccacctcagctacttcaagtttgtcggacgcattgtggccaaagctgtatatgacaaccgtcttctggagtgctactttactcgatccttttacaaacacatcttgggcaagtcagtcagatatacagatatggagagtgaagattaccacttctaccaaggtctggtttatctgctggaaaatgatgtctccacactaggctatgacctcaccttcagcactgaggtccaagagtttggagtttgtgaagttcgtgacctcaaacccaatggggccaacatcttggtaacagaggagaataagaaggagtatgtacacctggtatgccagatgagaatgacaggagccatccgcaagcagttggcggctttcttagaaggcttctatgagatcattccaaagcgcctcatttccatcttcactgagcaggagttagagctgcttatatcaggactgcccaccattgacatcgatgatctgaaatccaacactgaataccacaagtaccagtccaactctattcagatccagtggttctggagagcattgcgttctttcgatcaagctgaccgtgccaagttcctccagtttgtcacgggtacttccaaggtacccctgcaaggctttgctgccctcgaaggcatgaatggcattcagaagtttcagatccatcgagatgacaggtccacagatcgcctgccttcagctcacacatgttttaatcagctggatctgcctgcctatgagagctttgagaagctccgccacatgctactgttggctatccaggagtgctctgaaggctttgggctggcctaataaggccctgcccaactccgtggggttttttttaccattgttggacctggggaggggggagttaaaaaaagaaccagaaagaaattgtcaaaaaccaataaatgaaatccaccaactcaccgtgtgtgtcccagctgccccatcttccccagcgcatacctgttcctcttctcattctctccccgccgcctgtttcctcaccttctctcccctttccatgccgtccatgatccccaccccatgtgttttaaaaaggcagtagcctttgcagggacctgtctgtcccaactgtttgaacagtgtgctcctcagattctgtgttcagaaggatttgctgcattgagacttgaaacctttggataggggaaaaaattatatatatatatatttttttgttctgtttgcatttcttaatttgtgcttggaatgtgttgatgtgcacagctaatgattcaatgcgagacaagattggcgtctgtgttgtggaggtttcaaataaagagcactcttcataa

SEQ ID NO: 466980 - DNA, 11948 bp, Homo sapiens
ctgcatccaacctggggagtgctgtcgatgagctcatgagacatcagcccacccttaaaacagatgcaacgactgccatcatcaagttacttgaagaaatctgtaatcttggaagggaccccaaatacatctgtcagaagccatcaatccagaaggcagatggcactgccactgctcctcccccaaggtctaatcatgccgcagaagaagcctctagtgaggatgaggaggaagaggaagtacaggccatgcagagctttaattctacccagcaaaatgaaactgagcctaatcagcaggttgttggtacagaggaacgtattcctattcccctcatggattacatccttaatgtgatgaaatttgtggaatctattctgagcaacaatacaacagatgaccactgccaggaatttgtgaatcagaaaggactgttgcctttggttaccattttgggtcttcccaatctgcccattgactttcccacatctgctgcctgtcaggctgttgcaggtgtctgcaaatccatattgacactgtcacatgaacccaaagtccttcaagagggtctccttcagttggactccatcctctcctccctggagcccttacaccgccccattgaatcccctgggggctcagtgttgttgcgagaactggcttgcgcaggcaatgttgctgatgctaccctctcagcccaggccacacctctgctgcatgcactcactgctgcccatgcctacatcatgatgtttgttcatacttgcagagttggacagagtgaaattcgttccatctccgtaaaccagtggggctctcaattgggtctgagtgttttgagcaagctgagccagttatactgttccctggtgtgggaaagcactgtcctcctctctctgtgtaccccaaacagcctaccatctgggtgtgaatttggccaggcagatatgcagaaactggttccaaaggatgagaaggcaggtacgacccagggcggaaaaagatcagatggggaacaggatggagcagctggaagtatggatgcttctacccagggcttattagaaggcattgggctagatggtgacacattggctcccatggagacagatgaacctactgcttcagactctaagggcaaatctaaaatcacaccagcaatggctgccagaattaagcaaatcaagcctttgttatcagcttcctccagattaggccgagcacttgctgagctatttggacttcttgttaaactttgtgtgggatctcctgtccgccagagaaggagccatcatgctgccagcaccactacagcaccgacacctgccgcgcgatcaacagcctcagctctcactaagctcttgactaaggggttatcttggcagcccccaccatatacacctactccccgattcaggctgacattcttcatctgttcagttggtttcacatccccaatgctgtttgatgagaggaagtatccctaccacctcatgctgcaaaaatttctctgctccggaggccacaatgctctttttgaaactttcaactgggctctgtccatgggaggtaaagttcctgtttctgagggattggaacactcagacttgcctgatggcacaggagaattcctagatgcctggcttatgctggtggagaagatggtgaatcccaccacggtgcttgaatctccacattcgctgcctgccaaattgcctggaggtgtccagaactttccccagttcagtgcactgcgcttccttgtggtaactcagaaagcagcctttacttgcatcaaaaacttatggaaccggaaacccctgaaggtatatggtggacgaatggctgaatcgatgctggccattctatgccacatcctccgaggagaacctgtgattcgagagagactaagcaaggagaaggaggggtctcgaggagaagaggatacagggcaagaggaaggtggctcccgccgggaacctcaagtcaaccagcaacaactgcaacagctcatggacatgggcttcacaagggaacatgcaatggaggcactgttgaacaccagcaccatggagcaggccacagagtaccttttaacccaccctcctccaatcatgggaggagttgttcgggatctcagcatgtctgaagaggaccagatgatgagagcaattgctatgtctctgggacaggatattccaatggatcaaagggcagagtcacctgaggaagttgcttgccggaaggaggaagaggaacggaaagctcgggaaaagcaggaggaggaagaggctaaatgtctagagaagttccaggatgctgacccgttggaacaagatgagctccacactttcacagatactatgttgccaggctgcttccaccttcttgatgagctgccagacacagtataccgtgtgtgtgacctgatcatgacagcaatcaaacgtaatggagcagattatcgtgacatgattctgaagcaagtagtcaatcaggtgtgggaagctgctgatgtattgatcaaagctgctcttcccctgacaacaagtgacacaaaaaccgtgtcagagtggataagtcagatggccacactgccccaggcctccaatttggctactagaatcttgcttttaacgctactttttgaggagttgaagctaccttgtgcttgggtggttgaatcaagtggcatccttaatgtcctaatcaaactcttggaagtggttcagccctgcctccaggcagccaaggagcagaaggaagtccagaccccaaagtggatcacaccagtgttgctcctgattgatttctatgaaaagacagccatctcctcaaaaaggagagcccagatgactaagtacctgcaatccaacagcaacaactggcgctggtttgatgatcgctctgggcgttggtgtagttacagtgcaagcaacaatagcactattgattctgcctggaaatctggagagacaagcgtgcgattcactgcaggccgaagaagatacacggtccaattcactacaatggtgcaggttaatgaggaaacagggaaccgacgccctgtgatgctgactctcctcagggtacctcggctgaataaaaattcaaaaaacagcaatggacaggaactagagaagacgctggaagaaagcaaagaaatggatatcaaacgtaaagaaaataaaggcaatgatacccctttggccctagagagtacaaacactgaaaaggagacaagcctggaggaaacaaaaatcggggagatcctgatccagggcttgacagaagatatggtgactgttttaatccgggcctgcgtgagcatgctgggagtccctgtggacccagatactttgcatgccacccttcgtctctgtctgaggctcacccgggaccacaaatatgccatgatgtttgcagaactgaagagtacccgcatgatcttgaatttgacccagagctcaggcttcaatgggtttactcccctggtcacccttctcttaagacacatcattgaggacccctgtacccttcgtcataccatggaaaaggttgttcgctcagcagctacaagtggagctggtagcactacctctggtgttgtgtctggcagcctcggctctcgggagatcaactacatccttcgtgtccttgggccagccgcatgccgcaatccagacatattcacagaagtggccaactgctgtatccgcatcgcccttcctgcccctcgaggctcaggaactgcttcagatgatgaatttgagaatcttagaattaaaggccctaatgctgtacagctggtgaagaccacccctttgaagccctcacctctgcctgtcatccctgatactatcaaggaagtgatctatgatatgctgaatgctctggctgcataccatgctccagaggaagcagataaatctgatcctaaacctggggttatgacccaagaggttggccagctcctgcaagacatgggtgatgatgtataccagcagtaccggtcacttacgcgtcagagcagtgactttgatacgcagtcaggtttttccattaatagtcaggtctttgctgcagatggtgcctccactgagacttccgcatctgggacctcccaaggagaggcttcaactccagaggagtctcgagatgggaagaaagataaagaaggggaccgggcctctgaggaaggcaaacagaaaggcaagggcagcaaacctttaatgcctacctccactatccttcgtcttctggcagagttggtgaggtcctatgttggtattgctaccctgattgccaactacagctacactgtgggccagtctgaactgatcaaagaggactgcagtgtgctagcttttgttctggaccacctgctcccacatacccagaatgcagaagacaaggacacccctgccttggcccgcctgttcctcgcaagcctggctgctgcagggagtggcacagatgcccaggtggccctagtgaatgaagtaaaagcagcccttggacgggcactggctatggctgagagtacagagaaacatgccaggcttcaggcagtgatgtgtatcatcagtactatcatggagtcctgcccctccacctccagcttctacagcagtgccacagcgaagacccagcacaatggcatgaacaacatcattcggcttttcctgaagaagggactggttaatgacctggccagagtacctcacagcttagacctgtccagtcccaacatggccaacacagtcaatgctgctctgaagcctttggaaacactttcccggattgtgaaccagcccagtagcctttttggcagcaagagtgcttctagcaagaacaagtctgagcaggatgcccaaggagcctctcaagattccagtagcaaccagcaggacccaggcgagcctggggaagcagaagtgcaggaggaggatcatgatgtcactcagacagaggtggcagatggggatatcatggatggggaggctgaaaccgactcagtggtgattgctgggcagcctgaggtgctcagttcacaagagatgcaggttgagaatgagctggaggacctgatagatgagttgcttgagagggatggcggatctgggaacagtacaattatagtgagcagaagtggagaggatgaatcacaagaggacgtgctgatggatgaagctccttccaacctcagccaagcttccaccttgcaggccaaccgagaagattccatgaatatcctggaccctgaggatgaggaggagcacactcaggaagaggacagcagtggcagtaacgaggatgaggatgatagtcaggatgaagaggaggaggaggaggaagatgaggaagatgatcaggaggatgatgaaggtgaagagggagatgaagacgatgacgacgatggctctgagatggaattggatgaggattatcctgatatgaacgcttctcccttggtccgatttgagcgctttgaccgggaggatgatctcatcattgagtttgacaacatgttctccagtgctacagacatccccccatccccaggaaatatccctaccacccatccactgatggtgcgccatgcagaccacagttctctgacactgggcagtggctcttcaacaactcgtctcacccagggcatcgggcgcagtcagaggaccctaaggcagctgacggccaatactggccacaccattcatgttcactaccctgggaatcgccagcccaaccctcctcttatactgcagaggttgcttggtccctcagctgctgctgacatccttcagctgagcagcagccttcccctacaaagccggggtcgggcccgcctcctggtaggcaacgatgacgtccacatcatcgcccgttctgatgatgagctgctggatgactttttccatgatcagagcacagctaccagccaagcaggaaccctgtccagcatccccacagccctgacccgctggacagaagaatgcaaagttctcgatgctgagagcatgcatgactgtgtttcagtggttaaagtgtccattgtcaatcacctggaattcctgagggatgaggagctggaagaaaggcgagagaagcgcaggaaacaactggctgaggaagaaacaaagataactgataaaggcaaagaagataaggagaacagggatcagagtgcacagtgtactgcatctaagtcaaatgactccactgaacagaatctctcagatgggacgcctatgcctgacagctacccaacaaccccatcttcaactgatgcagctacatctgagtccaaggagacccttggcactctgcaatcctcacaacagcaaccaacactcccaaccccaccagctttgggagaggttcctcaggagctgcagtctccagctggagaagggggcagctctacacagctattgatgcctgtagagccagaggaattgggtcccacaaggccaagtggggaagcagaaacaactcagatggagttatccccagctcccactataacctcactttccccagagagagctgaggattctgatgcactgacggctgtcagcagtcagctagaaggctctcctatggatacaagcagcctggcttcctgtaccttagaggaggctgtgggtgacacttcagcagctggcagttctgagcagcccagagcaggcagctccactcctggggatgccccaccagctgtggcggaagtgcaaggcaggagtgatgggtcaggggaatctgcccagccacctgaggacagctccccacctgcatcctctgagagctcttccaccagagattctgccgtggccatttctggagcagattcccgaggaatcctagaagagccgttgccttcaacaagcagtgaagaagaagatccccttgcgggtatcagtctccctgaaggtgtggacccctcttttctggctgccctgcctgatgacatccgtcgggaagttctacagaaccagctaggcattcgtccaccaacccggactgccccctccacaaatagctcagcgcctgcagtggtggggaatcctggtgtgactgaagtgagccctgagtttctggctgccctgcctccagccattcaggaggaagtactggcacagcagagagctgagcagcagcgacgagaactagcacagaatgccagctcagacacccctatggaccctgtgaccttcatccagactctgccctcagacctgcgccgtagtgtcctagaggatatggaggacagtgtgttagctgtgatgccacctgacattgcagctgaggctcaagccctgagacgagagcaagaagcccggcagcgacagctcatgcatgagcgtctgtttgggcacagtagcacctccgcactctctgctattctccgaagcccggctttcaccagtcgcttaagtggcaaccgtggggtccagtatactcgccttgctgtgcagagaggtggcaccttccagatggggggtagcagcagccataacaggccttctggcagtaatgtagatactctcctccgcctccgaggacggctccttctggaccacgaagccctttcttgtctcttggtcctactttttgtggatgagccaaagctcaatactagccgtctacaccgagtactgagaaatctctgctaccatgcccagacccgccactgggtcatccgcagtctgctctccatcttgcagcgcagcagtgagagtgagctatgcattgaaacacccaaactcactacaagtgaggaaaagggcaaaaagtcgagcaagagctgtgggtcaagtagccatgagaaccgtcccctggacctgctacacaagatggagtcaaagagctccaaccagctttcctggctctcagtatccatggatgcagccctaggctgcaggactaatatatttcagatccagcgttcaggggggcgtaaacataccgagaagcatgcaagcggtggctccaccgtccacatccatccccaagctgctcctgttgtctgcagacacgttttggatacactcattcaattggccaaggtatttcccagccacttcacacagcagcggaccaaagaaacaaactgtgagagtgatcgggaaaggggcaataaggcctgtagcccatgctcctcacagtcctccagcagtggcatttgcacagacttctgggacttattggtaaaactggacaacatgaatgtcagccggaaaggcaagaactccgtgaagtcagtgccagtgagcgctggcggtgagggggaaacctctccatacagcctcgaggcctctccactggggcagctcatgaacatgttgtcacacccagtcatccgccggagctctctcttaactgagaaactcctcagactcctttctctcatctcaattgctctcccagaaaacaaggtgtcagaagcacaggctaattctggcagcggtgcttcctccaccaccactgccacctcaaccacatctaccaccaccaccactgccgcctccaccacgcccacaccccctactgcacccacccctgtcacttctgctccagccctggttgctgccacggctatttccaccattgtcgtagctgcttcgaccacagtgactacccccacgactgctaccactactgtttcaatttctcccactactaagggcagcaaatctccagcgaaggtgagtgatgggggcagcagcagtacagactttaagatggtgtcctctggcctcactgaaaaccagctacagctctctgtagaggtgttgacatcccactcttgttctgaggaaggcttagaggatgcagccaacgtactactgcagctctcccggggggactctgggacccgggacactgttctcaagctgctactgaatggagcccgccatctgggttataccctttgtaaacaaataggtaccctgctggccgagctgcgggaatacaacctcgagcagcagcggcgagcccaatgtgaaaccctctctcctgatggcctgcctgaggagcagccacagaccaccaagctgaagggcaaaatgcagagcaggtttgacatggctgagaatgtggtaattgtggcatctcagaagcgacctttgggtggccgggagctccagctgccttctatgtccatgttgacatccaagacatctacccagaagttcttcttgagggtactacaggtcatcatccagctccgggacgacacgcgccgggctaacaagaaagccaagcagacaggcaggctaggttcctccggtttaggctcagctagcagcatccaggcagctgttcggcagctggaggctgaggctgatgccattatacaaatggtacgtgagggtcaaagggcgcggagacagcaacaagcagcaacgtcggagtctagccagtcagaggcgtctgtccggagggaggaatcacccatggatgtggaccagccatctcccagtgctcaagatactcaatccattgcctccgatggaaccccacagggggagaaggaaaaggaagaaagaccacctgagttacccctgctcagcgagcagctgagtttggacgagctgtgggacatgcttggggagtgtctaaaggaactagaggaatcccatgaccagcatgcggtgctagtgctacagcctgctgtcgaggccttctttctggtccatgccacagagcgggagagcaagcctcctgtccgagacacccgtgagagccagctggcacacatcaaggacgagcctcctccactctcccctgcccccttaaccccagccacgccttcctcccttgacccattcttctcccgggagccctcatctatgcacatctcctcaagcctgccccctgacacacagaagttccttcgctttgcagagactcaccgcactgtgttaaaccagatcctacggcagtccacgacccaccttgctgatgggccttttgctgtcctggtagactacattcgtgtcctcgactttgatgtcaagcgcaaatatttccgccaagagctggagcgtttagatgaggggctccggaaagaagacatggctgtgcatgtccgtcgtgaccatgtgtttgaagactcctatcgtgagctgcatcgcaaatcccccgaagaaatgaagaatcgattgcctcatttatttctctgatacctttcctattggtgttttctggaatatctgttaaccttgactattttgggacatctcctctgtcagtggtgcttttgtttgctcccagatctccaccccatttctgggctgtcctggcactctctgtttacctcttcatctgacactgcactccccagacactgcttcacagtctctcactcacacaaatgactggatgtatcctgggttttctgcacagctcttttctgcttctgctttcttatgcaggtatatagtatttgaaggagaagaagggcaggatgctggcgggctcctgcgggagtggtatatgatcatctctcgagagatgtttaaccctatgtatgccttgttccgtacctcacctggtgatcgagtcacctacaccatcaatccatcttcccactgcaaccccaaccacctcagctacttcaagtttgtcggacgcattgtggccaaagctgtatatgacaaccgtcttctggagtgctactttactcgatccttttacaaacacatcttgggcaagtcagtcagatatacagatatggagagtgaagattaccacttctaccaaggtctggtttatctgctggaaaatgatgtctccacactaggctatgacctcaccttcagcactgaggtccaagagtttggagtttgtgaagttcgtgacctcaaacccaatggggccaacatcttggtaacagaggagaataagaaggagtatgtacacctggtatgccagatgagaatgacaggagccatccgcaagcagttggcggctttcttagaaggcttctatgagatcattccaaagcgcctcatttccatcttcactgagcaggagttagagctgcttatatcaggactgcccaccattgacatcgatgatctgaaatccaacactgaataccacaagtaccagtccaactctattcagatccagtggttctggagagcattgcgttctttcgatcaagctgaccgtgccaagttcctccagtttgtcacgggtacttccaaggtacccctgcaaggctttgctgccctcgaaggcatgaatggcattcagaagtttcagatccatcgagatgacaggtccacagatcgcctgccttcagctcacacatgttttaatcagctggatctgcctgcctatgagagctttgagaagctccgccacatgctactgttggctatccaggagtgctctgaaggctttgggctggcctaataaggccctgcccaactccgtggggttttttttaccattgttggacctggggaggggggagttaaaaaaagaaccagaaagaaattgtcaaaaaccaataaatgaaatccaccaactcaccgtgtgtgtcccagctgccccatcttccccagcgcatacctgttcctcttctcattctctccccgccgcctgtttcctcaccttctctcccctttccatgccgtccatgatccccaccccatgtgttttaaaaaggcagtagcctttgcagggacctgtctgtcccaactgtttgaacagtgtgctcctcagattctgtgttcagaaggatttgctgcattgagacttgaaacctttggataggggaaaaaattatatatatatatatttttttgttctgtttgcatttcttaatttgtgcttggaatgtgttgatgtgcacagctaatgattcaatgcgagacaagattggcgtctgtgttgtggaggtttcaaataaagagcactcttcataa

SEQ ID NO: 466981 - DNA, 12035 bp, Homo sapiens
ctgcatccaacctggggagtgctgtcgatgagctcatgagacatcagcccacccttaaaacagatgcaacgactgccatcatcaagttacttgaagaaatctgtaatcttggaagggaccccaaatacatctgtcagaagccatcaatccagaaggcagatggcactgccactgctcctcccccaaggtctaatcatgccgcagaagaagcctctagtgaggatgaggaggaagaggaagtacaggccatgcagagctttaattctacccagcaaaatgaaactgagcctaatcagcaggttgttggtacagaggaacgtattcctattcccctcatggattacatccttaatgtgatgaaatttgtggaatctattctgagcaacaatacaacagatgaccactgccaggaatttgtgaatcagaaaggactgttgcctttggttaccattttgggtcttcccaatctgcccattgactttcccacatctgctgcctgtcaggctgttgcaggtgtctgcaaatccatattgacactgtcacatgaacccaaagtccttcaagagggtctccttcagttggactccatcctctcctccctggagcccttacaccgccccattgaatcccctgggggctcagtgttgttgcgagaactggcttgcgcaggcaatgttgctgatgctaccctctcagcccaggccacacctctgctgcatgcactcactgctgcccatgcctacatcatgatgtttgttcatacttgcagagttggacagagtgaaattcgttccatctccgtaaaccagtggggctctcaattgggtctgagtgttttgagcaagctgagccagttatactgttccctggtgtgggaaagcactgtcctcctctctctgtgtaccccaaacagcctaccatctgggtgtgaatttggccaggcagatatgcagaaactggttccaaaggatgagaaggcaggtacgacccagggcggaaaaagatcagatggggaacaggatggagcagctggaagtatggatgcttctacccagggcttattagaaggcattgggctagatggtgacacattggctcccatggagacagatgaacctactgcttcagactctaagggcaaatctaaaatcacaccagcaatggctgccagaattaagcaaatcaagcctttgttatcagcttcctccagattaggccgagcacttgctgagctatttggacttcttgttaaactttgtgtgggatctcctgtccgccagagaaggagccatcatgctgccagcaccactacagcaccgacacctgccgcgcgatcaacagcctcagctctcactaagctcttgactaaggggttatcttggcagcccccaccatatacacctactccccgattcaggctgacattcttcatctgttcagttggtttcacatccccaatgctgtttgatgagaggaagtatccctaccacctcatgctgcaaaaatttctctgctccggaggccacaatgctctttttgaaactttcaactgggctctgtccatgggaggtaaagttcctgtttctgagggattggaacactcagacttgcctgatggcacaggagaattcctagatgcctggcttatgctggtggagaagatggtgaatcccaccacggtgcttgaatctccacattcgctgcctgccaaattgcctggaggtgtccagaactttccccagttcagtgcactgcgcttccttgtggtaactcagaaagcagcctttacttgcatcaaaaacttatggaaccggaaacccctgaaggtatatggtggacgaatggctgaatcgatgctggccattctatgccacatcctccgaggagaacctgtgattcgagagagactaagcaaggagaaggaggggtctcgaggagaagaggatacagggcaagaggaaggtggctcccgccgggaacctcaagtcaaccagcaacaactgcaacagctcatggacatgggcttcacaagggaacatgcaatggaggcactgttgaacaccagcaccatggagcaggccacagagtaccttttaacccaccctcctccaatcatgggaggagttgttcgggatctcagcatgtctgaagaggaccagatgatgagagcaattgctatgtctctgggacaggatattccaatggatcaaagggcagagtcacctgaggaagttgcttgccggaaggaggaagaggaacggaaagctcgggaaaagcaggaggaggaagaggctaaatgtctagagaagttccaggatgctgacccgttggaacaagatgagctccacactttcacagatactatgttgccaggctgcttccaccttcttgatgagctgccagacacagtataccgtgtgtgtgacctgatcatgacagcaatcaaacgtaatggagcagattatcgtgacatgattctgaagcaagtagtcaatcaggtgtgggaagctgctgatgtattgatcaaagctgctcttcccctgacaacaagtgacacaaaaaccgtgtcagagtggataagtcagatggccacactgccccaggcctccaatttggctactagaatcttgcttttaacgctactttttgaggagttgaagctaccttgtgcttgggtggttgaatcaagtggcatccttaatgtcctaatcaaactcttggaagtggttcagccctgcctccaggcagccaaggagcagaaggaagtccagaccccaaagtggatcacaccagtgttgctcctgattgatttctatgaaaagacagccatctcctcaaaaaggagagcccagatgactaagtacctgcaatccaacagcaacaactggcgctggtttgatgatcgctctgggcgttggtgtagttacagtgcaagcaacaatagcactattgattctgcctggaaatctggagagacaagcgtgcgattcactgcaggccgaagaagatacacggtccaattcactacaatggtgcaggttaatgaggaaacagggaaccgacgccctgtgatgctgactctcctcagggtacctcggctgaataaaaattcaaaaaacagcaatggacaggaactagagaagacgctggaagaaagcaaagaaatggatatcaaacgtaaagaaaataaaggcaatgatacccctttggccctagagagtacaaacactgaaaaggagacaagcctggaggaaacaaaaatcggggagatcctgatccagggcttgacagaagatatggtgactgttttaatccgggcctgcgtgagcatgctgggagtccctgtggacccagatactttgcatgccacccttcgtctctgtctgaggctcacccgggaccacaaatatgccatgatgtttgcagaactgaagagtacccgcatgatcttgaatttgacccagagctcaggcttcaatgggtttactcccctggtcacccttctcttaagacacatcattgaggacccctgtacccttcgtcataccatggaaaaggttgttcgctcagcagctacaagtggagctggtagcactacctctggtgttgtgtctggcagcctcggctctcgggagatcaactacatccttcgtgtccttgggccagccgcatgccgcaatccagacatattcacagaagtggccaactgctgtatccgcatcgcccttcctgcccctcgaggctcaggaactgcttcagatgatgaatttgagaatcttagaattaaaggccctaatgctgtacagctggtgaagaccacccctttgaagccctcacctctgcctgtcatccctgatactatcaaggaagtgatctatgatatgctgaatgctctggctgcataccatgctccagaggaagcagataaatctgatcctaaacctggggttatgacccaagaggttggccagctcctgcaagacatgggtgatgatgtataccagcagtaccggtcacttacgcgtcagagcagtgactttgatacgcagtcaggtttttccattaatagtcaggtctttgctgcagatggtgcctccactgagacttccgcatctgggacctcccaaggagaggcttcaactccagaggagtctcgagatgggaagaaagataaagaaggggaccgggcctctgaggaaggcaaacagaaaggcaagggcagcaaacctttaatgcctacctccactatccttcgtcttctggcagagttggtgaggtcctatgttggtattgctaccctgattgccaactacagctacactgtgggccagtctgaactgatcaaagaggactgcagtgtgctagcttttgttctggaccacctgctcccacatacccagaatgcagaagacaaggacacccctgccttggcccgcctgttcctcgcaagcctggctgctgcagggagtggcacagatgcccaggtggccctagtgaatgaagtaaaagcagcccttggacgggcactggctatggctgagagtacagagaaacatgccaggcttcaggcagtgatgtgtatcatcagtactatcatggagtcctgcccctccacctccagcttctacagcagtgccacagcgaagacccagcacaatggcatgaacaacatcattcggcttttcctgaagaagggactggttaatgacctggccagagtacctcacagcttagacctgtccagtcccaacatggccaacacagtcaatgctgctctgaagcctttggaaacactttcccggattgtgaaccagcccagtagcctttttggcagcaagagtgcttctagcaagaacaagtctgagcaggatgcccaaggagcctctcaagattccagtagcaaccagcaggacccaggcgagcctggggaagcagaagtgcaggaggaggatcatgatgtcactcagacagaggtggcagatggggatatcatggatggggaggctgaaaccgactcagtggtgattgctgggcagcctgaggtgctcagttcacaagagatgcaggttgagaatgagctggaggacctgatagatgagttgcttgagagggatggcggatctgggaacagtacaattatagtgagcagaagtggagaggatgaatcacaagaggacgtgctgatggatgaagctccttccaacctcagccaagcttccaccttgcaggccaaccgagaagattccatgaatatcctggaccctgaggatgaggaggagcacactcaggaagaggacagcagtggcagtaacgaggatgaggatgatagtcaggatgaagaggaggaggaggaggaagatgaggaagatgatcaggaggatgatgaaggtgaagagggagatgaagacgatgacgacgatggctctgagatggaattggatgaggattatcctgatatgaacgcttctcccttggtccgatttgagcgctttgaccgggaggatgatctcatcattgagtttgacaacatgttctccagtgctacagacatccccccatccccaggaaatatccctaccacccatccactgatggtgcgccatgcagaccacagttctctgacactgggcagtggctcttcaacaactcgtctcacccagggcatcgggcgcagtcagaggaccctaaggcagctgacggccaatactggccacaccattcatgttcactaccctgggaatcgccagcccaaccctcctcttatactgcagaggttgcttggtccctcagctgctgctgacatccttcagctgagcagcagccttcccctacaaagccggggtcgggcccgcctcctggtaggcaacgatgacgtccacatcatcgcccgttctgatgatgagctgctggatgactttttccatgatcagagcacagctaccagccaagcaggaaccctgtccagcatccccacagccctgacccgctggacagaagaatgcaaagttctcgatgctgagagcatgcatgactgtgtttcagtggttaaagtgtccattgtcaatcacctggaattcctgagggatgaggagctggaagaaaggcgagagaagcgcaggaaacaactggctgaggaagaaacaaagataactgataaaggcaaagaagataaggagaacagggatcagagtgcacagtgtactgcatctaagtcaaatgactccactgaacagaatctctcagatgggacgcctatgcctgacagctacccaacaaccccatcttcaactgatgcagctacatctgagtccaaggagacccttggcactctgcaatcctcacaacagcaaccaacactcccaaccccaccagctttgggagaggttcctcaggagctgcagtctccagctggagaagggggcagctctacacagctattgatgcctgtagagccagaggaattgggtcccacaaggccaagtggggaagcagaaacaactcagatggagttatccccagctcccactataacctcactttccccagagagagctgaggattctgatgcactgacggctgtcagcagtcagctagaaggctctcctatggatacaagcagcctggcttcctgtaccttagaggaggctgtgggtgacacttcagcagctggcagttctgagcagcccagagcaggcagctccactcctggggatgccccaccagctgtggcggaagtgcaaggcaggagtgatgggtcaggggaatctgcccagccacctgaggacagctccccacctgcatcctctgagagctcttccaccagagattctgccgtggccatttctggagcagattcccgaggaatcctagaagagccgttgccttcaacaagcagtgaagaagaagatccccttgcgggtatcagtctccctgaaggtgtggacccctcttttctggctgccctgcctgatgacatccgtcgggaagttctacagaaccagctaggcattcgtccaccaacccggactgccccctccacaaatagctcagcgcctgcagtggtggggaatcctggtgtgactgaagtgagccctgagtttctggctgccctgcctccagccattcaggaggaagtactggcacagcagagagctgagcagcagcgacgagaactagcacagaatgccagctcagacacccctatggaccctgtgaccttcatccagactctgccctcagacctgcgccgtagtgtcctagaggatatggaggacagtgtgttagctgtgatgccacctgacattgcagctgaggctcaagccctgagacgagagcaagaagcccggcagcgacagctcatgcatgagcgtctgtttgggcacagtagcacctccgcactctctgctattctccgaagcccggctttcaccagtcgcttaagtggcaaccgtggggtccagtatactcgccttgctgtgcagagaggtggcaccttccagatggggggtagcagcagccataacaggccttctggcagtaatgtagatactctcctccgcctccgaggacggctccttctggaccacgaagccctttcttgtctcttggtcctactttttgtggatgagccaaagctcaatactagccgtctacaccgagtactgagaaatctctgctaccatgcccagacccgccactgggtcatccgcagtctgctctccatcttgcagcgcagcagtgagagtgagctatgcattgaaacacccaaactcactacaagtgaggaaaagggcaaaaagtcgagcaagagctgtgggtcaagtagccatgagaaccgtcccctggacctgctacacaagatggagtcaaagagctccaaccagctttcctggctctcagtatccatggatgcagccctaggctgcaggactaatatatttcagatccagcgttcaggggggcgtaaacataccgagaagcatgcaagcggtggctccaccgtccacatccatccccaagctgctcctgttgtctgcagacacgttttggatacactcattcaattggccaaggtatttcccagccacttcacacagcagcggaccaaagaaacaaactgtgagagtgatcgggaaaggggcaataaggcctgtagcccatgctcctcacagtcctccagcagtggcatttgcacagacttctgggacttattggtaaaactggacaacatgaatgtcagccggaaaggcaagaactccgtgaagtcagtgccagtgagcgctggcggtgagggggaaacctctccatacagcctcgaggcctctccactggggcagctcatgaacatgttgtcacacccagtcatccgccggagctctctcttaactgagaaactcctcagactcctttctctcatctcaattgctctcccagaaaacaaggtgtcagaagcacaggctaattctggcagcggtgcttcctccaccaccactgccacctcaaccacatctaccaccaccaccactgccgcctccaccacgcccacaccccctactgcacccacccctgtcacttctgctccagccctggttgctgccacggctatttccaccattgtcgtagctgcttcgaccacagtgactacccccacgactgctaccactactgtttcaatttctcccactactaagggcagcaaatctccagcgaaggtgagtgatgggggcagcagcagtacagactttaagatggtgtcctctggcctcactgaaaaccagctacagctctctgtagaggtgttgacatcccactcttgttctgaggaaggcttagaggatgcagccaacgtactactgcagctctcccggggggactctgggacccgggacactgttctcaagctgctactgaatggagcccgccatctgggttataccctttgtaaacaaataggtaccctgctggccgagctgcgggaatacaacctcgagcagcagcggcgagcccaatgtgaaaccctctctcctgatggcctgcctgaggagcagccacagaccaccaagctgaagggcaaaatgcagagcaggtttgacatggctgagaatgtggtaattgtggcatctcagaagcgacctttgggtggccgggagctccagctgccttctatgtccatgttgacatccaagacatctacccagaagttcttcttgagggtactacaggtcatcatccagctccgggacgacacgcgccgggctaacaagaaagccaagcagacaggcaggctaggttcctccggtttaggctcagctagcagcatccaggcagctgttcggcagctggaggctgaggctgatgccattatacaaatggtacgtgagggtcaaagggcgcggagacagcaacaagcagcaacgtcggagtctagccagtcagaggcgtctgtccggagggaggaatcacccatggatgtggaccagccatctcccagtgctcaagatactcaatccattgcctccgatggaaccccacagggggagaaggaaaaggaagaaagaccacctgagttacccctgctcagcgagcagctgagtttggacgagctgtgggacatgcttggggagtgtctaaaggaactagaggaatcccatgaccagcatgcggtgctagtgctacagcctgctgtcgaggccttctttctggtccatgccacagagcgggagagcaagcctcctgtccgagacacccgtgagagccagctggcacacatcaaggacgagcctcctccactctcccctgcccccttaaccccagccacgccttcctcccttgacccattcttctcccgggagccctcatctatgcacatctcctcaagcctgccccctgacacacagaagttccttcgctttgcagagactcaccgcactgtgttaaaccagatcctacggcagtccacgacccaccttgctgatgggccttttgctgtcctggtagactacattcgtgtcctcgactttgatgtcaagcgcaaatatttccgccaagagctggagcgtttagatgaggggctccggaaagaagacatggctgtgcatgtccgtcgtgaccatgtgtttgaagactcctatcgtgagctgcatcgcaaatcccccgaagaaatgaagaatcgattgtatatagtatttgaaggagaagaagggcaggatgctggcgggctcctgcgggagtggtatatgatcatctctcgagagatgtttaaccctatgtatgccttgttccgtacctcacctggtgatcgagtcacctacaccatcaatccatcttcccactgcaaccccaaccacctcagctacttcaagtttgtcggacgcattgtggccaaagctgtatatgacaaccgtcttctggagtgctactttactcgatccttttacaaacacatcttgggcaagtcagtcagatatacagatatggagagtgaagattaccacttctaccaaggtctggtttatctgctggaaaatgatgtctccacactaggctatgacctcaccttcagcactgaggtccaagagtttggagtttgtgaagttcgtgacctcaaacccaatggggccaacatcttggtaacagaggagaataagaaggagtatgtacacctggtatgccagatgagaatgacaggagccatccgcaagcagttggcggctttcttagaaggcttctatgagatcattccaaagcgcctcatttccatcttcactgagcaggagttagagctgcttatatcaggactgcccaccattgacatcgatgatctgaaatccaacactgaataccacaagtaccagtccaactctattcagatccagtggttctggagagcattgcgttctttcgatcaagctgaccgtgccaagttcctccagtttgtcacgggtacttccaaggtacccctgcaaggctttgctgccctcgaaggcatgaatggcattcagaagtttcagatccatcgagatgacaggtccacagatcgcctgccttcagctcacacatgggccagcgtgactggagcaaggaggagttgcagggagcaaaagtctaaagagctcagcagaggtccgattaccagtgactctgaaaaccaccttcaagtttgcactttagcctatgggcgagtgaggccagggtgtttaaggaggagtgacagggtcagatttttggttttggtgcctgatggccagtttgggagccagataaagggggacatactgggctgagacaagattgggagtcatcaagaagcagggagttggtttcttcagggaggggaggggctggtgggcaccatgggaacacacagatttggttatctgtcatccctcaccacaaactgatctttcttctttccttagttttaatcagctggatctgcctgcctatgagagctttgagaagctccgccacatgctactgttggctatccaggagtgctctgaaggctttgggctggcctaataaggccctgcccaactccgtggggttttttttaccattgttggacctggggaggggggagttaaaaaaagaaccagaaagaaattgtcaaaaaccaataaatgaaatccaccaactcaccgtgtgtgtcccagctgccccatcttccccagcgcatacctgttcctcttctcattctctccccgccgcctgtttcctcaccttctctcccctttccatgccgtccatgatccccaccccatgtgttttaaaaaggcagtagcctttgcagggacctgtctgtcccaactgtttgaacagtgtgctcctcagattctgtgttcagaaggatttgctgcattgagacttgaaacctttggataggggaaaaaattatatatatatatatttttttgttctgtttgcatttcttaatttgtgcttggaatgtgttgatgtgcacagctaatgattcaatgcgagacaagattggcgtctgtgttgtggaggtttcaaataaagagcactcttcataa

SEQ ID NO: 466982 - DNA, 2460 bp, Homo sapiens
cttggtcgtctctagaggtatcccctggtagcgctcgggttacaagaaagccaagcagacaggcaggctaggttcctccggtttaggctcagctagcagcatccaggcagctgttcggcagctggaggctgaggctgatgccattatacaaatggtacgtgagggtcaaagggcgcggagacagcaacaagcagcaacgtcggagtctagccagtcagaggcgtctgtccggagggaggaatcacccatggatgtggaccagccatctcccagtgctcaagatactcaatccattgcctccgatggaaccccacagggggagaaggaaaaggaagaaagaccacctgagttacccctgctcagcgagcagctgagtttggacgagctgtgggacatgcttggggagtgtctaaaggaactagaggaatcccatgaccagcatgcggtgctagtgctacagcctgctgtcgaggccttctttctggtccatgccacagagcgggagagcaagcctcctgtccgagacacccgtgagagccagctggcacacatcaaggacgagcctcctccactctcccctgcccccttaaccccagccacgccttcctcccttgacccattcttctcccgggagccctcatctatgcacatctcctcaagcctgccccctgacacacagaagttccttcgctttgcagagactcaccgcactgtgttaaaccagatcctacggcagtccacgacccaccttgctgatgggccttttgctgtcctggtagactacattcgtgtcctcgactttgatgtcaagcgcaaatatttccgccaagagctggagcgtttagatgaggggctccggaaagaagacatggctgtgcatgtccgtcgtgaccatgtgtttgaagactcctatcgtgagctgcatcgcaaatcccccgaagaaatgaagaatcgattgtatatagtatttgaaggagaagaagggcaggatgctggcgggctcctgcgggagtggtatatgatcatctctcgagagatgtttaaccctatgtatgccttgttccgtacctcacctggtgatcgagtcacctacaccatcaatccatcttcccactgcaaccccaaccacctcagctacttcaagtttgtcggacgcattgtggccaaagctgtatatgacaaccgtcttctggagtgctactttactcgatccttttacaaacacatcttgggcaagtcagtcagatatacagatatggagagtgaagattaccacttctaccaaggtctggtttatctgctggaaaatgatgtctccacactaggctatgacctcaccttcagcactgaggtccaagagtttggagtttgtgaagttcgtgacctcaaacccaatggggccaacatcttggtaacagaggagaataagaaggagtatgtacacctggtatgccagatgagaatgacaggagccatccgcaagcagttggcggctttcttagaaggcttctatgagatcattccaaagcgcctcatttccatcttcactgagcaggagttagagctgcttatatcaggactgcccaccattgacatcgatgatctgaaatccaacactgaataccacaagtaccagtccaactctattcagatccagtggttctggagagcattgcgttctttcgatcaagctgaccgtgccaagttcctccagtttgtcacgggtacttccaaggtacccctgcaaggctttgctgccctcgaaggcatgaatggcattcagaagtttcagatccatcgagatgacaggtccacagatcgcctgccttcagctcacacatgttttaatcagctggatctgcctgcctatgagagctttgagaagctccgccacatgctactgttggctatccaggagtgctctgaaggctttgggctggcctaataaggccctgcccaactccgtggggttttttttaccattgttggacctggggaggggggagttaaaaaaagaaccagaaagaaattgtcaaaaaccaataaatgaaatccaccaactcaccgtgtgtgtcccagctgccccatcttccccagcgcatacctgttcctcttctcattctctccccgccgcctgtttcctcaccttctctcccctttccatgccgtccatgatccccaccccatgtgttttaaaaaggcagtagcctttgcagggacctgtctgtcccaactgtttgaacagtgtgctcctcagattctgtgttcagaaggatttgctgcattgagacttgaaacctttggataggggaaaaaattatatatatatatatttttttgttctgtttgcatttcttaatttgtgcttggaatgtgttgatgtgcacagctaatgattcaatgcgagacaagattggcgtctgtgttgtggaggtttcaaataaagagcactcttcataa

SEQ ID NO: 466983 - DNA, 2415 bp, Homo sapiens
cttggtcgtctctagaggtatcccctggtagcgctcgggttacaagaaagccaagcagacaggcaggctaggttcctccggtttaggctcagctagcagcatccaggcagctgttcggcagctggaggctgaggctgatgccattatacaaatgtcggagtctagccagtcagaggcgtctgtccggagggaggaatcacccatggatgtggaccagccatctcccagtgctcaagatactcaatccattgcctccgatggaaccccacagggggagaaggaaaaggaagaaagaccacctgagttacccctgctcagcgagcagctgagtttggacgagctgtgggacatgcttggggagtgtctaaaggaactagaggaatcccatgaccagcatgcggtgctagtgctacagcctgctgtcgaggccttctttctggtccatgccacagagcgggagagcaagcctcctgtccgagacacccgtgagagccagctggcacacatcaaggacgagcctcctccactctcccctgcccccttaaccccagccacgccttcctcccttgacccattcttctcccgggagccctcatctatgcacatctcctcaagcctgccccctgacacacagaagttccttcgctttgcagagactcaccgcactgtgttaaaccagatcctacggcagtccacgacccaccttgctgatgggccttttgctgtcctggtagactacattcgtgtcctcgactttgatgtcaagcgcaaatatttccgccaagagctggagcgtttagatgaggggctccggaaagaagacatggctgtgcatgtccgtcgtgaccatgtgtttgaagactcctatcgtgagctgcatcgcaaatcccccgaagaaatgaagaatcgattgtatatagtatttgaaggagaagaagggcaggatgctggcgggctcctgcgggagtggtatatgatcatctctcgagagatgtttaaccctatgtatgccttgttccgtacctcacctggtgatcgagtcacctacaccatcaatccatcttcccactgcaaccccaaccacctcagctacttcaagtttgtcggacgcattgtggccaaagctgtatatgacaaccgtcttctggagtgctactttactcgatccttttacaaacacatcttgggcaagtcagtcagatatacagatatggagagtgaagattaccacttctaccaaggtctggtttatctgctggaaaatgatgtctccacactaggctatgacctcaccttcagcactgaggtccaagagtttggagtttgtgaagttcgtgacctcaaacccaatggggccaacatcttggtaacagaggagaataagaaggagtatgtacacctggtatgccagatgagaatgacaggagccatccgcaagcagttggcggctttcttagaaggcttctatgagatcattccaaagcgcctcatttccatcttcactgagcaggagttagagctgcttatatcaggactgcccaccattgacatcgatgatctgaaatccaacactgaataccacaagtaccagtccaactctattcagatccagtggttctggagagcattgcgttctttcgatcaagctgaccgtgccaagttcctccagtttgtcacgggtacttccaaggtacccctgcaaggctttgctgccctcgaaggcatgaatggcattcagaagtttcagatccatcgagatgacaggtccacagatcgcctgccttcagctcacacatgttttaatcagctggatctgcctgcctatgagagctttgagaagctccgccacatgctactgttggctatccaggagtgctctgaaggctttgggctggcctaataaggccctgcccaactccgtggggttttttttaccattgttggacctggggaggggggagttaaaaaaagaaccagaaagaaattgtcaaaaaccaataaatgaaatccaccaactcaccgtgtgtgtcccagctgccccatcttccccagcgcatacctgttcctcttctcattctctccccgccgcctgtttcctcaccttctctcccctttccatgccgtccatgatccccaccccatgtgttttaaaaaggcagtagcctttgcagggacctgtctgtcccaactgtttgaacagtgtgctcctcagattctgtgttcagaaggatttgctgcattgagacttgaaacctttggataggggaaaaaattatatatatatatatttttttgttctgtttgcatttcttaatttgtgcttggaatgtgttgatgtgcacagctaatgattcaatgcgagacaagattggcgtctgtgttgtggaggtttcaaataaagagcactcttcataa

SEQ ID NO: 466984 - DNA, 2603 bp, Homo sapiens
tagcaatcattggactcgaccacacacacacacacaacagaagaagacttgaagtctatatacaggaggctagttctgactggtcacaggtctggattgtagactgtaggaaatgtaagcatccaaggagctgttgggaaaagcttacaaaacacagtggagaaaagcagaagagttgggaaaggcatccttttgtcctggatagctacagttttccccacccaaatatgggaagcttctttgcaagctcaatgtatgagaagtggaagggccaacctctagcctgtctctaaggaaagcagagttgcacccttatgtgatttttgtctcccttttatccagtcggagtctagccagtcagaggcgtctgtccggagggaggaatcacccatggatgtggaccagccatctcccagtgctcaagatactcaatccattgcctccgatggaaccccacagggggagaaggaaaaggaagaaagaccacctgagttacccctgctcagcgagcagctgagtttggacgagctgtgggacatgcttggggagtgtctaaaggaactagaggaatcccatgaccagcatgcggtgctagtgctacagcctgctgtcgaggccttctttctggtccatgccacagagcgggagagcaagcctcctgtccgagacacccgtgagagccagctggcacacatcaaggacgagcctcctccactctcccctgcccccttaaccccagccacgccttcctcccttgacccattcttctcccgggagccctcatctatgcacatctcctcaagcctgccccctgacacacagaagttccttcgctttgcagagactcaccgcactgtgttaaaccagatcctacggcagtccacgacccaccttgctgatgggccttttgctgtcctggtagactacattcgtgtcctcgactttgatgtcaagcgcaaatatttccgccaagagctggagcgtttagatgaggggctccggaaagaagacatggctgtgcatgtccgtcgtgaccatgtgtttgaagactcctatcgtgagctgcatcgcaaatcccccgaagaaatgaagaatcgattgtatatagtatttgaaggagaagaagggcaggatgctggcgggctcctgcgggagtggtatatgatcatctctcgagagatgtttaaccctatgtatgccttgttccgtacctcacctggtgatcgagtcacctacaccatcaatccatcttcccactgcaaccccaaccacctcagctacttcaagtttgtcggacgcattgtggccaaagctgtatatgacaaccgtcttctggagtgctactttactcgatccttttacaaacacatcttgggcaagtcagtcagatatacagatatggagagtgaagattaccacttctaccaaggtctggtttatctgctggaaaatgatgtctccacactaggctatgacctcaccttcagcactgaggtccaagagtttggagtttgtgaagttcgtgacctcaaacccaatggggccaacatcttggtaacagaggagaataagaaggagtatgtacacctggtatgccagatgagaatgacaggagccatccgcaagcagttggcggctttcttagaaggcttctatgagatcattccaaagcgcctcatttccatcttcactgagcaggagttagagctgcttatatcaggactgcccaccattgacatcgatgatctgaaatccaacactgaataccacaagtaccagtccaactctattcagatccagtggttctggagagcattgcgttctttcgatcaagctgaccgtgccaagttcctccagtttgtcacgggtacttccaaggtacccctgcaaggctttgctgccctcgaaggcatgaatggcattcagaagtttcagatccatcgagatgacaggtccacagatcgcctgccttcagctcacacatgttttaatcagctggatctgcctgcctatgagagctttgagaagctccgccacatgctactgttggctatccaggagtgctctgaaggctttgggctggcctaataaggccctgcccaactccgtggggttttttttaccattgttggacctggggaggggggagttaaaaaaagaaccagaaagaaattgtcaaaaaccaataaatgaaatccaccaactcaccgtgtgtgtcccagctgccccatcttccccagcgcatacctgttcctcttctcattctctccccgccgcctgtttcctcaccttctctcccctttccatgccgtccatgatccccaccccatgtgttttaaaaaggcagtagcctttgcagggacctgtctgtcccaactgtttgaacagtgtgctcctcagattctgtgttcagaaggatttgctgcattgagacttgaaacctttggataggggaaaaaattatatatatatatatttttttgttctgtttgcatttcttaatttgtgcttggaatgtgttgatgtgcacagctaatgattcaatgcgagacaagattggcgtctgtgttgtggaggtttcaaataaagagcactcttcataa

SEQ ID NO: 466985 - DNA, 2479 bp, Homo sapiens
cttggtcgtctctagaggtatcccctggtagcgctcgggttacaagaaagccaagcagacaggcaggctagtgttcctcgcgtgattagagcttcagacatagcagtgatccaaggattctgatcggaagtgtgaatgctgacgttgttgcgattatacaaagtggtacgggatagctgaaagggcgcgcatactcctattcgtagcaagtgtcgtgttcggagtctagccagtcagaggcgtctgtccggagggaggaatcacccatggatgtggaccagccatctcccagtgctcaagatactcaatccattgcctccgatggaaccccacagggggagaaggaaaaggaagaaagaccacctgagttacccctgctcagcgagcagctgagtttggacgagctgtgggacatgcttggggagtgtctaaaggaactagaggaatcccatgaccagcatgcggtgctagtgctacagcctgctgtcgaggccttctttctggtccatgccacagagcgggagagcaagcctcctgtccgagacacccgtgagagccagctggcacacatcaaggacgagcctcctccactctcccctgcccccttaaccccagccacgccttcctcccttgacccattcttctcccgggagccctcatctatgcacatctcctcaagcctgccccctgacacacagaagttccttcgctttgcagagactcaccgcactgtgttaaaccagatcctacggcagtccacgacccaccttgctgatgggccttttgctgtcctggtagactacattcgtgtcctcgactttgatgtcaagcgcaaatatttccgccaagagctggagcgtttagatgaggggctccggaaagaagacatggctgtgcatgtccgtcgtgaccatgtgtttgaagactcctatcgtgagctgcatcgcaaatcccccgaagaaatgaagaatcgattgtatatagtatttgaaggagaagaagggcaggatgctggcgggctcctgcgggagtggtatatgatcatctctcgagagatgtttaaccctatgtatgccttgttccgtacctcacctggtgatcgagtcacctacaccatcaatccatcttcccactgcaaccccaaccacctcagctacttcaagtttgtcggacgcattgtggccaaagctgtatatgacaaccgtcttctggagtgctactttactcgatccttttacaaacacatcttgggcaagtcagtcagatatacagatatggagagtgaagattaccacttctaccaaggtctggtttatctgctggaaaatgatgtctccacactaggctatgacctcaccttcagcactgaggtccaagagtttggagtttgtgaagttcgtgacctcaaacccaatggggccaacatcttggtaacagaggagaataagaaggagtatgtacacctggtatgccagatgagaatgacaggagccatccgcaagcagttggcggctttcttagaaggcttctatgagatcattccaaagcgcctcatttccatcttcactgagcaggagttagagctgcttatatcaggactgcccaccattgacatcgatgatctgaaatccaacactgaataccacaagtaccagtccaactctattcagatccagtggttctggagagcattgcgttctttcgatcaagctgaccgtgccaagttcctccagtttgtcacgggtacttccaaggtacccctgcaaggctttgctgccctcgaaggcatgaatggcattcagaagtttcagatccatcgagatgacaggtccacagatcgcctgccttcagctcacacatgttttaatcagctggatctgcctgcctatgagagctttgagaagctccgccacatgctactgttggctatccaggagtgctctgaaggctttgggctggcctaataaggccctgcccaactccgtggggttttttttaccattgttggacctggggaggggggagttaaaaaaagaaccagaaagaaattgtcaaaaaccaataaatgaaatccaccaactcaccgtgtgtgtcccagctgccccatcttccccagcgcatacctgttcctcttctcattctctccccgccgcctgtttcctcaccttctctcccctttccatgccgtccatgatccccaccccatgtgttttaaaaaggcagtagcctttgcagggacctgtctgtcccaactgtttgaacagtgtgctcctcagattctgtgttcagaaggatttgctgcattgagacttgaaacctttggataggggaaaaaattatatatatatatatttttttgttctgtttgcatttcttaatttgtgcttggaatgtgttgatgtgcacagctaatgattcaatgcgagacaagattggcgtctgtgttgtggaggtttcaaataaagagcactcttcataa

SEQ ID NO: 466986 - DNA, 10783 bp, Homo sapiens
ctgcatccaacctggggagtgctgtcgatgagctcatgagacatcagcccacccttaaaacagatgcaacgactgccatcatcaagttacttgaagaaatctgtaatcttggaagggaccccaaatacatctgtcagaagccatcaatccagaaggcagatggcactgccactgctcctcccccaaggtctaatcatgccgcagaagaagcctctagtgaggatgaggaggaagaggaagtacaggccatgcagagctttaattctacccagcaaaatgaaactgagcctaatcagcaggttgttggtacagaggaacgtattcctattcccctcatggattacatccttaatgtgatgaaatttgtggaatctattctgagcaacaatacaacagatgaccactgccaggaatttgtgaatcagaaaggactgttgcctttggttaccattttgggtcttcccaatctgcccattgactttcccacatctgctgcctgtcaggctgttgcaggtgtctgcaaatccatattgacactgtcacatgaacccaaagtccttcaagagggtctccttcagttggactccatcctctcctccctggagcccttacaccgccccattgaatcccctgggggctcagtgttgttgcgagaactggcttgcgcaggcaatgttgctgatgctaccctctcagcccaggccacacctctgctgcatgcactcactgctgcccatgcctacatcatgatgtttgttcatacttgcagagttggacagagtgaaattcgttccatctccgtaaaccagtggggctctcaattgggtctgagtgttttgagcaagctgagccagttatactgttccctggtgtgggaaagcactgtcctcctctctctgtgtaccccaaacagcctaccatctgggtgtgaatttggccaggcagatatgcagaaactggttccaaaggatgagaaggcaggtacgacccagggcggaaaaagatcagatggggaacaggatggagcagctggaagtatggatgcttctacccagggcttattagaaggcattgggctagatggtgacacattggctcccatggagacagatgaacctactgcttcagactctaagggcaaatctaaaatcacaccagcaatggctgccagaattaagcaaatcaagcctttgttatcagcttcctccagattaggccgagcacttgctgagctatttggacttcttgttaaactttgtgtgggatctcctgtccgccagagaaggagccatcatgctgccagcaccactacagcaccgacacctgccgcgcgatcaacagcctcagctctcactaagctcttgactaaggggttatcttggcagcccccaccatatacacctactccccgattcaggctgacattcttcatctgttcagttggtttcacatccccaatgctgtttgatgagaggaagtatccctaccacctcatgctgcaaaaatttctctgctccggaggccacaatgctctttttgaaactttcaactgggctctgtccatgggaggtaaagttcctgtttctgagggattggaacactcagacttgcctgatggcacaggagaattcctagatgcctggcttatgctggtggagaagatggtgaatcccaccacggtgcttgaatctccacattcgctgcctgccaaattgcctggaggtgtccagaactttccccagttcagtgcactgcgcttccttgtggtaactcagaaagcagcctttacttgcatcaaaaacttatggaaccggaaacccctgaaggtatatggtggacgaatggctgaatcgatgctggccattctatgccacatcctccgaggagaacctgtgattcgagagagactaagcaaggagaaggaggggtctcgaggagaagaggatacagggcaagaggaaggtggctcccgccgggaacctcaagtcaaccagcaacaactgcaacagctcatggacatgggcttcacaagggaacatgcaatggaggcactgttgaacaccagcaccatggagcaggccacagagtaccttttaacccaccctcctccaatcatgggaggagttgttcgggatctcagcatgtctgaagaggaccagatgatgagagcaattgctatgtctctgggacaggatattccaatggatcaaagggcagagtcacctgaggaagttgcttgccggaaggaggaagaggaacggaaagctcgggaaaagcaggaggaggaagaggctaaatgtctagagaagttccaggatgctgacccgttggaacaagatgagctccacactttcacagatactatgttgccaggctgcttccaccttcttgatgagctgccagacacagtataccgtgtgtgtgacctgatcatgacagcaatcaaacgtaatggagcagattatcgtgacatgattctgaagcaagtagtcaatcaggtgtgggaagctgctgatgtattgatcaaagctgctcttcccctgacaacaagtgacacaaaaaccgtgtcagagtggataagtcagatggccacactgccccaggcctccaatttggctactagaatcttgcttttaacgctactttttgaggagttgaagctaccttgtgcttgggtggttgaatcaagtggcatccttaatgtcctaatcaaactcttggaagtggttcagccctgcctccaggcagccaaggagcagaaggaagtccagaccccaaagtggatcacaccagtgttgctcctgattgatttctatgaaaagacagccatctcctcaaaaaggagagcccagatgactaagtacctgcaatccaacagcaacaactggcgctggtttgatgatcgctctgggcgttggtgtagttacagtgcaagcaacaatagcactattgattctgcctggaaatctggagagacaagcgtgcgattcactgcaggccgaagaagatacacggtccaattcactacaatggtgcaggttaatgaggaaacagggaaccgacgccctgtgatgctgactctcctcagggtacctcggctgaataaaaattcaaaaaacagcaatggacaggaactagagaagacgctggaagaaagcaaagaaatggatatcaaacgtaaagaaaataaaggcaatgatacccctttggccctagagagtacaaacactgaaaaggagacaagcctggaggaaacaaaaatcggggagatcctgatccagggcttgacagaagatatggtgactgttttaatccgggcctgcgtgagcatgctgggagtccctgtggacccagatactttgcatgccacccttcgtctctgtctgaggctcacccgggaccacaaatatgccatgatgtttgcagaactgaagagtacccgcatgatcttgaatttgacccagagctcaggcttcaatgggtttactcccctggtcacccttctcttaagacacatcattgaggacccctgtacccttcgtcataccatggaaaaggttgttcgctcagcagctacaagtggagctggtagcactacctctggtgttgtgtctggcagcctcggctctcgggagatcaactacatccttcgtgtccttgggccagccgcatgccgcaatccagacatattcacagaagtggccaactgctgtatccgcatcgcccttcctgcccctcgaggctcaggaactgcttcagatgatgaatttgagaatcttagaattaaaggccctaatgctgtacagctggtgaagaccacccctttgaagccctcacctctgcctgtcatccctgatactatcaaggaagtgatctatgatatgctgaatgctctggctgcataccatgctccagaggaagcagataaatctgatcctaaacctggggttatgacccaagaggttggccagctcctgcaagacatgggtgatgatgtataccagcagtaccggtcacttacgcgtcagagcagtgactttgatacgcagtcaggtttttccattaatagtcaggtctttgctgcagatggtgcctccactgagacttccgcatctgggacctcccaaggagaggcttcaactccagaggagtctcgagatgggaagaaagataaagaaggggaccgggcctctgaggaaggcaaacagaaaggcaagggcagcaaacctttaatgcctacctccactatccttcgtcttctggcagagttggtgaggtcctatgttggtattgctaccctgattgccaactacagctacactgtgggccagtctgaactgatcaaagaggactgcagtgtgctagcttttgttctggaccacctgctcccacatacccagaatgcagaagacaaggacacccctgccttggcccgcctgttcctcgcaagcctggctgctgcagggagtggcacagatgcccaggtggccctagtgaatgaagtaaaagcagcccttggacgggcactggctatggctgagagtacagagaaacatgccaggcttcaggcagtgatgtgtatcatcagtactatcatggagtcctgcccctccacctccagcttctacagcagtgccacagcgaagacccagcacaatggcatgaacaacatcattcggcttttcctgaagaagggactggttaatgacctggccagagtacctcacagcttagacctgtccagtcccaacatggccaacacagtcaatgctgctctgaagcctttggaaacactttcccggattgtgaaccagcccagtagcctttttggcagcaagagtgcttctagcaagaacaagtctgagcaggatgcccaaggagcctctcaagattccagtagcaaccagcaggacccaggcgagcctggggaagcagaagtgcaggaggaggatcatgatgtcactcagacagaggtggcagatggggatatcatggatggggaggctgaaaccgactcagtggtgattgctgggcagcctgaggtgctcagttcacaagagatgcaggttgagaatgagctggaggacctgatagatgagttgcttgagagggatggcggatctgggaacagtacaattatagtgagcagaagtggagaggatgaatcacaagaggacgtgctgatggatgaagctccttccaacctcagccaagcttccaccttgcaggccaaccgagaagattccatgaatatcctggaccctgaggatgaggaggagcacactcaggaagaggacagcagtggcagtaacgaggatgaggatgatagtcaggatgaagaggaggaggaggaggaagatgaggaagatgatcaggaggatgatgaaggtgaagagggagatgaagacgatgacgacgatggctctgagatggaattggatgaggattatcctgatatgaacgcttctcccttggtccgatttgagcgctttgaccgggaggatgatctcatcattgagtttgacaacatgttctccagtgctacagacatccccccatccccaggaaatatccctaccacccatccactgatggtgcgccatgcagaccacagttctctgacactgggcagtggctcttcaacaactcgtctcacccagggcatcgggcgcagtcagaggaccctaaggcagctgacggccaatactggccacaccattcatgttcactaccctgggaatcgccagcccaaccctcctcttatactgcagaggttgcttggtccctcagctgctgctgacatccttcagctgagcagcagccttcccctacaaagccggggtcgggcccgcctcctggtaggcaacgatgacgtccacatcatcgcccgttctgatgatgagctgctggatgactttttccatgatcagagcacagctaccagccaagcaggaaccctgtccagcatccccacagccctgacccgctggacagaagaatgcaaagttctcgatgctgagagcatgcatgactgtgtttcagtggttaaagtgtccattgtcaatcacctggaattcctgagggatgaggagctggaagaaaggcgagagaagcgcaggaaacaactggctgaggaagaaacaaagataactgataaaggcaaagaagataaggagaacagggatcagagtgcacagtgtactgcatctaagtcaaatgactccactgaacagaatctctcagatgggacgcctatgcctgacagctacccaacaaccccatcttcaactgatgcagctacatctgagtccaaggagacccttggcactctgcaatcctcacaacagcaaccaacactcccaaccccaccagctttgggagaggttcctcaggagctgcagtctccagctggagaagggggcagctctacacagctattgatgcctgtagagccagaggaattgggtcccacaaggccaagtggggaagcagaaacaactcagatggagttatccccagctcccactataacctcactttccccagagagagctgaggattctgatgcactgacggctgtcagcagtcagctagaaggctctcctatggatacaagcagcctggcttcctgtaccttagaggaggctgtgggtgacacttcagcagctggcagttctgagcagcccagagcaggcagctccactcctggggatgccccaccagctgtggcggaagtgcaaggcaggagtgatgggtcaggggaatctgcccagccacctgaggacagctccccacctgcatcctctgagagctcttccaccagagattctgccgtggccatttctggagcagattcccgaggaatcctagaagagccgttgccttcaacaagcagtgaagaagaagatccccttgcgggtatcagtctccctgaaggtgtggacccctcttttctggctgccctgcctgatgacatccgtcgggaagttctacagaaccagctaggcattcgtccaccaacccggactgccccctccacaaatagctcagcgcctgcagtggtggggaatcctggtgtgactgaagtgagccctgagtttctggctgccctgcctccagccattcaggaggaagtactggcacagcagagagctgagcagcagcgacgagaactagcacagaatgccagctcagacacccctatggaccctgtgaccttcatccagactctgccctcagacctgcgccgtagtgtcctagaggatatggaggacagtgtgttagctgtgatgccacctgacattgcagctgaggctcaagccctgagacgagagcaagaagcccggcagcgacagctcatgcatgagcgtctgtttgggcacagtagcacctccgcactctctgctattctccgaagcccggctttcaccagtcgcttaagtggcaaccgtggggtccagtatactcgccttgctgtgcagagaggtggcaccttccagatggggggtagcagcagccataacaggccttctggcagtaatgtagatactctcctccgcctccgaggacggctccttctggaccacgaagccctttcttgtctcttggtcctactttttgtggatgagccaaagctcaatactagccgtctacaccgagtactgagaaatctctgctaccatgcccagacccgccactgggtcatccgcagtctgctctccatcttgcagcgcagcagtgagagtgagctatgcattgaaacacccaaactcactacaagtgaggaaaagggcaaaaagtcgagcaagagctgtgggtcaagtagccatgagaaccgtcccctggacctgctacacaagatggagtcaaagagctccaaccagctttcctggctctcagtatccatggatgcagccctaggctgcaggactaatatatttcagatccagcgttcaggggggcgtaaacataccgagaagcatgcaagcggtggctccaccgtccacatccatccccaagctgctcctgttgtctgcagacacgttttggatacactcattcaattggccaaggtatttcccagccacttcacacagcagcggaccaaagaaacaaactgtgagagtgatcgggaaaggggcaataaggcctgtagcccatgctcctcacagtcctccagcagtggcatttgcacagacttctgggacttattggtaaaactggacaacatgaatgtcagccggaaaggcaagaactccgtgaagtcagtgccagtgagcgctggcggtgagggggaaacctctccatacagcctcgaggcctctccactggggcagctcatgaacatgttgtcacacccagtcatccgccggagctctctcttaactgagaaactcctcagactcctttctctcatctcaattgctctcccagaaaacaaggtgtcagaagcacaggctaattctggcagcggtgcttcctccaccaccactgccacctcaaccacatctaccaccaccaccactgccgcctccaccacgcccacaccccctactgcacccacccctgtcacttctgctccagccctggttgctgccacggctatttccaccattgtcgtagctgcttcgaccacagtgactacccccacgactgctaccactactgtttcaatttctcccactactaagggcagcaaatctccagcgaaggtgagtgatgggggcagcagcagtacagactttaagatggtgtcctctggcctcactgaaaaccagctacagctctctgtagaggtgttgacatcccactcttgttctgaggaaggcttagaggatgcagccaacgtactactgcagctctcccggggggactctgggacccgggacactgttctcaagctgctactgaatggagcccgccatctgggttataccctttgtaaacaaataggtaccctgctggccgagctgcgggaatacaacctcgagcagcagcggcgagcccaatgtgaaaccctctctcctgatggcctgcctgaggagcagccacagaccaccaagctgaagggcaaaatgcagagcaggtttgacatggctgagaatgtggtaattgtggcatctcagaagcgacctttgggtggccgggagctccagctgccttctatgtccatgttgacatccaagacatctacccagaagttcttcttgagggtactacaggtcatcatccagctccgggacgacacgcgccgggctaacaagaaagccaagcagacaggcaggctaggttcctccggtttaggctcagctagcagcatccaggcagctgttcggcagctggaggctgaggctgatgccattatacaaatggtacgtgagggtcaaagggcgcggagacagcaacaagcagcaacgtcggagtctagccagtcagaggcgtctgtccggagggaggaatcacccatggatgtggaccagccatctcccagtgctcaagatactcaatccattgcctccgatggaaccccacagggggagaaggaaaaggaagaaagaccacctgagttacccctgctcagcgagcagctgagtttggacgagctgtgggacatgcttggggagtgtctaaaggaactagaggaatcccatgaccagcatgcggtgctagtgctacagcctgctgtcgaggccttctttctggtccatgccacagagcgggagagcaagcctcctgtccgagacacccgtgagagccagctggcacacatcaaggacgagcctcctccactctcccctgcccccttaaccccagccacgccttcctcccttgacccattcttctcccgggagccctcatctatgcacatctcctcaagcctgccccctgacacacagaagttccttcgctttgcagagactcaccgcactgtgttaaaccagatcctacggcagtccacgacccaccttgctgatgggccttttgctgtcctggtagactacattcgtgtcctcgactttgatgtcaagcgcaaatatttccgccaagagctggagcgtttagatgaggggctccggaaagaagacatggctgtgcatgtccgtcgtgaccatgtgtttgaagactcctatcgtgagctgcatcgcaaatcccccgaagaaatgaagaatcgattgtatatagtatttgaaggagaagaagggcaggatgctggcgggctcctgcgggagtggtatatgatcatctctcgagagatgtttaaccctatgtatgccttgttccgtacctcacctggtgatcgagtcacctacaccatcaatccatcttcccactgcaaccccaaccacctcagctacttcaagtttgtcggacgcattgtggccaaagctgtatatgacaaccgtcttctggagtgctactttactcgatccttttacaaacacatcttgggcaagtcagtcagatatacagatatggagagtgaagattaccacttctaccaaggtctggtttatctgctggaaaatgatgtctccacactaggctatgacctcaccttcagcactgaggtaggtcaggaaatcctaatcacagcacatcccagccaatctggaagatccattccaggttcaccttagaactagcactgcgtgaccttctcatagttctaaggaagcatcttgacttcttaaagctgtagcaggtgtttgtgagtgacatcacaaacaggaaaaccagaatttgcaggccatttcctagtttcacctttattaaaaaaaaaaaa

SEQ ID NO: 466987 - DNA, 1689 bp, Homo sapiens
aaggatccccaccacactgggcctcgactttgatgtcaagcgcaaatatttccgccaagagctggagcgtttagatgaggggctccggaaagaagacatggctgtgcatgtccgtcgtgaccatgtgtttgaagactcctatcgtgagctgcatcgcaaatcccccgaagaaatgaagaatcgattgtatatagtatttgaaggagaagaagggcaggatgctggcgggctcctgcgggagtggtatatgatcatctctcgagagatgtttaaccctatgtatgccttgttccgtacctcacctggtgatcgagtcacctacaccatcaatccatcttcccactgcaaccccaaccacctcagctacttcaagtttgtcggacgcattgtggccaaagctgtatatgacaaccgtcttctggagtgctactttactcgatccttttacaaacacatcttgggcaagtcagtcagatatacagatatggagagtgaagattaccacttctaccaaggtctggtttatctgctggaaaatgatgtctccacactaggctatgacctcaccttcagcactgaggtccaagagtttggagtttgtgaagttcgtgacctcaaacccaatggggccaacatcttggtaacagaggagaataagaaggagtatgtacacctggtatgccagatgagaatgacaggagccatccgcaagcagttggcggctttcttagaaggcttctatgagatcattccaaagcgcctcatttccatcttcactgagcaggagttagagctgcttatatcaggactgcccaccattgacatcgatgatctgaaatccaacactgaataccacaagtaccagtccaactctattcagatccagtggttctggagagcattgcgttctttcgatcaagctgaccgtgccaagttcctccagtttgtcacgggtacttccaaggtacccctgcaaggctttgctgccctcgaaggcatgaatggcattcagaagtttcagatccatcgagatgacaggtccacagatcgcctgccttcagctcacacatgttttaatcagctggatctgcctgcctatgagagctttgagaagctccgccacatgctactgttggctatccaggagtgctctgaaggctttgggctggcctaataaggccctgcccaactccgtggggttttttttaccattgttggacctggggaggggggagttaaaaaaagaaccagaaagaaattgtcaaaaaccaataaatgaaatccaccaactcaccgtgtgtgtcccagctgccccatcttccccagcgcatacctgttcctcttctcattctctccccgccgcctgtttcctcaccttctctcccctttccatgccgtccatgatccccaccccatgtgttttaaaaaggcagtagcctttgcagggacctgtctgtcccaactgtttgaacagtgtgctcctcagattctgtgttcagaaggatttgctgcattgagacttgaaacctttggataggggaaaaaattatatatatatatatttttttgttctgtttgcatttcttaatttgtgcttggaatgtgttgatgtgcacagctaatgattcaatgcgagacaagattggcgtctgtgttgtggaggtttcaaataaagagcactcttcataa

SEQ ID NO: 466988 - DNA, 1712 bp, Homo sapiens
cgacgcatccaccccaacataaggctaggtacgaggccgggtgttactcgactttgatgtcagcgcaaatatttccgccaagagctggagcgtttagatgaggggctccggaaagaagacatggctgtgcatgtccgtcgtgaccatgtgtttgaagactcctatcgtgagctgcatcgcaaatcccccgaagaaatgaagaatcgattgtatatagtatttgaaggagaagaagggcaggatgctggcgggctcctgcgggagtggtatatgatcatctctcgagagatgtttaaccctatgtatgccttgttccgtacctcacctggtgatcgagtcacctacaccatcaatccatcttcccactgcaaccccaaccacctcagctacttcaagtttgtcggacgcattgtggccaaagctgtatatgacaaccgtcttctggagtgctactttactcgatccttttacaaacacatcttgggcaagtcagtcagatatacagatatggagagtgaagattaccacttctaccaaggtctggtttatctgctggaaaatgatgtctccacactaggctatgacctcaccttcagcactgaggtccaagagtttggagtttgtgaagttcgtgacctcaaacccaatggggccaacatcttggtaacagaggagaataagaaggagtatgtacacctggtatgccagatgagaatgacaggagccatccgcaagcagttggcggctttcttagaaggcttctatgagatcattccaaagcgcctcatttccatcttcactgagcaggagttagagctgcttatatcaggactgcccaccattgacatcgatgatctgaaatccaacactgaataccacaagtaccagtccaactctattcagatccagtggttctggagagcattgcgttctttcgatcaagctgaccgtgccaagttcctccagtttgtcacgggtacttccaaggtacccctgcaaggctttgctgccctcgaaggcatgaatggcattcagaagtttcagatccatcgagatgacaggtccacagatcgcctgccttcagctcacacatgttttaatcagctggatctgcctgcctatgagagctttgagaagctccgccacatgctactgttggctatccaggagtgctctgaaggctttgggctggcctaataaggccctgcccaactccgtggggttttttttaccattgttggacctggggaggggggagttaaaaaaagaaccagaaagaaattgtcaaaaaccaataaatgaaatccaccaactcaccgtgtgtgtcccagctgccccatcttccccagcgcatacctgttcctcttctcattctctccccgccgcctgtttcctcaccttctctcccctttccatgccgtccatgatccccaccccatgtgttttaaaaaggcagtagcctttgcagggacctgtctgtcccaactgtttgaacagtgtgctcctcagattctgtgttcagaaggatttgctgcattgagacttgaaacctttggataggggaaaaaattatatatatatatatttttttgttctgtttgcatttcttaatttgtgcttggaatgtgttgatgtgcacagctaatgattcaatgcgagacaagattggcgtctgtgttgtggaggtttcaaataaagagcactcttcataa

SEQ ID NO: 466989 - DNA, 9704 bp, Homo sapiens
ctgcatccaacctggggagtgctgtcgatgagctcatgagacatcagcccacccttaaaacagatgcaacgactgccatcatcaagttacttgaagaaatctgtaatcttggaagggaccccaaatacatctgtcagaagccatcaatccagaaggcagatggcactgccactgctcctcccccaaggtctaatcatgccgcagaagaagcctctagtgaggatgaggaggaagaggaagtacaggccatgcagagctttaattctacccagcaaaatgaaactgagcctaatcagcaggttgttggtacagaggaacgtattcctattcccctcatggattacatccttaatgtgatgaaatttgtggaatctattctgagcaacaatacaacagatgaccactgccaggaatttgtgaatcagaaaggactgttgcctttggttaccattttgggtcttcccaatctgcccattgactttcccacatctgctgcctgtcaggctgttgcaggtgtctgcaaatccatattgacactgtcacatgaacccaaagtccttcaagagggtctccttcagttggactccatcctctcctccctggagcccttacaccgccccattgaatcccctgggggctcagtgttgttgcgagaactggcttgcgcaggcaatgttgctgatgctaccctctcagcccaggccacacctctgctgcatgcactcactgctgcccatgcctacatcatgatgtttgttcatacttgcagagttggacagagtgaaattcgttccatctccgtaaaccagtggggctctcaattgggtctgagtgttttgagcaagctgagccagttatactgttccctggtgtgggaaagcactgtcctcctctctctgtgtaccccaaacagcctaccatctgggtgtgaatttggccaggcagatatgcagaaactggttccaaaggatgagaaggcaggtacgacccagggcggaaaaagatcagatggggaacaggatggagcagctggaagtatggatgcttctacccagggcttattagaaggcattgggctagatggtgacacattggctcccatggagacagatgaacctactgcttcagactctaagggcaaatctaaaatcacaccagcaatggctgccagaattaagcaaatcaagcctttgttatcagcttcctccagattaggccgagcacttgctgagctatttggacttcttgttaaactttgtgtgggatctcctgtccgccagagaaggagccatcatgctgccagcaccactacagcaccgacacctgccgcgcgatcaacagcctcagctctcactaagctcttgactaaggggttatcttggcagcccccaccatatacacctactccccgattcaggctgacattcttcatctgttcagttggtttcacatccccaatgctgtttgatgagaggaagtatccctaccacctcatgctgcaaaaatttctctgctccggaggccacaatgctctttttgaaactttcaactgggctctgtccatgggaggtaaagttcctgtttctgagggattggaacactcagacttgcctgatggcacaggagaattcctagatgcctggcttatgctggtggagaagatggtgaatcccaccacggtgcttgaatctccacattcgctgcctgccaaattgcctggaggtgtccagaactttccccagttcagtgcactgcgcttccttgtggtaactcagaaagcagcctttacttgcatcaaaaacttatggaaccggaaacccctgaaggtatatggtggacgaatggctgaatcgatgctggccattctatgccacatcctccgaggagaacctgtgattcgagagagactaagcaaggagaaggaggggtctcgaggagaagaggatacagggcaagaggaaggtggctcccgccgggaacctcaagtcaaccagcaacaactgcaacagctcatggacatgggcttcacaagggaacatgcaatggaggcactgttgaacaccagcaccatggagcaggccacagagtaccttttaacccaccctcctccaatcatgggaggagttgttcgggatctcagcatgtctgaagaggaccagatgatgagagcaattgctatgtctctgggacaggatattccaatggatcaaagggcagagtcacctgaggaagttgcttgccggaaggaggaagaggaacggaaagctcgggaaaagcaggaggaggaagaggctaaatgtctagagaagttccaggatgctgacccgttggaacaagatgagctccacactttcacagatactatgttgccaggctgcttccaccttcttgatgagctgccagacacagtataccgtgtgtgtgacctgatcatgacagcaatcaaacgtaatggagcagattatcgtgacatgattctgaagcaagtagtcaatcaggtgtgggaagctgctgatgtattgatcaaagctgctcttcccctgacaacaagtgacacaaaaaccgtgtcagagtggataagtcagatggccacactgccccaggcctccaatttggctactagaatcttgcttttaacgctactttttgaggagttgaagctaccttgtgcttgggtggttgaatcaagtggcatccttaatgtcctaatcaaactcttggaagtggttcagccctgcctccaggcagccaaggagcagaaggaagtccagaccccaaagtggatcacaccagtgttgctcctgattgatttctatgaaaagacagccatctcctcaaaaaggagagcccagatgactaagtacctgcaatccaacagcaacaactggcgctggtttgatgatcgctctgggcgttggtgtagttacagtgcaagcaacaatagcactattgattctgcctggaaatctggagagacaagcgtgcgattcactgcaggccgaagaagatacacggtccaattcactacaatggtgcaggttaatgaggaaacagggaaccgacgccctgtgatgctgactctcctcagggtacctcggctgaataaaaattcaaaaaacagcaatggacaggaactagagaagacgctggaagaaagcaaagaaatggatatcaaacgtaaagaaaataaaggcaatgatacccctttggccctagagagtacaaacactgaaaaggagacaagcctggaggaaacaaaaatcggggagatcctgatccagggcttgacagaagatatggtgactgttttaatccgggcctgcgtgagcatgctgggagtccctgtggacccagatactttgcatgccacccttcgtctctgtctgaggctcacccgggaccacaaatatgccatgatgtttgcagaactgaagagtacccgcatgatcttgaatttgacccagagctcaggcttcaatgggtttactcccctggtcacccttctcttaagacacatcattgaggacccctgtacccttcgtcataccatggaaaaggttgttcgctcagcagctacaagtggagctggtagcactacctctggtgttgtgtctggcagcctcggctctcgggagatcaactacatccttcgtgtccttgggccagccgcatgccgcaatccagacatattcacagaagtggccaactgctgtatccgcatcgcccttcctgcccctcgaggctcaggaactgcttcagatgatgaatttgagaatcttagaattaaaggccctaatgctgtacagctggtgaagaccacccctttgaagccctcacctctgcctgtcatccctgatactatcaaggaagtgatctatgatatgctgaatgctctggctgcataccatgctccagaggaagcagataaatctgatcctaaacctggggttatgacccaagaggttggccagctcctgcaagacatgggtgatgatgtataccagcagtaccggtcacttacgcgtcagagcagtgactttgatacgcagtcaggtttttccattaatagtcaggtctttgctgcagatggtgcctccactgagacttccgcatctgggacctcccaaggagaggcttcaactccagaggagtctcgagatgggaagaaagataaagaaggggaccgggcctctgaggaaggcaaacagaaaggcaagggcagcaaacctttaatgcctacctccactatccttcgtcttctggcagagttggtgaggtcctatgttggtattgctaccctgattgccaactacagctacactgtgggccagtctgaactgatcaaagaggactgcagtgtgctagcttttgttctggaccacctgctcccacatacccagaatgcagaagacaaggacacccctgccttggcccgcctgttcctcgcaagcctggctgctgcagggagtggcacagatgcccaggtggccctagtgaatgaagtaaaagcagcccttggacgggcactggctatggctgagagtacagagaaacatgccaggcttcaggcagtgatgtgtatcatcagtactatcatggagtcctgcccctccacctccagcttctacagcagtgccacagcgaagacccagcacaatggcatgaacaacatcattcggcttttcctgaagaagggactggttaatgacctggccagagtacctcacagcttagacctgtccagtcccaacatggccaacacagtcaatgctgctctgaagcctttggaaacactttcccggattgtgaaccagcccagtagcctttttggcagcaagagtgcttctagcaagaacaagtctgagcaggatgcccaaggagcctctcaagattccagtagcaaccagcaggacccaggcgagcctggggaagcagaagtgcaggaggaggatcatgatgtcactcagacagaggtggcagatggggatatcatggatggggaggctgaaaccgactcagtggtgattgctgggcagcctgaggtgctcagttcacaagagatgcaggttgagaatgagctggaggacctgatagatgagttgcttgagagggatggcggatctgggaacagtacaattatagtgagcagaagtggagaggatgaatcacaagaggacgtgctgatggatgaagctccttccaacctcagccaagcttccaccttgcaggccaaccgagaagattccatgaatatcctggaccctgaggatgaggaggagcacactcaggaagaggacagcagtggcagtaacgaggatgaggatgatagtcaggatgaagaggaggaggaggaggaagatgaggaagatgatcaggaggatgatgaaggtgaagagggagatgaagacgatgacgacgatggctctgagatggaattggatgaggattatcctgatatgaacgcttctcccttggtccgatttgagcgctttgaccgggaggatgatctcatcattgagtttgacaacatgttctccagtgctacagacatccccccatccccaggaaatatccctaccacccatccactgatggtgcgccatgcagaccacagttctctgacactgggcagtggctcttcaacaactcgtctcacccagggcatcgggcgcagtcagaggaccctaaggcagctgacggccaatactggccacaccattcatgttcactaccctgggaatcgccagcccaaccctcctcttatactgcagaggttgcttggtccctcagctgctgctgacatccttcagctgagcagcagccttcccctacaaagccggggtcgggcccgcctcctggtaggcaacgatgacgtccacatcatcgcccgttctgatgatgagctgctggatgactttttccatgatcagagcacagctaccagccaagcaggaaccctgtccagcatccccacagccctgacccgctggacagaagaatgcaaagttctcgatgctgagagcatgcatgactgtgtttcagtggttaaagtgtccattgtcaatcacctggaattcctgagggatgaggagctggaagaaaggcgagagaagcgcaggaaacaactggctgaggaagaaacaaagataactgataaaggcaaagaagataaggagaacagggatcagagtgcacagtgtactgcatctaagtcaaatgactccactgaacagaatctctcagatgggacgcctatgcctgacagctacccaacaaccccatcttcaactgatgcagctacatctgagtccaaggagacccttggcactctgcaatcctcacaacagcaaccaacactcccaaccccaccagctttgggagaggttcctcaggagctgcagtctccagctggagaagggggcagctctacacagctattgatgcctgtagagccagaggaattgggtcccacaaggccaagtggggaagcagaaacaactcagatggagttatccccagctcccactataacctcactttccccagagagagctgaggattctgatgcactgacggctgtcagcagtcagctagaaggctctcctatggatacaagcagcctggcttcctgtaccttagaggaggctgtgggtgacacttcagcagctggcagttctgagcagcccagagcaggcagctccactcctggggatgccccaccagctgtggcggaagtgcaaggcaggagtgatgggtcaggggaatctgcccagccacctgaggacagctccccacctgcatcctctgagagctcttccaccagagattctgccgtggccatttctggagcagattcccgaggaatcctagaagagccgttgccttcaacaagcagtgaagaagaagatccccttgcgggtatcagtctccctgaaggtgtggacccctcttttctggctgccctgcctgatgacatccgtcgggaagttctacagaaccagctaggcattcgtccaccaacccggactgccccctccacaaatagctcagcgcctgcagtggtggggaatcctggtgtgactgaagtgagccctgagtttctggctgccctgcctccagccattcaggaggaagtactggcacagcagagagctgagcagcagcgacgagaactagcacagaatgccagctcagacacccctatggaccctgtgaccttcatccagactctgccctcagacctgcgccgtagtgtcctagaggatatggaggacagtgtgttagctgtgatgccacctgacattgcagctgaggctcaagccctgagacgagagcaagaagcccggcagcgacagctcatgcatgagcgtctgtttgggcacagtagcacctccgcactctctgctattctccgaagcccggctttcaccagtcgcttaagtggcaaccgtggggtccagtatactcgccttgctgtgcagagaggtggcaccttccagatggggggtagcagcagccataacaggccttctggcagtaatgtagatactctcctccgcctccgaggacggctccttctggaccacgaagccctttcttgtctcttggtcctactttttgtggatgagccaaagctcaatactagccgtctacaccgagtactgagaaatctctgctaccatgcccagacccgccactgggtcatccgcagtctgctctccatcttgcagcgcagcagtgagagtgagctatgcattgaaacacccaaactcactacaagtgaggaaaagggcaaaaagtcgagcaagagctgtgggtcaagtagccatgagaaccgtcccctggacctgctacacaagatggagtcaaagagctccaaccagctttcctggctctcagtatccatggatgcagccctaggctgcaggactaatatatttcagatccagcgttcaggggggcgtaaacataccgagaagcatgcaagcggtggctccaccgtccacatccatccccaagctgctcctgttgtctgcagacacgttttggatacactcattcaattggccaaggtatttcccagccacttcacacagcagcggaccaaagaaacaaactgtgagagtgatcgggaaaggggcaataaggcctgtagcccatgctcctcacagtcctccagcagtggcatttgcacagacttctgggacttattggtaaaactggacaacatgaatgtcagccggaaaggcaagaactccgtgaagtcagtgccagtgagcgctggcggtgagggggaaacctctccatacagcctcgaggcctctccactggggcagctcatgaacatgttgtcacacccagtcatccgccggagctctctcttaactgagaaactcctcagactcctttctctcatctcaattgctctcccagaaaacaaggtgtcagaagcacaggctaattctggcagcggtgcttcctccaccaccactgccacctcaaccacatctaccaccaccaccactgccgcctccaccacgcccacaccccctactgcacccacccctgtcacttctgctccagccctggttgctgccacggctatttccaccattgtcgtagctgcttcgaccacagtgactacccccacgactgctaccactactgtttcaatttctcccactactaagggcagcaaatctccagcgaaggtgagtgatgggggcagcagcagtacagactttaagatggtgtcctctggcctcactgaaaaccagctacagctctctgtagaggtgttgacatcccactcttgttctgaggaaggcttagaggatgcagccaacgtactactgcagctctcccggggggactctgggacccgggacactgttctcaagctgctactgaatggagcccgccatctgggttataccctttgtaaacaaataggtaccctgctggccgagctgcgggaatacaacctcgagcagcagcggcgagcccaatgtgaaaccctctctcctgatggcctgcctgaggagcagccacagaccaccaagctgaagggcaaaatgcagagcaggtttgacatggctgagaatgtggtaattgtggcatctcagaagcgacctttgggtggccgggagctccagctgccttctatgtccatgttgacatccaagacatctacccagaagttcttcttgagggtactacaggtcatcatccagctccgggacgacacgcgccgggctaacaagaaagccaagcagacaggcaggctaggttcctccggtttaggctcagctagcagcatccaggcagctgttcggcagctggaggctgaggctgatgccattatacaaatggtacgtgagggtcaaagggcgcggagacagcaacaagcagcaacgtcggagtctagccagtcagaggcgtctgtccggagggaggaatcacccatggatgtggaccagccatctcccagtgctcaagatactcaatccattgcctccgatggaaccccacagggggagaaggaaaaggaagaaagaccacctgagttacccctgctcagcgagcagctgagtttggacgagctgtgggacatgcttggggagtgtctaaaggaactagaggtctgcagcatgccaggttgctaagtgctacagcctgctgtggctttggtccatgccacagag

SEQ ID NO: 466990 - DNA, 9669 bp, Homo sapiens
ctgcatccaacctggggagtgctgtcgatgagctcatgagacatcagcccacccttaaaacagatgcaacgactgccatcatcaagttacttgaagaaatctgtaatcttggaagggaccccaaatacatctgtcagaagccatcaatccagaaggcagatggcactgccactgctcctcccccaaggtctaatcatgccgcagaagaagcctctagtgaggatgaggaggaagaggaagtacaggccatgcagagctttaattctacccagcaaaatgaaactgagcctaatcagcaggttgttggtacagaggaacgtattcctattcccctcatggattacatccttaatgtgatgaaatttgtggaatctattctgagcaacaatacaacagatgaccactgccaggaatttgtgaatcagaaaggactgttgcctttggttaccattttgggtcttcccaatctgcccattgactttcccacatctgctgcctgtcaggctgttgcaggtgtctgcaaatccatattgacactgtcacatgaacccaaagtccttcaagagggtctccttcagttggactccatcctctcctccctggagcccttacaccgccccattgaatcccctgggggctcagtgttgttgcgagaactggcttgcgcaggcaatgttgctgatgctaccctctcagcccaggccacacctctgctgcatgcactcactgctgcccatgcctacatcatgatgtttgttcatacttgcagagttggacagagtgaaattcgttccatctccgtaaaccagtggggctctcaattgggtctgagtgttttgagcaagctgagccagttatactgttccctggtgtgggaaagcactgtcctcctctctctgtgtaccccaaacagcctaccatctgggtgtgaatttggccaggcagatatgcagaaactggttccaaaggatgagaaggcaggtacgacccagggcggaaaaagatcagatggggaacaggatggagcagctggaagtatggatgcttctacccagggcttattagaaggcattgggctagatggtgacacattggctcccatggagacagatgaacctactgcttcagactctaagggcaaatctaaaatcacaccagcaatggctgccagaattaagcaaatcaagcctttgttatcagcttcctccagattaggccgagcacttgctgagctatttggacttcttgttaaactttgtgtgggatctcctgtccgccagagaaggagccatcatgctgccagcaccactacagcaccgacacctgccgcgcgatcaacagcctcagctctcactaagctcttgactaaggggttatcttggcagcccccaccatatacacctactccccgattcaggctgacattcttcatctgttcagttggtttcacatccccaatgctgtttgatgagaggaagtatccctaccacctcatgctgcaaaaatttctctgctccggaggccacaatgctctttttgaaactttcaactgggctctgtccatgggaggtaaagttcctgtttctgagggattggaacactcagacttgcctgatggcacaggagaattcctagatgcctggcttatgctggtggagaagatggtgaatcccaccacggtgcttgaatctccacattcgctgcctgccaaattgcctggaggtgtccagaactttccccagttcagtgcactgcgcttccttgtggtaactcagaaagcagcctttacttgcatcaaaaacttatggaaccggaaacccctgaaggtatatggtggacgaatggctgaatcgatgctggccattctatgccacatcctccgaggagaacctgtgattcgagagagactaagcaaggagaaggaggggtctcgaggagaagaggatacagggcaagaggaaggtggctcccgccgggaacctcaagtcaaccagcaacaactgcaacagctcatggacatgggcttcacaagggaacatgcaatggaggcactgttgaacaccagcaccatggagcaggccacagagtaccttttaacccaccctcctccaatcatgggaggagttgttcgggatctcagcatgtctgaagaggaccagatgatgagagcaattgctatgtctctgggacaggatattccaatggatcaaagggcagagtcacctgaggaagttgcttgccggaaggaggaagaggaacggaaagctcgggaaaagcaggaggaggaagaggctaaatgtctagagaagttccaggatgctgacccgttggaacaagatgagctccacactttcacagatactatgttgccaggctgcttccaccttcttgatgagctgccagacacagtataccgtgtgtgtgacctgatcatgacagcaatcaaacgtaatggagcagattatcgtgacatgattctgaagcaagtagtcaatcaggtgtgggaagctgctgatgtattgatcaaagctgctcttcccctgacaacaagtgacacaaaaaccgtgtcagagtggataagtcagatggccacactgccccaggcctccaatttggctactagaatcttgcttttaacgctactttttgaggagttgaagctaccttgtgcttgggtggttgaatcaagtggcatccttaatgtcctaatcaaactcttggaagtggttcagccctgcctccaggcagccaaggagcagaaggaagtccagaccccaaagtggatcacaccagtgttgctcctgattgatttctatgaaaagacagccatctcctcaaaaaggagagcccagatgactaagtacctgcaatccaacagcaacaactggcgctggtttgatgatcgctctgggcgttggtgtagttacagtgcaagcaacaatagcactattgattctgcctggaaatctggagagacaagcgtgcgattcactgcaggccgaagaagatacacggtccaattcactacaatggtgcaggttaatgaggaaacagggaaccgacgccctgtgatgctgactctcctcagggtacctcggctgaataaaaattcaaaaaacagcaatggacaggaactagagaagacgctggaagaaagcaaagaaatggatatcaaacgtaaagaaaataaaggcaatgatacccctttggccctagagagtacaaacactgaaaaggagacaagcctggaggaaacaaaaatcggggagatcctgatccagggcttgacagaagatatggtgactgttttaatccgggcctgcgtgagcatgctgggagtccctgtggacccagatactttgcatgccacccttcgtctctgtctgaggctcacccgggaccacaaatatgccatgatgtttgcagaactgaagagtacccgcatgatcttgaatttgacccagagctcaggcttcaatgggtttactcccctggtcacccttctcttaagacacatcattgaggacccctgtacccttcgtcataccatggaaaaggttgttcgctcagcagctacaagtggagctggtagcactacctctggtgttgtgtctggcagcctcggctctcgggagatcaactacatccttcgtgtccttgggccagccgcatgccgcaatccagacatattcacagaagtggccaactgctgtatccgcatcgcccttcctgcccctcgaggctcaggaactgcttcagatgatgaatttgagaatcttagaattaaaggccctaatgctgtacagctggtgaagaccacccctttgaagccctcacctctgcctgtcatccctgatactatcaaggaagtgatctatgatatgctgaatgctctggctgcataccatgctccagaggaagcagataaatctgatcctaaacctggggttatgacccaagaggttggccagctcctgcaagacatgggtgatgatgtataccagcagtaccggtcacttacgcgtcagagcagtgactttgatacgcagtcaggtttttccattaatagtcaggtctttgctgcagatggtgcctccactgagacttccgcatctgggacctcccaaggagaggcttcaactccagaggagtctcgagatgggaagaaagataaagaaggggaccgggcctctgaggaaggcaaacagaaaggcaagggcagcaaacctttaatgcctacctccactatccttcgtcttctggcagagttggtgaggtcctatgttggtattgctaccctgattgccaactacagctacactgtgggccagtctgaactgatcaaagaggactgcagtgtgctagcttttgttctggaccacctgctcccacatacccagaatgcagaagacaaggacacccctgccttggcccgcctgttcctcgcaagcctggctgctgcagggagtggcacagatgcccaggtggccctagtgaatgaagtaaaagcagcccttggacgggcactggctatggctgagagtacagagaaacatgccaggcttcaggcagtgatgtgtatcatcagtactatcatggagtcctgcccctccacctccagcttctacagcagtgccacagcgaagacccagcacaatggcatgaacaacatcattcggcttttcctgaagaagggactggttaatgacctggccagagtacctcacagcttagacctgtccagtcccaacatggccaacacagtcaatgctgctctgaagcctttggaaacactttcccggattgtgaaccagcccagtagcctttttggcagcaagagtgcttctagcaagaacaagtctgagcaggatgcccaaggagcctctcaagattccagtagcaaccagcaggacccaggcgagcctggggaagcagaagtgcaggaggaggatcatgatgtcactcagacagaggtggcagatggggatatcatggatggggaggctgaaaccgactcagtggtgattgctgggcagcctgaggtgctcagttcacaagagatgcaggttgagaatgagctggaggacctgatagatgagttgcttgagagggatggcggatctgggaacagtacaattatagtgagcagaagtggagaggatgaatcacaagaggacgtgctgatggatgaagctccttccaacctcagccaagcttccaccttgcaggccaaccgagaagattccatgaatatcctggaccctgaggatgaggaggagcacactcaggaagaggacagcagtggcagtaacgaggatgaggatgatagtcaggatgaagaggaggaggaggaggaagatgaggaagatgatcaggaggatgatgaaggtgaagagggagatgaagacgatgacgacgatggctctgagatggaattggatgaggattatcctgatatgaacgcttctcccttggtccgatttgagcgctttgaccgggaggatgatctcatcattgagtttgacaacatgttctccagtgctacagacatccccccatccccaggaaatatccctaccacccatccactgatggtgcgccatgcagaccacagttctctgacactgggcagtggctcttcaacaactcgtctcacccagggcatcgggcgcagtcagaggaccctaaggcagctgacggccaatactggccacaccattcatgttcactaccctgggaatcgccagcccaaccctcctcttatactgcagaggttgcttggtccctcagctgctgctgacatccttcagctgagcagcagccttcccctacaaagccggggtcgggcccgcctcctggtaggcaacgatgacgtccacatcatcgcccgttctgatgatgagctgctggatgactttttccatgatcagagcacagctaccagccaagcaggaaccctgtccagcatccccacagccctgacccgctggacagaagaatgcaaagttctcgatgctgagagcatgcatgactgtgtttcagtggttaaagtgtccattgtcaatcacctggaattcctgagggatgaggagctggaagaaaggcgagagaagcgcaggaaacaactggctgaggaagaaacaaagataactgataaaggcaaagaagataaggagaacagggatcagagtgcacagtgtactgcatctaagtcaaatgactccactgaacagaatctctcagatgggacgcctatgcctgacagctacccaacaaccccatcttcaactgatgcagctacatctgagtccaaggagacccttggcactctgcaatcctcacaacagcaaccaacactcccaaccccaccagctttgggagaggttcctcaggagctgcagtctccagctggagaagggggcagctctacacagctattgatgcctgtagagccagaggaattgggtcccacaaggccaagtggggaagcagaaacaactcagatggagttatccccagctcccactataacctcactttccccagagagagctgaggattctgatgcactgacggctgtcagcagtcagctagaaggctctcctatggatacaagcagcctggcttcctgtaccttagaggaggctgtgggtgacacttcagcagctggcagttctgagcagcccagagcaggcagctccactcctggggatgccccaccagctgtggcggaagtgcaaggcaggagtgatgggtcaggggaatctgcccagccacctgaggacagctccccacctgcatcctctgagagctcttccaccagagattctgccgtggccatttctggagcagattcccgaggaatcctagaagagccgttgccttcaacaagcagtgaagaagaagatccccttgcgggtatcagtctccctgaaggtgtggacccctcttttctggctgccctgcctgatgacatccgtcgggaagttctacagaaccagctaggcattcgtccaccaacccggactgccccctccacaaatagctcagcgcctgcagtggtggggaatcctggtgtgactgaagtgagccctgagtttctggctgccctgcctccagccattcaggaggaagtactggcacagcagagagctgagcagcagcgacgagaactagcacagaatgccagctcagacacccctatggaccctgtgaccttcatccagactctgccctcagacctgcgccgtagtgtcctagaggatatggaggacagtgtgttagctgtgatgccacctgacattgcagctgaggctcaagccctgagacgagagcaagaagcccggcagcgacagctcatgcatgagcgtctgtttgggcacagtagcacctccgcactctctgctattctccgaagcccggctttcaccagtcgcttaagtggcaaccgtggggtccagtatactcgccttgctgtgcagagaggtggcaccttccagatggggggtagcagcagccataacaggccttctggcagtaatgtagatactctcctccgcctccgaggacggctccttctggaccacgaagccctttcttgtctcttggtcctactttttgtggatgagccaaagctcaatactagccgtctacaccgagtactgagaaatctctgctaccatgcccagacccgccactgggtcatccgcagtctgctctccatcttgcagcgcagcagtgagagtgagctatgcattgaaacacccaaactcactacaagtgaggaaaagggcaaaaagtcgagcaagagctgtgggtcaagtagccatgagaaccgtcccctggacctgctacacaagatggagtcaaagagctccaaccagctttcctggctctcagtatccatggatgcagccctaggctgcaggactaatatatttcagatccagcgttcaggggggcgtaaacataccgagaagcatgcaagcggtggctccaccgtccacatccatccccaagctgctcctgttgtctgcagacacgttttggatacactcattcaattggccaaggtatttcccagccacttcacacagcagcggaccaaagaaacaaactgtgagagtgatcgggaaaggggcaataaggcctgtagcccatgctcctcacagtcctccagcagtggcatttgcacagacttctgggacttattggtaaaactggacaacatgaatgtcagccggaaaggcaagaactccgtgaagtcagtgccagtgagcgctggcggtgagggggaaacctctccatacagcctcgaggcctctccactggggcagctcatgaacatgttgtcacacccagtcatccgccggagctctctcttaactgagaaactcctcagactcctttctctcatctcaattgctctcccagaaaacaaggtgtcagaagcacaggctaattctggcagcggtgcttcctccaccaccactgccacctcaaccacatctaccaccaccaccactgccgcctccaccacgcccacaccccctactgcacccacccctgtcacttctgctccagccctggttgctgccacggctatttccaccattgtcgtagctgcttcgaccacagtgactacccccacgactgctaccactactgtttcaatttctcccactactaagggcagcaaatctccagcgaaggtgagtgatgggggcagcagcagtacagactttaagatggtgtcctctggcctcactgaaaaccagctacagctctctgtagaggtgttgacatcccactcttgttctgaggaaggcttagaggatgcagccaacgtactactgcagctctcccggggggactctgggacccgggacactgttctcaagctgctactgaatggagcccgccatctgggttataccctttgtaaacaaataggtaccctgctggccgagctgcgggaatacaacctcgagcagcagcggcgagcccaatgtgaaaccctctctcctgatggcctgcctgaggagcagccacagaccaccaagctgaagggcaaaatgcagagcaggtttgacatggctgagaatgtggtaattgtggcatctcagaagcgacctttgggtggccgggagctccagctgccttctatgtccatgttgacatccaagacatctacccagaagttcttcttgagggtactacaggtcatcatccagctccgggacgacacgcgccgggctaacaagaaagccaagcagacaggcaggctaggttcctccggtttaggctcagctagcagcatccaggcagctgttcggcagctggaggctgaggctgatgccattatacaaatgtcggagtctagccagtcagaggcgtctgtccggagggaggaatcacccatggatgtggaccagccatctcccagtgctcaagatactcaatccattgcctccgatggaaccccacagggggagaaggaaaaggaagaaagagaggaggaccttgcagctgtggaaggctccttggagcctcctttgtgggagggtatcagttctggttctgccagagcctcagccctggtagcagaacctcagggctgcccctctccccaaactcctcccagcaaggctgaccctttgagctcactcc

SEQ ID NO: 466991 - DNA, 8562 bp, Homo sapiens
  misc_feature (8552)..(8552): n is a, c, g, or t
ctgcatccaacctggggagtgctgtcgatgagctcatgagacatcagcccacccttaaaacagatgcaacgactgccatcatcaagttacttgaagaaatctgtaatcttggaagggaccccaaatacatctgtcagaagccatcaatccagaaggcagatggcactgccactgctcctcccccaaggtctaatcatgccgcagaagaagcctctagtgaggatgaggaggaagaggaagtacaggccatgcagagctttaattctacccagcaaaatgaaactgagcctaatcagcaggttgttggtacagaggaacgtattcctattcccctcatggattacatccttaatgtgatgaaatttgtggaatctattctgagcaacaatacaacagatgaccactgccaggaatttgtgaatcagaaaggactgttgcctttggttaccattttgggtcttcccaatctgcccattgactttcccacatctgctgcctgtcaggctgttgcaggtgtctgcaaatccatattgacactgtcacatgaacccaaagtccttcaagagggtctccttcagttggactccatcctctcctccctggagcccttacaccgccccattgaatcccctgggggctcagtgttgttgcgagaactggcttgcgcaggcaatgttgctgatgctaccctctcagcccaggccacacctctgctgcatgcactcactgctgcccatgcctacatcatgatgtttgttcatacttgcagagttggacagagtgaaattcgttccatctccgtaaaccagtggggctctcaattgggtctgagtgttttgagcaagctgagccagttatactgttccctggtgtgggaaagcactgtcctcctctctctgtgtaccccaaacagcctaccatctgggtgtgaatttggccaggcagatatgcagaaactggttccaaaggatgagaaggcaggtacgacccagggcggaaaaagatcagatggggaacaggatggagcagctggaagtatggatgcttctacccagggcttattagaaggcattgggctagatggtgacacattggctcccatggagacagatgaacctactgcttcagactctaagggcaaatctaaaatcacaccagcaatggctgccagaattaagcaaatcaagcctttgttatcagcttcctccagattaggccgagcacttgctgagctatttggacttcttgttaaactttgtgtgggatctcctgtccgccagagaaggagccatcatgctgccagcaccactacagcaccgacacctgccgcgcgatcaacagcctcagctctcactaagctcttgactaaggggttatcttggcagcccccaccatatacacctactccccgattcaggctgacattcttcatctgttcagttggtttcacatccccaatgctgtttgatgagaggaagtatccctaccacctcatgctgcaaaaatttctctgctccggaggccacaatgctctttttgaaactttcaactgggctctgtccatgggaggtaaagttcctgtttctgagggattggaacactcagacttgcctgatggcacaggagaattcctagatgcctggcttatgctggtggagaagatggtgaatcccaccacggtgcttgaatctccacattcgctgcctgccaaattgcctggaggtgtccagaactttccccagttcagtgcactgcgcttccttgtggtaactcagaaagcagcctttacttgcatcaaaaacttatggaaccggaaacccctgaaggtatatggtggacgaatggctgaatcgatgctggccattctatgccacatcctccgaggagaacctgtgattcgagagagactaagcaaggagaaggaggggtctcgaggagaagaggatacagggcaagaggaaggtggctcccgccgggaacctcaagtcaaccagcaacaactgcaacagctcatggacatgggcttcacaagggaacatgcaatggaggcactgttgaacaccagcaccatggagcaggccacagagtaccttttaacccaccctcctccaatcatgggaggagttgttcgggatctcagcatgtctgaagaggaccagatgatgagagcaattgctatgtctctgggacaggatattccaatggatcaaagggcagagtcacctgaggaagttgcttgccggaaggaggaagaggaacggaaagctcgggaaaagcaggaggaggaagaggctaaatgtctagagaagttccaggatgctgacccgttggaacaagatgagctccacactttcacagatactatgttgccaggctgcttccaccttcttgatgagctgccagacacagtataccgtgtgtgtgacctgatcatgacagcaatcaaacgtaatggagcagattatcgtgacatgattctgaagcaagtagtcaatcaggtgtgggaagctgctgatgtattgatcaaagctgctcttcccctgacaacaagtgacacaaaaaccgtgtcagagtggataagtcagatggccacactgccccaggcctccaatttggctactagaatcttgcttttaacgctactttttgaggagttgaagctaccttgtgcttgggtggttgaatcaagtggcatccttaatgtcctaatcaaactcttggaagtggttcagccctgcctccaggcagccaaggagcagaaggaagtccagaccccaaagtggatcacaccagtgttgctcctgattgatttctatgaaaagacagccatctcctcaaaaaggagagcccagatgactaagtacctgcaatccaacagcaacaactggcgctggtttgatgatcgctctgggcgttggtgtagttacagtgcaagcaacaatagcactattgattctgcctggaaatctggagagacaagcgtgcgattcactgcaggccgaagaagatacacggtccaattcactacaatggtgcaggttaatgaggaaacagggaaccgacgccctgtgatgctgactctcctcagggtacctcggctgaataaaaattcaaaaaacagcaatggacaggaactagagaagacgctggaagaaagcaaagaaatggatatcaaacgtaaagaaaataaaggcaatgatacccctttggccctagagagtacaaacactgaaaaggagacaagcctggaggaaacaaaaatcggggagatcctgatccagggcttgacagaagatatggtgactgttttaatccgggcctgcgtgagcatgctgggagtccctgtggacccagatactttgcatgccacccttcgtctctgtctgaggctcacccgggaccacaaatatgccatgatgtttgcagaactgaagagtacccgcatgatcttgaatttgacccagagctcaggcttcaatgggtttactcccctggtcacccttctcttaagacacatcattgaggacccctgtacccttcgtcataccatggaaaaggttgttcgctcagcagctacaagtggagctggtagcactacctctggtgttgtgtctggcagcctcggctctcgggagatcaactacatccttcgtgtccttgggccagccgcatgccgcaatccagacatattcacagaagtggccaactgctgtatccgcatcgcccttcctgcccctcgaggctcaggaactgcttcagatgatgaatttgagaatcttagaattaaaggccctaatgctgtacagctggtgaagaccacccctttgaagccctcacctctgcctgtcatccctgatactatcaaggaagtgatctatgatatgctgaatgctctggctgcataccatgctccagaggaagcagataaatctgatcctaaacctggggttatgacccaagaggttggccagctcctgcaagacatgggtgatgatgtataccagcagtaccggtcacttacgcgtcagagcagtgactttgatacgcagtcaggtttttccattaatagtcaggtctttgctgcagatggtgcctccactgagacttccgcatctgggacctcccaaggagaggcttcaactccagaggagtctcgagatgggaagaaagataaagaaggggaccgggcctctgaggaaggcaaacagaaaggcaagggcagcaaacctttaatgcctacctccactatccttcgtcttctggcagagttggtgaggtcctatgttggtattgctaccctgattgccaactacagctacactgtgggccagtctgaactgatcaaagaggactgcagtgtgctagcttttgttctggaccacctgctcccacatacccagaatgcagaagacaaggacacccctgccttggcccgcctgttcctcgcaagcctggctgctgcagggagtggcacagatgcccaggtggccctagtgaatgaagtaaaagcagcccttggacgggcactggctatggctgagagtacagagaaacatgccaggcttcaggcagtgatgtgtatcatcagtactatcatggagtcctgcccctccacctccagcttctacagcagtgccacagcgaagacccagcacaatggcatgaacaacatcattcggcttttcctgaagaagggactggttaatgacctggccagagtacctcacagcttagacctgtccagtcccaacatggccaacacagtcaatgctgctctgaagcctttggaaacactttcccggattgtgaaccagcccagtagcctttttggcagcaagagtgcttctagcaagaacaagtctgagcaggatgcccaaggagcctctcaagattccagtagcaaccagcaggacccaggcgagcctggggaagcagaagtgcaggaggaggatcatgatgtcactcagacagaggtggcagatggggatatcatggatggggaggctgaaaccgactcagtggtgattgctgggcagcctgaggtgctcagttcacaagagatgcaggttgagaatgagctggaggacctgatagatgagttgcttgagagggatggcggatctgggaacagtacaattatagtgagcagaagtggagaggatgaatcacaagaggacgtgctgatggatgaagctccttccaacctcagccaagcttccaccttgcaggccaaccgagaagattccatgaatatcctggaccctgaggatgaggaggagcacactcaggaagaggacagcagtggcagtaacgaggatgaggatgatagtcaggatgaagaggaggaggaggaggaagatgaggaagatgatcaggaggatgatgaaggtgaagagggagatgaagacgatgacgacgatggctctgagatggaattggatgaggattatcctgatatgaacgcttctcccttggtccgatttgagcgctttgaccgggaggatgatctcatcattgagtttgacaacatgttctccagtgctacagacatccccccatccccaggaaatatccctaccacccatccactgatggtgcgccatgcagaccacagttctctgacactgggcagtggctcttcaacaactcgtctcacccagggcatcgggcgcagtcagaggaccctaaggcagctgacggccaatactggccacaccattcatgttcactaccctgggaatcgccagcccaaccctcctcttatactgcagaggttgcttggtccctcagctgctgctgacatccttcagctgagcagcagccttcccctacaaagccggggtcgggcccgcctcctggtaggcaacgatgacgtccacatcatcgcccgttctgatgatgagctgctggatgactttttccatgatcagagcacagctaccagccaagcaggaaccctgtccagcatccccacagccctgacccgctggacagaagaatgcaaagttctcgatgctgagagcatgcatgactgtgtttcagtggttaaagtgtccattgtcaatcacctggaattcctgagggatgaggagctggaagaaaggcgagagaagcgcaggaaacaactggctgaggaagaaacaaagataactgataaaggcaaagaagataaggagaacagggatcagagtgcacagtgtactgcatctaagtcaaatgactccactgaacagaatctctcagatgggacgcctatgcctgacagctacccaacaaccccatcttcaactgatgcagctacatctgagtccaaggagacccttggcactctgcaatcctcacaacagcaaccaacactcccaaccccaccagctttgggagaggttcctcaggagctgcagtctccagctggagaagggggcagctctacacagctattgatgcctgtagagccagaggaattgggtcccacaaggccaagtggggaagcagaaacaactcagatggagttatccccagctcccactataacctcactttccccagagagagctgaggattctgatgcactgacggctgtcagcagtcagctagaaggctctcctatggatacaagcagcctggcttcctgtaccttagaggaggctgtgggtgacacttcagcagctggcagttctgagcagcccagagcaggcagctccactcctggggatgccccaccagctgtggcggaagtgcaaggcaggagtgatgggtcaggggaatctgcccagccacctgaggacagctccccacctgcatcctctgagagctcttccaccagagattctgccgtggccatttctggagcagattcccgaggaatcctagaagagccgttgccttcaacaagcagtgaagaagaagatccccttgcgggtatcagtctccctgaaggtgtggacccctcttttctggctgccctgcctgatgacatccgtcgggaagttctacagaaccagctaggcattcgtccaccaacccggactgccccctccacaaatagctcagcgcctgcagtggtggggaatcctggtgtgactgaagtgagccctgagtttctggctgccctgcctccagccattcaggaggaagtactggcacagcagagagctgagcagcagcgacgagaactagcacagaatgccagctcagacacccctatggaccctgtgaccttcatccagactctgccctcagacctgcgccgtagtgtcctagaggatatggaggacagtgtgttagctgtgatgccacctgacattgcagctgaggctcaagccctgagacgagagcaagaagcccggcagcgacagctcatgcatgagcgtctgtttgggcacagtagcacctccgcactctctgctattctccgaagcccggctttcaccagtcgcttaagtggcaaccgtggggtccagtatactcgccttgctgtgcagagaggtggcaccttccagatggggggtagcagcagccataacaggccttctggcagtaatgtagatactctcctccgcctccgaggacggctccttctggaccacgaagccctttcttgtctcttggtcctactttttgtggatgagccaaagctcaatactagccgtctacaccgagtactgagaaatctctgctaccatgcccagacccgccactgggtcatccgcagtctgctctccatcttgcagcgcagcagtgagagtgagctatgcattgaaacacccaaactcactacaagtgaggaaaagggcaaaaagtcgagcaagagctgtgggtcaagtagccatgagaaccgtcccctggacctgctacacaagatggagtcaaagagctccaaccagctttcctggctctcagtatccatggatgcagccctaggctgcaggactaatatatttcagatccagcgttcaggggggcgtaaacataccgagaagcatgcaagcggtggctccaccgtccacatccatccccaagctgctcctgttgtctgcagacacgttttggatacactcattcaattggccaaggtatttcccagccacttcacacagcagcggaccaaagaaacaaactgtgagagtgatcgggaaaggggcaataaggcctgtagcccatgctcctcacagtcctccagcagtggcatttgcacagacttctgggacttattggtaaaactggacaacatgaatgtcagccggaaaggcaagaactccgtgaagtcagtgccagtgagcgctggcggtgagggggaaacctctccatacagcctcgaggcctctccactggggcagctcatgaacatgttgtcacacccagtcatccgccggagctctctcttaactgagaaactcctcagactcctttctctcatctcaattgctctcccagaaaacaaggtgtcagaagcacaggctaattctggcagcggtgcttcctccaccaccactgccacctcaaccacatctaccaccaccaccactgccgccagaccccatccccagatcctntagagtacct

SEQ ID NO: 466992 - DNA, 8723 bp, Homo sapiens
ctgcatccaacctggggagtgctgtcgatgagctcatgagacatcagcccacccttaaaacagatgcaacgactgccatcatcaagttacttgaagaaatctgtaatcttggaagggaccccaaatacatctgtcagaagccatcaatccagaaggcagatggcactgccactgctcctcccccaaggtctaatcatgccgcagaagaagcctctagtgaggatgaggaggaagaggaagtacaggccatgcagagctttaattctacccagcaaaatgaaactgagcctaatcagcaggttgttggtacagaggaacgtattcctattcccctcatggattacatccttaatgtgatgaaatttgtggaatctattctgagcaacaatacaacagatgaccactgccaggaatttgtgaatcagaaaggactgttgcctttggttaccattttgggtcttcccaatctgcccattgactttcccacatctgctgcctgtcaggctgttgcaggtgtctgcaaatccatattgacactgtcacatgaacccaaagtccttcaagagggtctccttcagttggactccatcctctcctccctggagcccttacaccgccccattgaatcccctgggggctcagtgttgttgcgagaactggcttgcgcaggcaatgttgctgatgctaccctctcagcccaggccacacctctgctgcatgcactcactgctgcccatgcctacatcatgatgtttgttcatacttgcagagttggacagagtgaaattcgttccatctccgtaaaccagtggggctctcaattgggtctgagtgttttgagcaagctgagccagttatactgttccctggtgtgggaaagcactgtcctcctctctctgtgtaccccaaacagcctaccatctgggtgtgaatttggccaggcagatatgcagaaactggttccaaaggatgagaaggcaggtacgacccagggcggaaaaagatcagatggggaacaggatggagcagctggaagtatggatgcttctacccagggcttattagaaggcattgggctagatggtgacacattggctcccatggagacagatgaacctactgcttcagactctaagggcaaatctaaaatcacaccagcaatggctgccagaattaagcaaatcaagcctttgttatcagcttcctccagattaggccgagcacttgctgagctatttggacttcttgttaaactttgtgtgggatctcctgtccgccagagaaggagccatcatgctgccagcaccactacagcaccgacacctgccgcgcgatcaacagcctcagctctcactaagctcttgactaaggggttatcttggcagcccccaccatatacacctactccccgattcaggctgacattcttcatctgttcagttggtttcacatccccaatgctgtttgatgagaggaagtatccctaccacctcatgctgcaaaaatttctctgctccggaggccacaatgctctttttgaaactttcaactgggctctgtccatgggaggtaaagttcctgtttctgagggattggaacactcagacttgcctgatggcacaggagaattcctagatgcctggcttatgctggtggagaagatggtgaatcccaccacggtgcttgaatctccacattcgctgcctgccaaattgcctggaggtgtccagaactttccccagttcagtgcactgcgcttccttgtggtaactcagaaagcagcctttacttgcatcaaaaacttatggaaccggaaacccctgaaggtatatggtggacgaatggctgaatcgatgctggccattctatgccacatcctccgaggagaacctgtgattcgagagagactaagcaaggagaaggaggggtctcgaggagaagaggatacagggcaagaggaaggtggctcccgccgggaacctcaagtcaaccagcaacaactgcaacagctcatggacatgggcttcacaagggaacatgcaatggaggcactgttgaacaccagcaccatggagcaggccacagagtaccttttaacccaccctcctccaatcatgggaggagttgttcgggatctcagcatgtctgaagaggaccagatgatgagagcaattgctatgtctctgggacaggatattccaatggatcaaagggcagagtcacctgaggaagttgcttgccggaaggaggaagaggaacggaaagctcgggaaaagcaggaggaggaagaggctaaatgtctagagaagttccaggatgctgacccgttggaacaagatgagctccacactttcacagatactatgttgccaggctgcttccaccttcttgatgagctgccagacacagtataccgtgtgtgtgacctgatcatgacagcaatcaaacgtaatggagcagattatcgtgacatgattctgaagcaagtagtcaatcaggtgtgggaagctgctgatgtattgatcaaagctgctcttcccctgacaacaagtgacacaaaaaccgtgtcagagtggataagtcagatggccacactgccccaggcctccaatttggctactagaatcttgcttttaacgctactttttgaggagttgaagctaccttgtgcttgggtggttgaatcaagtggcatccttaatgtcctaatcaaactcttggaagtggttcagccctgcctccaggcagccaaggagcagaaggaagtccagaccccaaagtggatcacaccagtgttgctcctgattgatttctatgaaaagacagccatctcctcaaaaaggagagcccagatgactaagtacctgcaatccaacagcaacaactggcgctggtttgatgatcgctctgggcgttggtgtagttacagtgcaagcaacaatagcactattgattctgcctggaaatctggagagacaagcgtgcgattcactgcaggccgaagaagatacacggtccaattcactacaatggtgcaggttaatgaggaaacagggaaccgacgccctgtgatgctgactctcctcagggtacctcggctgaataaaaattcaaaaaacagcaatggacaggaactagagaagacgctggaagaaagcaaagaaatggatatcaaacgtaaagaaaataaaggcaatgatacccctttggccctagagagtacaaacactgaaaaggagacaagcctggaggaaacaaaaatcggggagatcctgatccagggcttgacagaagatatggtgactgttttaatccgggcctgcgtgagcatgctgggagtccctgtggacccagatactttgcatgccacccttcgtctctgtctgaggctcacccgggaccacaaatatgccatgatgtttgcagaactgaagagtacccgcatgatcttgaatttgacccagagctcaggcttcaatgggtttactcccctggtcacccttctcttaagacacatcattgaggacccctgtacccttcgtcataccatggaaaaggttgttcgctcagcagctacaagtggagctggtagcactacctctggtgttgtgtctggcagcctcggctctcgggagatcaactacatccttcgtgtccttgggccagccgcatgccgcaatccagacatattcacagaagtggccaactgctgtatccgcatcgcccttcctgcccctcgaggctcaggaactgcttcagatgatgaatttgagaatcttagaattaaaggccctaatgctgtacagctggtgaagaccacccctttgaagccctcacctctgcctgtcatccctgatactatcaaggaagtgatctatgatatgctgaatgctctggctgcataccatgctccagaggaagcagataaatctgatcctaaacctggggttatgacccaagaggttggccagctcctgcaagacatgggtgatgatgtataccagcagtaccggtcacttacgcgtcagagcagtgactttgatacgcagtcaggtttttccattaatagtcaggtctttgctgcagatggtgcctccactgagacttccgcatctgggacctcccaaggagaggcttcaactccagaggagtctcgagatgggaagaaagataaagaaggggaccgggcctctgaggaaggcaaacagaaaggcaagggcagcaaacctttaatgcctacctccactatccttcgtcttctggcagagttggtgaggtcctatgttggtattgctaccctgattgccaactacagctacactgtgggccagtctgaactgatcaaagaggactgcagtgtgctagcttttgttctggaccacctgctcccacatacccagaatgcagaagacaaggacacccctgccttggcccgcctgttcctcgcaagcctggctgctgcagggagtggcacagatgcccaggtggccctagtgaatgaagtaaaagcagcccttggacgggcactggctatggctgagagtacagagaaacatgccaggcttcaggcagtgatgtgtatcatcagtactatcatggagtcctgcccctccacctccagcttctacagcagtgccacagcgaagacccagcacaatggcatgaacaacatcattcggcttttcctgaagaagggactggttaatgacctggccagagtacctcacagcttagacctgtccagtcccaacatggccaacacagtcaatgctgctctgaagcctttggaaacactttcccggattgtgaaccagcccagtagcctttttggcagcaagagtgcttctagcaagaacaagtctgagcaggatgcccaaggagcctctcaagattccagtagcaaccagcaggacccaggcgagcctggggaagcagaagtgcaggaggaggatcatgatgtcactcagacagaggtggcagatggggatatcatggatggggaggctgaaaccgactcagtggtgattgctgggcagcctgaggtgctcagttcacaagagatgcaggttgagaatgagctggaggacctgatagatgagttgcttgagagggatggcggatctgggaacagtacaattatagtgagcagaagtggagaggatgaatcacaagaggacgtgctgatggatgaagctccttccaacctcagccaagcttccaccttgcaggccaaccgagaagattccatgaatatcctggaccctgaggatgaggaggagcacactcaggaagaggacagcagtggcagtaacgaggatgaggatgatagtcaggatgaagaggaggaggaggaggaagatgaggaagatgatcaggaggatgatgaaggtgaagagggagatgaagacgatgacgacgatggctctgagatggaattggatgaggattatcctgatatgaacgcttctcccttggtccgatttgagcgctttgaccgggaggatgatctcatcattgagtttgacaacatgttctccagtgctacagacatccccccatccccaggaaatatccctaccacccatccactgatggtgcgccatgcagaccacagttctctgacactgggcagtggctcttcaacaactcgtctcacccagggcatcgggcgcagtcagaggaccctaaggcagctgacggccaatactggccacaccattcatgttcactaccctgggaatcgccagcccaaccctcctcttatactgcagaggttgcttggtccctcagctgctgctgacatccttcagctgagcagcagccttcccctacaaagccggggtcgggcccgcctcctggtaggcaacgatgacgtccacatcatcgcccgttctgatgatgagctgctggatgactttttccatgatcagagcacagctaccagccaagcaggaaccctgtccagcatccccacagccctgacccgctggacagaagaatgcaaagttctcgatgctgagagcatgcatgactgtgtttcagtggttaaagtgtccattgtcaatcacctggaattcctgagggatgaggagctggaagaaaggcgagagaagcgcaggaaacaactggctgaggaagaaacaaagataactgataaaggcaaagaagataaggagaacagggatcagagtgcacagtgtactgcatctaagtcaaatgactccactgaacagaatctctcagatgggacgcctatgcctgacagctacccaacaaccccatcttcaactgatgcagctacatctgagtccaaggagacccttggcactctgcaatcctcacaacagcaaccaacactcccaaccccaccagctttgggagaggttcctcaggagctgcagtctccagctggagaagggggcagctctacacagctattgatgcctgtagagccagaggaattgggtcccacaaggccaagtggggaagcagaaacaactcagatggagttatccccagctcccactataacctcactttccccagagagagctgaggattctgatgcactgacggctgtcagcagtcagctagaaggctctcctatggatacaagcagcctggcttcctgtaccttagaggaggctgtgggtgacacttcagcagctggcagttctgagcagcccagagcaggcagctccactcctggggatgccccaccagctgtggcggaagtgcaaggcaggagtgatgggtcaggggaatctgcccagccacctgaggacagctccccacctgcatcctctgagagctcttccaccagagattctgccgtggccatttctggagcagattcccgaggaatcctagaagagccgttgccttcaacaagcagtgaagaagaagatccccttgcgggtatcagtctccctgaaggtgtggacccctcttttctggctgccctgcctgatgacatccgtcgggaagttctacagaaccagctaggcattcgtccaccaacccggactgccccctccacaaatagctcagcgcctgcagtggtggggaatcctggtgtgactgaagtgagccctgagtttctggctgccctgcctccagccattcaggaggaagtactggcacagcagagagctgagcagcagcgacgagaactagcacagaatgccagctcagacacccctatggaccctgtgaccttcatccagactctgccctcagacctgcgccgtagtgtcctagaggatatggaggacagtgtgttagctgtgatgccacctgacattgcagctgaggctcaagccctgagacgagagcaagaagcccggcagcgacagctcatgcatgagcgtctgtttgggcacagtagcacctccgcactctctgctattctccgaagcccggctttcaccagtcgcttaagtggcaaccgtggggtccagtatactcgccttgctgtgcagagaggtggcaccttccagatggggggtagcagcagccataacaggccttctggcagtaatgtagatactctcctccgcctccgaggacggctccttctggaccacgaagccctttcttgtctcttggtcctactttttgtggatgagccaaagctcaatactagccgtctacaccgagtactgagaaatctctgctaccatgcccagacccgccactgggtcatccgcagtctgctctccatcttgcagcgcagcagtgagagtgagctatgcattgaaacacccaaactcactacaagtgaggaaaagggcaaaaagtcgagcaagagctgtgggtcaagtagccatgagaaccgtcccctggacctgctacacaagatggagtcaaagagctccaaccagctttcctggctctcagtatccatggatgcagccctaggctgcaggactaatatatttcagatccagcgttcaggggggcgtaaacataccgagaagcatgcaagcggtggctccaccgtccacatccatccccaagctgctcctgttgtctgcagacacgttttggatacactcattcaattggccaaggtatttcccagccacttcacacagcagcggaccaaagaaacaaactgtgagagtgatcgggaaaggggcaataaggcctgtagcccatgctcctcacagtcctccagcagtggcatttgcacagacttctgggacttattggtaaaactggacaacatgaatgtcagccggaaaggcaagaactccgtgaagtcagtgccagtgagcgctggcggtgagggggaaacctctccatacagcctcgaggcctctccactggggcagctcatgaacatgttgtcacacccagtcatccgccggagctctctcttaactgagaaactcctcagactcctttctctcatctcaattgctctcccagaaaacaaggtgtcagaagcacaggctaattctggcagcggtgcttcctccaccaccactgccacctcaaccacatctaccaccaccaccactgccgccatgtgactcagaaccacggcataattctggaaccggtgcttcctccatcaccactgccacctcaaccacatctaccaccaccaccactgccgcctccaccacgcccacaccccctactgaccctcaacctgtgcacactcttaactgtgacgcctgctgtccccgtccccttcagtgccttctctctcaagt

SEQ ID NO: 466993 - DNA, 8735 bp, Homo sapiens
ctgcatccaacctggggagtgctgtcgatgagctcatgagacatcagcccacccttaaaacagatgcaacgactgccatcatcaagttacttgaagaaatctgtaatcttggaagggaccccaaatacatctgtcagaagccatcaatccagaaggcagatggcactgccactgctcctcccccaaggtctaatcatgccgcagaagaagcctctagtgaggatgaggaggaagaggaagtacaggccatgcagagctttaattctacccagcaaaatgaaactgagcctaatcagcaggttgttggtacagaggaacgtattcctattcccctcatggattacatccttaatgtgatgaaatttgtggaatctattctgagcaacaatacaacagatgaccactgccaggaatttgtgaatcagaaaggactgttgcctttggttaccattttgggtcttcccaatctgcccattgactttcccacatctgctgcctgtcaggctgttgcaggtgtctgcaaatccatattgacactgtcacatgaacccaaagtccttcaagagggtctccttcagttggactccatcctctcctccctggagcccttacaccgccccattgaatcccctgggggctcagtgttgttgcgagaactggcttgcgcaggcaatgttgctgatgctaccctctcagcccaggccacacctctgctgcatgcactcactgctgcccatgcctacatcatgatgtttgttcatacttgcagagttggacagagtgaaattcgttccatctccgtaaaccagtggggctctcaattgggtctgagtgttttgagcaagctgagccagttatactgttccctggtgtgggaaagcactgtcctcctctctctgtgtaccccaaacagcctaccatctgggtgtgaatttggccaggcagatatgcagaaactggttccaaaggatgagaaggcaggtacgacccagggcggaaaaagatcagatggggaacaggatggagcagctggaagtatggatgcttctacccagggcttattagaaggcattgggctagatggtgacacattggctcccatggagacagatgaacctactgcttcagactctaagggcaaatctaaaatcacaccagcaatggctgccagaattaagcaaatcaagcctttgttatcagcttcctccagattaggccgagcacttgctgagctatttggacttcttgttaaactttgtgtgggatctcctgtccgccagagaaggagccatcatgctgccagcaccactacagcaccgacacctgccgcgcgatcaacagcctcagctctcactaagctcttgactaaggggttatcttggcagcccccaccatatacacctactccccgattcaggctgacattcttcatctgttcagttggtttcacatccccaatgctgtttgatgagaggaagtatccctaccacctcatgctgcaaaaatttctctgctccggaggccacaatgctctttttgaaactttcaactgggctctgtccatgggaggtaaagttcctgtttctgagggattggaacactcagacttgcctgatggcacaggagaattcctagatgcctggcttatgctggtggagaagatggtgaatcccaccacggtgcttgaatctccacattcgctgcctgccaaattgcctggaggtgtccagaactttccccagttcagtgcactgcgcttccttgtggtaactcagaaagcagcctttacttgcatcaaaaacttatggaaccggaaacccctgaaggtatatggtggacgaatggctgaatcgatgctggccattctatgccacatcctccgaggagaacctgtgattcgagagagactaagcaaggagaaggaggggtctcgaggagaagaggatacagggcaagaggaaggtggctcccgccgggaacctcaagtcaaccagcaacaactgcaacagctcatggacatgggcttcacaagggaacatgcaatggaggcactgttgaacaccagcaccatggagcaggccacagagtaccttttaacccaccctcctccaatcatgggaggagttgttcgggatctcagcatgtctgaagaggaccagatgatgagagcaattgctatgtctctgggacaggatattccaatggatcaaagggcagagtcacctgaggaagttgcttgccggaaggaggaagaggaacggaaagctcgggaaaagcaggaggaggaagaggctaaatgtctagagaagttccaggatgctgacccgttggaacaagatgagctccacactttcacagatactatgttgccaggctgcttccaccttcttgatgagctgccagacacagtataccgtgtgtgtgacctgatcatgacagcaatcaaacgtaatggagcagattatcgtgacatgattctgaagcaagtagtcaatcaggtgtgggaagctgctgatgtattgatcaaagctgctcttcccctgacaacaagtgacacaaaaaccgtgtcagagtggataagtcagatggccacactgccccaggcctccaatttggctactagaatcttgcttttaacgctactttttgaggagttgaagctaccttgtgcttgggtggttgaatcaagtggcatccttaatgtcctaatcaaactcttggaagtggttcagccctgcctccaggcagccaaggagcagaaggaagtccagaccccaaagtggatcacaccagtgttgctcctgattgatttctatgaaaagacagccatctcctcaaaaaggagagcccagatgactaagtacctgcaatccaacagcaacaactggcgctggtttgatgatcgctctgggcgttggtgtagttacagtgcaagcaacaatagcactattgattctgcctggaaatctggagagacaagcgtgcgattcactgcaggccgaagaagatacacggtccaattcactacaatggtgcaggttaatgaggaaacagggaaccgacgccctgtgatgctgactctcctcagggtacctcggctgaataaaaattcaaaaaacagcaatggacaggaactagagaagacgctggaagaaagcaaagaaatggatatcaaacgtaaagaaaataaaggcaatgatacccctttggccctagagagtacaaacactgaaaaggagacaagcctggaggaaacaaaaatcggggagatcctgatccagggcttgacagaagatatggtgactgttttaatccgggcctgcgtgagcatgctgggagtccctgtggacccagatactttgcatgccacccttcgtctctgtctgaggctcacccgggaccacaaatatgccatgatgtttgcagaactgaagagtacccgcatgatcttgaatttgacccagagctcaggcttcaatgggtttactcccctggtcacccttctcttaagacacatcattgaggacccctgtacccttcgtcataccatggaaaaggttgttcgctcagcagctacaagtggagctggtagcactacctctggtgttgtgtctggcagcctcggctctcgggagatcaactacatccttcgtgtccttgggccagccgcatgccgcaatccagacatattcacagaagtggccaactgctgtatccgcatcgcccttcctgcccctcgaggctcaggaactgcttcagatgatgaatttgagaatcttagaattaaaggccctaatgctgtacagctggtgaagaccacccctttgaagccctcacctctgcctgtcatccctgatactatcaaggaagtgatctatgatatgctgaatgctctggctgcataccatgctccagaggaagcagataaatctgatcctaaacctggggttatgacccaagaggttggccagctcctgcaagacatgggtgatgatgtataccagcagtaccggtcacttacgcgtcagagcagtgactttgatacgcagtcaggtttttccattaatagtcaggtctttgctgcagatggtgcctccactgagacttccgcatctgggacctcccaaggagaggcttcaactccagaggagtctcgagatgggaagaaagataaagaaggggaccgggcctctgaggaaggcaaacagaaaggcaagggcagcaaacctttaatgcctacctccactatccttcgtcttctggcagagttggtgaggtcctatgttggtattgctaccctgattgccaactacagctacactgtgggccagtctgaactgatcaaagaggactgcagtgtgctagcttttgttctggaccacctgctcccacatacccagaatgcagaagacaaggacacccctgccttggcccgcctgttcctcgcaagcctggctgctgcagggagtggcacagatgcccaggtggccctagtgaatgaagtaaaagcagcccttggacgggcactggctatggctgagagtacagagaaacatgccaggcttcaggcagtgatgtgtatcatcagtactatcatggagtcctgcccctccacctccagcttctacagcagtgccacagcgaagacccagcacaatggcatgaacaacatcattcggcttttcctgaagaagggactggttaatgacctggccagagtacctcacagcttagacctgtccagtcccaacatggccaacacagtcaatgctgctctgaagcctttggaaacactttcccggattgtgaaccagcccagtagcctttttggcagcaagagtgcttctagcaagaacaagtctgagcaggatgcccaaggagcctctcaagattccagtagcaaccagcaggacccaggcgagcctggggaagcagaagtgcaggaggaggatcatgatgtcactcagacagaggtggcagatggggatatcatggatggggaggctgaaaccgactcagtggtgattgctgggcagcctgaggtgctcagttcacaagagatgcaggttgagaatgagctggaggacctgatagatgagttgcttgagagggatggcggatctgggaacagtacaattatagtgagcagaagtggagaggatgaatcacaagaggacgtgctgatggatgaagctccttccaacctcagccaagcttccaccttgcaggccaaccgagaagattccatgaatatcctggaccctgaggatgaggaggagcacactcaggaagaggacagcagtggcagtaacgaggatgaggatgatagtcaggatgaagaggaggaggaggaggaagatgaggaagatgatcaggaggatgatgaaggtgaagagggagatgaagacgatgacgacgatggctctgagatggaattggatgaggattatcctgatatgaacgcttctcccttggtccgatttgagcgctttgaccgggaggatgatctcatcattgagtttgacaacatgttctccagtgctacagacatccccccatccccaggaaatatccctaccacccatccactgatggtgcgccatgcagaccacagttctctgacactgggcagtggctcttcaacaactcgtctcacccagggcatcgggcgcagtcagaggaccctaaggcagctgacggccaatactggccacaccattcatgttcactaccctgggaatcgccagcccaaccctcctcttatactgcagaggttgcttggtccctcagctgctgctgacatccttcagctgagcagcagccttcccctacaaagccggggtcgggcccgcctcctggtaggcaacgatgacgtccacatcatcgcccgttctgatgatgagctgctggatgactttttccatgatcagagcacagctaccagccaagcaggaaccctgtccagcatccccacagccctgacccgctggacagaagaatgcaaagttctcgatgctgagagcatgcatgactgtgtttcagtggttaaagtgtccattgtcaatcacctggaattcctgagggatgaggagctggaagaaaggcgagagaagcgcaggaaacaactggctgaggaagaaacaaagataactgataaaggcaaagaagataaggagaacagggatcagagtgcacagtgtactgcatctaagtcaaatgactccactgaacagaatctctcagatgggacgcctatgcctgacagctacccaacaaccccatcttcaactgatgcagctacatctgagtccaaggagacccttggcactctgcaatcctcacaacagcaaccaacactcccaaccccaccagctttgggagaggttcctcaggagctgcagtctccagctggagaagggggcagctctacacagctattgatgcctgtagagccagaggaattgggtcccacaaggccaagtggggaagcagaaacaactcagatggagttatccccagctcccactataacctcactttccccagagagagctgaggattctgatgcactgacggctgtcagcagtcagctagaaggctctcctatggatacaagcagcctggcttcctgtaccttagaggaggctgtgggtgacacttcagcagctggcagttctgagcagcccagagcaggcagctccactcctggggatgccccaccagctgtggcggaagtgcaaggcaggagtgatgggtcaggggaatctgcccagccacctgaggacagctccccacctgcatcctctgagagctcttccaccagagattctgccgtggccatttctggagcagattcccgaggaatcctagaagagccgttgccttcaacaagcagtgaagaagaagatccccttgcgggtatcagtctccctgaaggtgtggacccctcttttctggctgccctgcctgatgacatccgtcgggaagttctacagaaccagctaggcattcgtccaccaacccggactgccccctccacaaatagctcagcgcctgcagtggtggggaatcctggtgtgactgaagtgagccctgagtttctggctgccctgcctccagccattcaggaggaagtactggcacagcagagagctgagcagcagcgacgagaactagcacagaatgccagctcagacacccctatggaccctgtgaccttcatccagactctgccctcagacctgcgccgtagtgtcctagaggatatggaggacagtgtgttagctgtgatgccacctgacattgcagctgaggctcaagccctgagacgagagcaagaagcccggcagcgacagctcatgcatgagcgtctgtttgggcacagtagcacctccgcactctctgctattctccgaagcccggctttcaccagtcgcttaagtggcaaccgtggggtccagtatactcgccttgctgtgcagagaggtggcaccttccagatggggggtagcagcagccataacaggccttctggcagtaatgtagatactctcctccgcctccgaggacggctccttctggaccacgaagccctttcttgtctcttggtcctactttttgtggatgagccaaagctcaatactagccgtctacaccgagtactgagaaatctctgctaccatgcccagacccgccactgggtcatccgcagtctgctctccatcttgcagcgcagcagtgagagtgagctatgcattgaaacacccaaactcactacaagtgaggaaaagggcaaaaagtcgagcaagagctgtgggtcaagtagccatgagaaccgtcccctggacctgctacacaagatggagtcaaagagctccaaccagctttcctggctctcagtatccatggatgcagccctaggctgcaggactaatatatttcagatccagcgttcaggggggcgtaaacataccgagaagcatgcaagcggtggctccaccgtccacatccatccccaagctgctcctgttgtctgcagacacgttttggatacactcattcaattggccaaggtatttcccagccacttcacacagcagcggaccaaagaaacaaactgtgagagtgatcgggaaaggggcaataaggcctgtagcccatgctcctcacagtcctccagcagtggcatttgcacagacttctgggacttattggtaaaactggacaacatgaatgtcagccggaaaggcaagaactccgtgaagtcagtgccagtgagcgctggcggtgagggggaaacctctccatacagcctcgaggcctctccactggggcagctcatgaacatgttgtcacacccagtcatccgccggagctctctcttaactgagaaactcctcagactcctttctctcatctcaattgctctcccctttccatgccgtccatgatccccaccccatgtgttttaaaaaggcagtagcctttgcagggacctgtctgtcccaactgtttgaacagtgtgctcctcagattctgtgttcagaaggatttgctgcattgagacttgaaacctttggataggggaaaaaattatatatatatatatttttttgttctgtttgcatttcttaatttgtgcttggaatgtgttgatgtgcacagctaatgattcaatgcgagacaagattggcgtctgtgttgtggaggtttcaaataaagagcactcttcataa

SEQ ID NO: 466994 - DNA, 5440 bp, Homo sapiens
ctgcatccaacctggggagtgctgtcgatgagctcatgagacatcagcccacccttaaaacagatgcaacgactgccatcatcaagttacttgaagaaatctgtaatcttggaagggaccccaaatacatctgtcagaagccatcaatccagaaggcagatggcactgccactgctcctcccccaaggtctaatcatgccgcagaagaagcctctagtgaggatgaggaggaagaggaagtacaggccatgcagagctttaattctacccagcaaaatgaaactgagcctaatcagcaggttgttggtacagaggaacgtattcctattcccctcatggattacatccttaatgtgatgaaatttgtggaatctattctgagcaacaatacaacagatgaccactgccaggaatttgtgaatcagaaaggactgttgcctttggttaccattttgggtcttcccaatctgcccattgactttcccacatctgctgcctgtcaggctgttgcaggtgtctgcaaatccatattgacactgtcacatgaacccaaagtccttcaagagggtctccttcagttggactccatcctctcctccctggagcccttacaccgccccattgaatcccctgggggctcagtgttgttgcgagaactggcttgcgcaggcaatgttgctgatgctaccctctcagcccaggccacacctctgctgcatgcactcactgctgcccatgcctacatcatgatgtttgttcatacttgcagagttggacagagtgaaattcgttccatctccgtaaaccagtggggctctcaattgggtctgagtgttttgagcaagctgagccagttatactgttccctggtgtgggaaagcactgtcctcctctctctgtgtaccccaaacagcctaccatctgggtgtgaatttggccaggcagatatgcagaaactggttccaaaggatgagaaggcaggtacgacccagggcggaaaaagatcagatggggaacaggatggagcagctggaagtatggatgcttctacccagggcttattagaaggcattgggctagatggtgacacattggctcccatggagacagatgaacctactgcttcagactctaagggcaaatctaaaatcacaccagcaatggctgccagaattaagcaaatcaagcctttgttatcagcttcctccagattaggccgagcacttgctgagctatttggacttcttgttaaactttgtgtgggatctcctgtccgccagagaaggagccatcatgctgccagcaccactacagcaccgacacctgccgcgcgatcaacagcctcagctctcactaagctcttgactaaggggttatcttggcagcccccaccatatacacctactccccgattcaggctgacattcttcatctgttcagttggtttcacatccccaatgctgtttgatgagaggaagtatccctaccacctcatgctgcaaaaatttctctgctccggaggccacaatgctctttttgaaactttcaactgggctctgtccatgggaggtaaagttcctgtttctgagggattggaacactcagacttgcctgatggcacaggagaattcctagatgcctggcttatgctggtggagaagatggtgaatcccaccacggtgcttgaatctccacattcgctgcctgccaaattgcctggaggtgtccagaactttccccagttcagtgcactgcgcttccttgtggtaactcagaaagcagcctttacttgcatcaaaaacttatggaaccggaaacccctgaaggtatatggtggacgaatggctgaatcgatgctggccattctatgccacatcctccgaggagaacctgtgattcgagagagactaagcaaggagaaggaggggtctcgaggagaagaggatacagggcaagaggaaggtggctcccgccgggaacctcaagtcaaccagcaacaactgcaacagctcatggacatgggcttcacaagggaacatgcaatggaggcactgttgaacaccagcaccatggagcaggccacagagtaccttttaacccaccctcctccaatcatgggaggagttgttcgggatctcagcatgtctgaagaggaccagatgatgagagcaattgctatgtctctgggacaggatattccaatggatcaaagggcagagtcacctgaggaagttgcttgccggaaggaggaagaggaacggaaagctcgggaaaagcaggaggaggaagaggctaaatgtctagagaagttccaggatgctgacccgttggaacaagatgagctccacactttcacagatactatgttgccaggctgcttccaccttcttgatgagctgccagacacagtataccgtgtgtgtgacctgatcatgacagcaatcaaacgtaatggagcagattatcgtgacatgattctgaagcaagtagtcaatcaggtgtgggaagctgctgatgtattgatcaaagctgctcttcccctgacaacaagtgacacaaaaaccgtgtcagagtggataagtcagatggccacactgccccaggcctccaatttggctactagaatcttgcttttaacgctactttttgaggagttgaagctaccttgtgcttgggtggttgaatcaagtggcatccttaatgtcctaatcaaactcttggaagtggttcagccctgcctccaggcagccaaggagcagaaggaagtccagaccccaaagtggatcacaccagtgttgctcctgattgatttctatgaaaagacagccatctcctcaaaaaggagagcccagatgactaagtacctgcaatccaacagcaacaactggcgctggtttgatgatcgctctgggcgttggtgtagttacagtgcaagcaacaatagcactattgattctgcctggaaatctggagagacaagcgtgcgattcactgcaggccgaagaagatacacggtccaattcactacaatggtgcaggttaatgaggaaacagggaaccgacgccctgtgatgctgactctcctcagggtacctcggctgaataaaaattcaaaaaacagcaatggacaggaactagagaagacgctggaagaaagcaaagaaatggatatcaaacgtaaagaaaataaaggcaatgatacccctttggccctagagagtacaaacactgaaaaggagacaagcctggaggaaacaaaaatcggggagatcctgatccagggcttgacagaagatatggtgactgttttaatccgggcctgcgtgagcatgctgggagtccctgtggacccagatactttgcatgccacccttcgtctctgtctgaggctcacccgggaccacaaatatgccatgatgtttgcagaactgaagagtacccgcatgatcttgaatttgacccagagctcaggcttcaatgggtttactcccctggtcacccttctcttaagacacatcattgaggacccctgtacccttcgtcataccatggaaaaggttgttcgctcagcagctacaagtggagctggtagcactacctctggtgttgtgtctggcagcctcggctctcgggagatcaactacatccttcgtgtccttgggccagccgcatgccgcaatccagacatattcacagaagtggccaactgctgtatccgcatcgcccttcctgcccctcgaggctcaggaactgcttcagatgatgaatttgagaatcttagaattaaaggccctaatgctgtacagctggtgaagaccacccctttgaagccctcacctctgcctgtcatccctgatactatcaaggaagtgatctatgatatgctgaatgctctggctgcataccatgctccagaggaagcagataaatctgatcctaaacctggggttatgacccaagaggttggccagctcctgcaagacatgggtgatgatgtataccagcagtaccggtcacttacgcgtcagagcagtgactttgatacgcagtcaggtttttccattaatagtcaggtctttgctgcagatggtgcctccactgagacttccgcatctgggacctcccaaggagaggcttcaactccagaggagtctcgagatgggaagaaagataaagaaggggaccgggcctctgaggaaggcaaacagaaaggcaagggcagcaaacctttaatgcctacctccactatccttcgtcttctggcagagttggtgaggtcctatgttggtattgctaccctgattgccaactacagctacactgtgggccagtctgaactgatcaaagaggactgcagtgtgctagcttttgttctggaccacctgctcccacatacccagaatgcagaagacaaggacacccctgccttggcccgcctgttcctcgcaagcctggctgctgcagggagtggcacagatgcccaggtggccctagtgaatgaagtaaaagcagcccttggacgggcactggctatggctgagagtacagagaaacatgccaggcttcaggcagtgatgtgtatcatcagtactatcatggagtcctgcccctccacctccagcttctacagcagtgccacagcgaagacccagcacaatggcatgaacaacatcattcggcttttcctgaagaagggactggttaatgacctggccagagtacctcacagcttagacctgtccagtcccaacatggccaacacagtcaatgctgctctgaagcctttggaaacactttcccggattgtgaaccagcccagtagcctttttggcagcaagagtgcttctagcaagaacaagtctgagcaggatgcccaaggagcctctcaagattccagtagcaaccagcaggacccaggcgagcctggggaagcagaagtgcaggaggaggatcatgatgtcactcagacagaggtggcagatggggatatcatggatggggaggctgaaaccgactcagtggtgattgctgggcagcctgaggtgctcagttcacaagagatgcaggttgagaatgagctggaggacctgatagatgagttgcttgagagggatggcggatctgggaacagtacaattatagtgagcagaagtggagaggatgaatcacaagaggacgtgctgatggatgaagctccttccaacctcagccaagcttccaccttgcaggccaaccgagaagattccatgaatatcctggaccctgaggatgaggaggagcacactcaggaagaggacagcagcagaagagaagaagaagcaggatgaactgaaacggattgccagagaattggcagaagatgacagcatattaaagtgagtgaccctgcgacccactctttggaccagcagcggatgaataaagcttcctgtgttgtgtg

SEQ ID NO: 466995 - DNA, 6442 bp, Homo sapiens
ctgcatccaacctggggagtgctgtcgatgagctcatgagacatcagcccacccttaaaacagatgcaacgactgccatcatcaagttacttgaagaaatctgtaatcttggaagggaccccaaatacatctgtcagaagccatcaatccagaaggcagatggcactgccactgctcctcccccaaggtctaatcatgccgcagaagaagcctctagtgaggatgaggaggaagaggaagtacaggccatgcagagctttaattctacccagcaaaatgaaactgagcctaatcagcaggttgttggtacagaggaacgtattcctattcccctcatggattacatccttaatgtgatgaaatttgtggaatctattctgagcaacaatacaacagatgaccactgccaggaatttgtgaatcagaaaggactgttgcctttggttaccattttgggtcttcccaatctgcccattgactttcccacatctgctgcctgtcaggctgttgcaggtgtctgcaaatccatattgacactgtcacatgaacccaaagtccttcaagagggtctccttcagttggactccatcctctcctccctggagcccttacaccgccccattgaatcccctgggggctcagtgttgttgcgagaactggcttgcgcaggcaatgttgctgatgctaccctctcagcccaggccacacctctgctgcatgcactcactgctgcccatgcctacatcatgatgtttgttcatacttgcagagttggacagagtgaaattcgttccatctccgtaaaccagtggggctctcaattgggtctgagtgttttgagcaagctgagccagttatactgttccctggtgtgggaaagcactgtcctcctctctctgtgtaccccaaacagcctaccatctgggtgtgaatttggccaggcagatatgcagaaactggttccaaaggatgagaaggcaggtacgacccagggcggaaaaagatcagatggggaacaggatggagcagctggaagtatggatgcttctacccagggcttattagaaggcattgggctagatggtgacacattggctcccatggagacagatgaacctactgcttcagactctaagggcaaatctaaaatcacaccagcaatggctgccagaattaagcaaatcaagcctttgttatcagcttcctccagattaggccgagcacttgctgagctatttggacttcttgttaaactttgtgtgggatctcctgtccgccagagaaggagccatcatgctgccagcaccactacagcaccgacacctgccgcgcgatcaacagcctcagctctcactaagctcttgactaaggggttatcttggcagcccccaccatatacacctactccccgattcaggctgacattcttcatctgttcagttggtttcacatccccaatgctgtttgatgagaggaagtatccctaccacctcatgctgcaaaaatttctctgctccggaggccacaatgctctttttgaaactttcaactgggctctgtccatgggaggtaaagttcctgtttctgagggattggaacactcagacttgcctgatggcacaggagaattcctagatgcctggcttatgctggtggagaagatggtgaatcccaccacggtgcttgaatctccacattcgctgcctgccaaattgcctggaggtgtccagaactttccccagttcagtgcactgcgcttccttgtggtaactcagaaagcagcctttacttgcatcaaaaacttatggaaccggaaacccctgaaggtatatggtggacgaatggctgaatcgatgctggccattctatgccacatcctccgaggagaacctgtgattcgagagagactaagcaaggagaaggaggggtctcgaggagaagaggatacagggcaagaggaaggtggctcccgccgggaacctcaagtcaaccagcaacaactgcaacagctcatggacatgggcttcacaagggaacatgcaatggaggcactgttgaacaccagcaccatggagcaggccacagagtaccttttaacccaccctcctccaatcatgggaggagttgttcgggatctcagcatgtctgaagaggaccagatgatgagagcaattgctatgtctctgggacaggatattccaatggatcaaagggcagagtcacctgaggaagttgcttgccggaaggaggaagaggaacggaaagctcgggaaaagcaggaggaggaagaggctaaatgtctagagaagttccaggatgctgacccgttggaacaagatgagctccacactttcacagatactatgttgccaggctgcttccaccttcttgatgagctgccagacacagtataccgtgtgtgtgacctgatcatgacagcaatcaaacgtaatggagcagattatcgtgacatgattctgaagcaagtagtcaatcaggtgtgggaagctgctgatgtattgatcaaagctgctcttcccctgacaacaagtgacacaaaaaccgtgtcagagtggataagtcagatggccacactgccccaggcctccaatttggctactagaatcttgcttttaacgctactttttgaggagttgaagctaccttgtgcttgggtggttgaatcaagtggcatccttaatgtcctaatcaaactcttggaagtggttcagccctgcctccaggcagccaaggagcagaaggaagtccagaccccaaagtggatcacaccagtgttgctcctgattgatttctatgaaaagacagccatctcctcaaaaaggagagcccagatgactaagtacctgcaatccaacagcaacaactggcgctggtttgatgatcgctctgggcgttggtgtagttacagtgcaagcaacaatagcactattgattctgcctggaaatctggagagacaagcgtgcgattcactgcaggccgaagaagatacacggtccaattcactacaatggtgcaggttaatgaggaaacagggaaccgacgccctgtgatgctgactctcctcagggtacctcggctgaataaaaattcaaaaaacagcaatggacaggaactagagaagacgctggaagaaagcaaagaaatggatatcaaacgtaaagaaaataaaggcaatgatacccctttggccctagagagtacaaacactgaaaaggagacaagcctggaggaaacaaaaatcggggagatcctgatccagggcttgacagaagatatggtgactgttttaatccgggcctgcgtgagcatgctgggagtccctgtggacccagatactttgcatgccacccttcgtctctgtctgaggctcacccgggaccacaaatatgccatgatgtttgcagaactgaagagtacccgcatgatcttgaatttgacccagagctcaggcttcaatgggtttactcccctggtcacccttctcttaagacacatcattgaggacccctgtacccttcgtcataccatggaaaaggttgttcgctcagcagctacaagtggagctggtagcactacctctggtgttgtgtctggcagcctcggctctcgggagatcaactacatccttcgtgtccttgggccagccgcatgccgcaatccagacatattcacagaagtggccaactgctgtatccgcatcgcccttcctgcccctcgaggctcaggaactgcttcagatgatgaatttgagaatcttagaattaaaggccctaatgctgtacagctggtgaagaccacccctttgaagccctcacctctgcctgtcatccctgatactatcaaggaagtgatctatgatatgctgaatgctctggctgcataccatgctccagaggaagcagataaatctgatcctaaacctggggttatgacccaagaggttggccagctcctgcaagacatgggtgatgatgtataccagcagtaccggtcacttacgcgtcagagcagtgactttgatacgcagtcaggtttttccattaatagtcaggtctttgctgcagatggtgcctccactgagacttccgcatctgggacctcccaaggagaggcttcaactccagaggagtctcgagatgggaagaaagataaagaaggggaccgggcctctgaggaaggcaaacagaaaggcaagggcagcaaacctttaatgcctacctccactatccttcgtcttctggcagagttggtgaggtcctatgttggtattgctaccctgattgccaactacagctacactgtgggccagtctgaactgatcaaagaggactgcagtgtgctagcttttgttctggaccacctgctcccacatacccagaatgcagaagacaaggacacccctgccttggcccgcctgttcctcgcaagcctggctgctgcagggagtggcacagatgcccaggtggccctagtgaatgaagtaaaagcagcccttggacgggcactggctatggctgagagtacagagaaacatgccaggcttcaggcagtgatgtgtatcatcagtactatcatggagtcctgcccctccacctccagcttctacagcagtgccacagcgaagacccagcacaatggcatgaacaacatcattcggcttttcctgaagaagggactggttaatgacctggccagagtacctcacagcttagacctgtccagtcccaacatggccaacacagtcaatgctgctctgaagcctttggaaacactttcccggattgtgaaccagcccagtagcctttttggcagcaagagtgcttctagcaagaacaagtctgagcaggatgcccaaggagcctctcaagattccagtagcaaccagcaggacccaggcgagcctggggaagcagaagtgcaggaggaggatcatgatgtcactcagacagaggtggcagatggggatatcatggatggggaggctgaaaccgactcagtggtgattgctgggcagcctgaggtgctcagttcacaagagatgcaggttgagaatgagctggaggacctgatagatgagttgcttgagagggatggcggatctgggaacagtacaattatagtgagcagaagtggagaggatgaatcacaagaggacgtgctgatggatgaagctccttccaacctcagccaagcttccaccttgcaggccaaccgagaagattccatgaatatcctggaccctgaggatgaggaggagcacactcaggaagaggacagcagtggcagtaacgaggatgaggatgataatccaccaactcaccgtgtgtgtcccagctgccccatcttccccagcgcatacctgttcctcttctcattctctccccgccgcctgtttcctcaccttctctcccctttccatgccgtccatgatccccaccccatgtgttttaaaaaggcagtagcctttgcagggacctgtctgtcccaactgtttgaacagtgtgctcctcagattctgtgttcagaaggatttgctgcattgagacttgaaacctttggataggggaaaaaattatatatatatatatttttttgttctgtttgcatttcttaatttgtgcttggaatgtgttgatgtgcacagctaatgattcaatgcgagacaagattggcgtctgtgttgtggaggtttcaaataaagagcactcttcataactcacttttcacaatggagtttttttcaaacttaaaaaaaaaaacaaaaaactcttaagcacatgctaggcatctggagaaaagatggattctccaggaaaccatccctgccctacccgcttgcccacctgcctccaccactggtgcaacttcctccttcagagtcagtttctgcagtcaggagagatgagcagttcaccaggaattgggggtgggggcatctgtttttttttttttagaatgggagctgcacttggggatggtgatggtgttagagattgcagcccaggacaaagcatcaccttgctcaaggggaacaaactgcagcaggttgtacaaaacattcagagagctcacttgacccaaccgagggttttacttggtgagcctttctagtagtcttgagtctggggctcagttttagatttttatttcattaatgtttgtttatttctaataaattttaataagcgagtaatttaactaggtcgccagaagaccattatttttgtttgtctatttttgttgtcgtcactccctctctcgtcatctgtctgccagtctgttcacagatcaccttgtagtcccttgtggtttttactccatccagtgcttaaagctgatctaaggacttcgatggttccagccttcaaagaaaaaataatttaataaaaatttagttagaaaaaataaccccaagtggtg

SEQ ID NO: 466996 - DNA, 6084 bp, Homo sapiens
  misc_feature (6049)..(6049): n is a, c, g, or t
  misc_feature (6057)..(6057): n is a, c, g, or t
ctgcatccaacctggggagtgctgtcgatgagctcatgagacatcagcccacccttaaaacagatgcaacgactgccatcatcaagttacttgaagaaatctgtaatcttggaagggaccccaaatacatctgtcagaagccatcaatccagaaggcagatggcactgccactgctcctcccccaaggtctaatcatgccgcagaagaagcctctagtgaggatgaggaggaagaggaagtacaggccatgcagagctttaattctacccagcaaaatgaaactgagcctaatcagcaggttgttggtacagaggaacgtattcctattcccctcatggattacatccttaatgtgatgaaatttgtggaatctattctgagcaacaatacaacagatgaccactgccaggaatttgtgaatcagaaaggactgttgcctttggttaccattttgggtcttcccaatctgcccattgactttcccacatctgctgcctgtcaggctgttgcaggtgtctgcaaatccatattgacactgtcacatgaacccaaagtccttcaagagggtctccttcagttggactccatcctctcctccctggagcccttacaccgccccattgaatcccctgggggctcagtgttgttgcgagaactggcttgcgcaggcaatgttgctgatgctaccctctcagcccaggccacacctctgctgcatgcactcactgctgcccatgcctacatcatgatgtttgttcatacttgcagagttggacagagtgaaattcgttccatctccgtaaaccagtggggctctcaattgggtctgagtgttttgagcaagctgagccagttatactgttccctggtgtgggaaagcactgtcctcctctctctgtgtaccccaaacagcctaccatctgggtgtgaatttggccaggcagatatgcagaaactggttccaaaggatgagaaggcaggtacgacccagggcggaaaaagatcagatggggaacaggatggagcagctggaagtatggatgcttctacccagggcttattagaaggcattgggctagatggtgacacattggctcccatggagacagatgaacctactgcttcagactctaagggcaaatctaaaatcacaccagcaatggctgccagaattaagcaaatcaagcctttgttatcagcttcctccagattaggccgagcacttgctgagctatttggacttcttgttaaactttgtgtgggatctcctgtccgccagagaaggagccatcatgctgccagcaccactacagcaccgacacctgccgcgcgatcaacagcctcagctctcactaagctcttgactaaggggttatcttggcagcccccaccatatacacctactccccgattcaggctgacattcttcatctgttcagttggtttcacatccccaatgctgtttgatgagaggaagtatccctaccacctcatgctgcaaaaatttctctgctccggaggccacaatgctctttttgaaactttcaactgggctctgtccatgggaggtaaagttcctgtttctgagggattggaacactcagacttgcctgatggcacaggagaattcctagatgcctggcttatgctggtggagaagatggtgaatcccaccacggtgcttgaatctccacattcgctgcctgccaaattgcctggaggtgtccagaactttccccagttcagtgcactgcgcttccttgtggtaactcagaaagcagcctttacttgcatcaaaaacttatggaaccggaaacccctgaaggtatatggtggacgaatggctgaatcgatgctggccattctatgccacatcctccgaggagaacctgtgattcgagagagactaagcaaggagaaggaggggtctcgaggagaagaggatacagggcaagaggaaggtggctcccgccgggaacctcaagtcaaccagcaacaactgcaacagctcatggacatgggcttcacaagggaacatgcaatggaggcactgttgaacaccagcaccatggagcaggccacagagtaccttttaacccaccctcctccaatcatgggaggagttgttcgggatctcagcatgtctgaagaggaccagatgatgagagcaattgctatgtctctgggacaggatattccaatggatcaaagggcagagtcacctgaggaagttgcttgccggaaggaggaagaggaacggaaagctcgggaaaagcaggaggaggaagaggctaaatgtctagagaagttccaggatgctgacccgttggaacaagatgagctccacactttcacagatactatgttgccaggctgcttccaccttcttgatgagctgccagacacagtataccgtgtgtgtgacctgatcatgacagcaatcaaacgtaatggagcagattatcgtgacatgattctgaagcaagtagtcaatcaggtgtgggaagctgctgatgtattgatcaaagctgctcttcccctgacaacaagtgacacaaaaaccgtgtcagagtggataagtcagatggccacactgccccaggcctccaatttggctactagaatcttgcttttaacgctactttttgaggagttgaagctaccttgtgcttgggtggttgaatcaagtggcatccttaatgtcctaatcaaactcttggaagtggttcagccctgcctccaggcagccaaggagcagaaggaagtccagaccccaaagtggatcacaccagtgttgctcctgattgatttctatgaaaagacagccatctcctcaaaaaggagagcccagatgactaagtacctgcaatccaacagcaacaactggcgctggtttgatgatcgctctgggcgttggtgtagttacagtgcaagcaacaatagcactattgattctgcctggaaatctggagagacaagcgtgcgattcactgcaggccgaagaagatacacggtccaattcactacaatggtgcaggttaatgaggaaacagggaaccgacgccctgtgatgctgactctcctcagggtacctcggctgaataaaaattcaaaaaacagcaatggacaggaactagagaagacgctggaagaaagcaaagaaatggatatcaaacgtaaagaaaataaaggcaatgatacccctttggccctagagagtacaaacactgaaaaggagacaagcctggaggaaacaaaaatcggggagatcctgatccagggcttgacagaagatatggtgactgttttaatccgggcctgcgtgagcatgctgggagtccctgtggacccagatactttgcatgccacccttcgtctctgtctgaggctcacccgggaccacaaatatgccatgatgtttgcagaactgaagagtacccgcatgatcttgaatttgacccagagctcaggcttcaatgggtttactcccctggtcacccttctcttaagacacatcattgaggacccctgtacccttcgtcataccatggaaaaggttgttcgctcagcagctacaagtggagctggtagcactacctctggtgttgtgtctggcagcctcggctctcgggagatcaactacatccttcgtgtccttgggccagccgcatgccgcaatccagacatattcacagaagtggccaactgctgtatccgcatcgcccttcctgcccctcgaggctcaggaactgcttcagatgatgaatttgagaatcttagaattaaaggccctaatgctgtacagctggtgaagaccacccctttgaagccctcacctctgcctgtcatccctgatactatcaaggaagtgatctatgatatgctgaatgctctggctgcataccatgctccagaggaagcagataaatctgatcctaaacctggggttatgacccaagaggttggccagctcctgcaagacatgggtgatgatgtataccagcagtaccggtcacttacgcgtcagagcagtgactttgatacgcagtcaggtttttccattaatagtcaggtctttgctgcagatggtgcctccactgagacttccgcatctgggacctcccaaggagaggcttcaactccagaggagtctcgagatgggaagaaagataaagaaggggaccgggcctctgaggaaggcaaacagaaaggcaagggcagcaaacctttaatgcctacctccactatccttcgtcttctggcagagttggtgaggtcctatgttggtattgctaccctgattgccaactacagctacactgtgggccagtctgaactgatcaaagaggactgcagtgtgctagcttttgttctggaccacctgctcccacatacccagaatgcagaagacaaggacacccctgccttggcccgcctgttcctcgcaagcctggctgctgcagggagtggcacagatgcccaggtggccctagtgaatgaagtaaaagcagcccttggacgggcactggctatggctgagagtacagagaaacatgccaggcttcaggcagtgatgtgtatcatcagtactatcatggagtcctgcccctccacctccagcttctacagcagtgccacagcgaagacccagcacaatggcatgaacaacatcattcggcttttcctgaagaagggactggttaatgacctggccagagtacctcacagcttagacctgtccagtcccaacatggccaacacagtcaatgctgctctgaagcctttggaaacactttcccggattgtgaaccagcccagtagcctttttggcagcaagagtgcttctagcaagaacaagtctgagcaggatgcccaaggagcctctcaagattccagtagcaaccagcaggacccaggcgagcctggggaagcagaagtgcaggaggaggatcatgatgtcactcagacagaggtggcagatggggatatcatggatggggaggctgaaaccgactcagtggtgattgctgggcagcctgaggtgctcagttcacaagagatgcaggttgagaatgagctggaggacctgatagatgagttgcttgagagggatggcggatctgggaacagtacaattatagtgagcagaagtggagaggatgaatcacaagaggacgtgctgatggatgaagctccttccaacctcagccaagcttccaccttgcaggccaaccgagaagattccatgaatatcctggaccctgaggatgaggaggagcacactcaggaagaggacagcagtggcagtaacgaggatgaggatgatagtcaggatgaagaggaggaggaggaggaagatgaggaagatgatcaggaggatgatgaaggtgaagagggagatgaagacgatgacgacgatggctctgagatggaattggatgaggattatcctgatatgaacgcttctcccttggtccgatttgagcgctttgaccgggaggatgatctcatcattgagtttgacaacatgttctccagtgctacagacatccccccatccccaggaaatatccctaccacccatccactgatggtgcgccatgcagaccacagttctctgacactgggcagtggctcttcaacaactcgtctcacccagggcatcgggcgcagtcagaggaccctaaggcagctgacggccaatactggccacaccattcatgttcactaccctgggaatcgccagcccaaccctcctcttatactgcagaggttgcttggtccctcagctgctgctgacatccttcagctgagcagcagccttcccctacaaagccggggtcgggcccgcctcctggtaggcaacgatgacgtccacatcatcgcccgttctgatgatgagctgctggatgactttttccatgatcagagcacagctaccagccaagcagccaagtacaaataggagtgacccgttaaaatccagggttttttgttttttggttacaatcttggaccctttggttacattccttttttctgtggaanatgtggantattatttaaacatttggatttggaaa

SEQ ID NO: 466997 - DNA, 1183 bp, Homo sapiens
gtgcttaggttgagcttgcatacttgatgttttcaggaccctacccaagattgggaacacaaatgtggctgagtcctggaccttgggtaactcacaatttggtgtttctatggaggtgatgtttgagatgagatgtgctagacacagtgggggctggggagacactgtcaggtaaacagcaccacaagagagcatggtgtattccagggccagcgtgactggagcaaggaggagttgcagggagcaaaagtctaaagagctcagcagaggtccgattaccagtgactctgaaaaccaccttcaagtttgcactttagcctatgggcgagtgaggccagggtgtttaaggaggagtgacagggtcagatttttggttttggtgcctgatggccagtttgggagccagataaagggggacatactgggctgagacaagattgggagtcatcaagaagcagggagttggtttcttcagggaggggaggggctggtgggcaccatgggaacacacagatttggttatctgtcatccctcaccacaaactgatctttcttctttccttagttttaatcagctggatctgcctgcctatgagagctttgagaagctccgccacatgctactgttggctatccaggagtgctctgaaggctttgggctggcctaataaggccctgcccaactccgtggggttttttttaccattgttggacctggggaggggggagttaaaaaaagaaccagaaagaaattgtcaaaaaccaataaatgaaatccaccaactcaccgtgtgtgtcccagctgccccatcttccccagcgcatacctgttcctcttctcattctctccccgccgcctgtttcctcaccttctctcccctttccatgccgtccatgatccccaccccatgtgttttaaaaaggcagtagcctttgcagggacctgtctgtcccaactgtttgaacagtgtgctcctcagattctgtgttcagaaggatttgctgcattgagacttgaaacctttggataggggaaaaaattatatatatatatatttttttgttctgtttgcatttcttaatttgtgcttggaatgtgttgatgtgcacagctaatgattcaatgcgagacaagattggcgtctgtgttgtggaggtttcaaataaagagcactcttcataa

SEQ ID NO: 466998 - DNA, 1617 bp, Homo sapiens
ctgcatccaacctggggagtgctgtcgatgagctcatgagacatcagcccacccttaaaacagatgcaacgactgccatcatcaagttacttgaagaaatctgtaatcttggaagggaccccaaatacatctgtcagaagccatcaatccagaaggcagatggcactgccactgctcctcccccaaggtctaatcatgccgcagaagaagcctctagtgaggatgaggaggaagaggaagtacaggccatgcagagctttaattctacccagcaaaatgaaactgagcctaatcagcaggttgttggtacagaggaacgtattcctattcccctcatggattacatccttaatgtgatgaaatttgtggaatctattctgagcaacaatacaacagatgaccactgccaggaatttgtgaatcagaaaggactgttgcctttggttaccattttgggtcttcccaatctgcccattgactttcccacatctgctgcctgtcaggctgttgcaggtgtctgcaaatccatattgacactgtcacatgaacccaaagtccttcaagagggtctccttcagttggactccatcctctcctccctggagcccttacaccgccccattgaatcccctgggggctcagtgttgttgcgagaactggcttgcgcaggcaatgttgctgatgctaccctctcagcccaggccacacctctgctgcatgcactcactgctgcccatgcctacatcatgatgtttgttcatacttgcagagttggacagagtgaaattcgttccatctccgtaaaccagtggggctctcaattgggtctgagtgttttgagcaagctgagccagttatactgttccctggtgtgggaaagcactgtcctcctctctctgtgtaccccaaacagcctaccatctgggtgtgaatttggccaggcagatatgcagaaactggttccaaaggatgagaaggcaggtacgacccagggcggaaaaagatcagatggggaacaggatggagcagctggaagtatggatgcttctacccagggcttattagaaggcattgggctagatggtgacacattggctcccatggagacagatgaacctactgcttcagactctaagggcaaatctaaaatcacaccagcaatggctgccagaattaagcaaatcaagcctttgttatcagcttcctccagattaggccgagcacttgctgagctatttggacttcttgttaaactttgtgtgggatctcctgtccgccagagaaggagccatcatgctgccagcaccactacagcaccgacacctgccgcgcgatcaacagcctcagctctcactaagctcttgactaaggggttatcttggcagcccccaccatatacacctactccccgattcaggctgacattcttcatctgttcagttggtttcacatccccaatgctgtttgatgagaggaagtatccctaccacctcatgctgcaaaaatttctctgctccggaggccacaatgctctttttgattttgttagagtatctttttcacaggtgagagagtttgaaatgggtggtgtccaggaattcccctggcatgtgtacc

SEQ ID NO: 466999 - DNA, 989 bp, Homo sapiens
  misc_feature (793)..(793): n is a, c, g, or t
  misc_feature (795)..(795): n is a, c, g, or t
  misc_feature (824)..(824): n is a, c, g, or t
  misc_feature (863)..(863): n is a, c, g, or t
ctgcatccaacctggggagtgctgtcgatgagctcatgagacatcagcccacccttaaaacagatgcaacgactgccatcatcaagttacttgaagaaatctgtaatcttggaagggaccccaaatacatctgtcagaagccatcaatccagaaggcagatggcactgccactgctcctcccccaaggtctaatcatgccgcagaagaagcctctagtgaggatgaggaggaagaggaagtacaggccatgcagagctttaattctacccagcaaaatgaaactgagcctaatcagcaggttgttggtacagaggaacgtattcctattcccctcatggattacatccttaatgtgatgaaatttgtggaatctattctgagcaacaatacaacagatgaccactgccaggaatttgtgaatcagaaaggactgttgcctttggttaccattttgggtcttcccaatctgcccattgactttcccacatctgctgcctgtcaggctgttgcaggtgtctgcaaatccatattgacactgtcacatgaacccaaagtccttcaagagggtctccttcagttggactccatcctctcctccctggagcccttacaccgccccattgaatcccctgggggctcagtgttgttgcgagaactggcttgcgcaggcaatgttgctgatgctaccctctcagcccaggccacacctctgctgcatgcactcactgctgcccatgcctacatcatgatgtttgttcatacttgcagagttggacagagtgaaattcgttncnctccgctaaagatttcaaatccaggggantccatgctcaatggatgaatgtagacacaaaacagcaanacttgtatgaagatgtaaagtgctgaacatatttttttcctgtttcctttccttttttttaaaaaatctgaattgtgccctgtactgcagttacttgtttgaataaaagttattatttattgcacg

SEQ ID NO: 467000 - DNA, 533 bp, Homo sapiens
ctgcatccaacctggggagtgctgtcgatgagctcatgagacatcagcccacccttaaaacagatgcaacgactgccatcatcaagttacttgaagaaatctgtaatcttggaagggaccccaaatacatctgtcagaagccatcaatccagaaggcagatggcactgccactgctcctcccccaaggtctaatcatgccgcagaagaagcctctagtgaggatgaggaggaagaggaagtacaggccatgcagagctttaattctacccagcaaaatgaaactgagcctaatcagcaggttgttggtacagaggaacgtattcctattcccctcatggattacatccttaatgtggtaagattcaacacagggcaaactgagtaaagatgtatatgtgcttttctggaaaatgtgtttcgttatcagagtccagtaattaccgtattcattttaattggaatccaattaagaggggaaagatgtgccacccttttgtttttgttctagactggtttgccagaaattagccaa

SEQ ID NO: 467001 - DNA, 476 bp, Homo sapiens
gttagcatgatgcctgtggcccctcattcatttgtctctccactcatccccccaccatgtcatcagtggggtttcattgcctttaccttgtatgcttttgcattaagtttgctatatgaatgcttctggacaaaagggttactttctgttggtgttttcctatttgttgattggtttgttggtttgatttgatttaaagcttggccatcataccccactcccagctatccagtcaacagtggcgcttttgcaaactgcctgatgctaagtgttgtctgggttctgaggggttatggggtgaagttttttttcagtcccatggaacaatgcaggtacatcagaaacatctcaggaatcctaccattgaaagtcccccaagcttggtacatatcccacacagccacttctgtctgtggctgctccctccaccctgccctctgcctttattctccataatcccttggcacctaggcact

SEQ ID NO: 467002 - DNA, 494 bp, Homo sapiens
aaactggttccaaaggatgagaaggcaggtacgacccagggcggaaaaagatcaggtaactctaagaaactaaaatgttagtcattacttctaagttttgttcctacgtctttataggtttattatgaaaatttttagttagttctatcatccatagtctagttttcatcctctcactaatttttagtcatttcttccataaaaacatatatacataatggtaaaatttagaaaatgtagttgaaagaattacccgtatttctgccaccaaaaaaaaaaaaaaaacattttggaagtgtctgcccgtcttttttctctgaatacatttgccagtgtcttagataaaaacatttcgtagatctctttcttcacttaatgttaggtaccatataaaggtacacgaattaactattccctgttaagtttctaatatgctatttttaaaaaatgaacatttttgtatctacttttctacaaatgtaaaattgattcct

SEQ ID NO: 467003 - DNA, 330 bp, Homo sapiens
aggcctagaattttatacagtgcctcctcctctgttctcttaatattggtattgtgaatttctgtgtaactcactcttttctcccctaacagggttgttggtacagaggaacgtattcctattcccctcatggattacatccttaatgtggtaagattcaacacagggcaaactgagtaaagatgtatatgtgcttttctggaaaatgtgtttcgttatcagagtccagtaattaccgtattcattttaattggaatccaattaagaggggaaagatgtgccacccttttgtttttgttctagactggtttgccagaaattagccaacac

SEQ ID NO: 467004 - DNA, 941 bp, Homo sapiens
ctgcatccaacctggggagtgctgtcgatgagctcatgagacatcagcccacccttaaaacagatgcaacgactgccatcatcaagttacttgaagaaatctgtaatcttggaagggaccccaaatacatctgtcagaagccatcaatccagaaggcagatggcactgccactgctcctcccccaaggtctaatcatgccgcagaagaagcctctagtgaggatgaggaggaagaggaagtacaggccatgcagagctttaattctacccagcaaaatgaaactgagcctaatcagcaggttgttggtacagaggaacgtattcctattcccctcatggattacatccttaatgtgatgaaatttgtggaatctattctgagcaacaatacaacagatgaccactgccaggaatttgtgaatcagaaaggactgttgcctttggttaccattttgggtcttcccaatctgcccattgactttcccacatctgctgcctgtcaggctgttgcaggtgtctgcaaatccatattgacactgtcacatgaacccaaagtccttcaagagggtctccttcagttggactccatcctctcctccctggagcccttacaccgccccattgaatcccctgggggctcagtgttgttgcgagaactggcttgcgcaggcaatgttgctgatgctaccctctcagcccaggccacacctctgctgcatgcactcactgctgcccatgcctacatcatgatgtttgttcatacttgcagagttggacagagtgaaattcgttccatctccgtaaaccagtggggctctcaattgggtctgagtgttttgagcaagctgagccagttatactgttccctggtgtgggaaagcactgtcctcctctctctgtgtaccccaaacaggtaagagaatggctctctctcttattac

SEQ ID NO: 467005 - DNA, 1230 bp, Homo sapiens
  misc_feature (1046)..(1046): n is a, c, g, or t
ctgcatccaacctggggagtgctgtcgatgagctcatgagacatcagcccacccttaaaacagatgcaacgactgccatcatcaagttacttgaagaaatctgtaatcttggaagggaccccaaatacatctgtcagaagccatcaatccagaaggcagatggcactgccactgctcctcccccaaggtctaatcatgccgcagaagaagcctctagtgaggatgaggaggaagaggaagtacaggccatgcagagctttaattctacccagcaaaatgaaactgagcctaatcagcaggttgttggtacagaggaacgtattcctattcccctcatggattacatccttaatgtgatgaaatttgtggaatctattctgagcaacaatacaacagatgaccactgccaggaatttgtgaatcagaaaggactgttgcctttggttaccattttgggtcttcccaatctgcccattgactttcccacatctgctgcctgtcaggctgttgcaggtgtctgcaaatccatattgacactgtcacatgaacccaaagtccttcaagagggtctccttcagttggactccatcctctcctccctggagcccttacaccgccccattgaatcccctgggggctcagtgttgttgcgagaactggcttgcgcaggcaatgttgctgatgctaccctctcagcccaggccacacctctgctgcatgcactcactgctgcccatgcctacatcatgatgtttgttcatacttgcagagttggacagagtgaaattcgttccatctccgtaaaccagtggggctctcaattgggtctgagtgttttgagcaagctgagccagttatactgttccctggtgtgggaaagcactgtcctcctctctctgtgtaccccaaacagcctaccatctgggtgtgaatttggccaggcagatatgcagaaactggttccaaaggatgagaaggcaggtacgacccagggcggaaaaagatcagataaggaacaggcactatgaacttttgtttagagactntaaagggctatagagaccctgctcaggctatgcacctaatgatactcacttttcatggctctccaagaccctcccagctttgacaatggcaaagataacagatactcaattccagcccaggcatctgtagttgatctctatttagctcccttggtagagatacacagattgaagagggtccagg

SEQ ID NO: 467006 - DNA, 4240 bp, Homo sapiens
ctgcatccaacctggggagtgctgtcgatgagctcatgagacatcagcccacccttaaaacagatgcaacgactgccatcatcaagttacttgaagaaatctgtaatcttggaagggaccccaaatacatctgtcagaagccatcaatccagaaggcagatggcactgccactgctcctcccccaaggtctaatcatgccgcagaagaagcctctagtgaggatgaggaggaagaggaagtacaggccatgcagagctttaattctacccagcaaaatgaaactgagcctaatcagcaggttgttggtacagaggaacgtattcctattcccctcatggattacatccttaatgtgatgaaatttgtggaatctattctgagcaacaatacaacagatgaccactgccaggaatttgtgaatcagaaaggactgttgcctttggttaccattttgggtcttcccaatctgcccattgactttcccacatctgctgcctgtcaggctgttgcaggtgtctgcaaatccatattgacactgtcacatgaacccaaagtccttcaagagggtctccttcagttggactccatcctctcctccctggagcccttacaccgccccattgaatcccctgggggctcagtgttgttgcgagaactggcttgcgcaggcaatgttgctgatgctaccctctcagcccaggccacacctctgctgcatgcactcactgctgcccatgcctacatcatgatgtttgttcatacttgcagagttggacagagtgaaattcgttccatctccgtaaaccagtggggctctcaattgggtctgagtgttttgagcaagctgagccagttatactgttccctggtgtgggaaagcactgtcctcctctctctgtgtaccccaaacagcctaccatctgggtgtgaatttggccaggcagatatgcagaaactggttccaaaggatgagaaggcaggtacgacccagggcggaaaaagatcagatggggaacaggatggagcagctggaagtatggatgcttctacccagggcttattagaaggcattgggctagatggtgacacattggctcccatggagacagatgaacctactgcttcagactctaagggcaaatctaaaatcacaccagcaatggctgccagaattaagcaaatcaagcctttgttatcagcttcctccagattaggccgagcacttgctgagctatttggacttcttgttaaactttgtgtgggatctcctgtccgccagagaaggagccatcatgctgccagcaccactacagcaccgacacctgccgcgcgatcaacagcctcagctctcactaagctcttgactaaggggttatcttggcagcccccaccatatacacctactccccgattcaggctgacattcttcatctgttcagttggtttcacatccccaatgctgtttgatgagaggaagtatccctaccacctcatgctgcaaaaatttctctgctccggaggccacaatgctctttttgaaactttcaactgggctctgtccatgggaggtaaagttcctgtttctgagggattggaacactcagacttgcctgatggcacaggagaattcctagatgcctggcttatgctggtggagaagatggtgaatcccaccacggtgcttgaatctccacattcgctgcctgccaaattgcctggaggtgtccagaactttccccagttcagtgcactgcgcttccttgtggtaactcagaaagcagcctttacttgcatcaaaaacttatggaaccggaaacccctgaaggtatatggtggacgaatggctgaatcgatgctggccattctatgccacatcctccgaggagaacctgtgattcgagagagactaagcaaggagaaggaggggtctcgaggagaagaggatacagggcaagaggaaggtggctcccgccgggaacctcaagtcaaccagcaacaactgcaacagctcatggacatgggcttcacaagggaacatgcaatggaggcactgttgaacaccagcaccatggagcaggccacagagtaccttttaacccaccctcctccaatcatgggaggagttgttcgggatctcagcatgtctgaagaggaccagatgatgagagcaattgctatgtctctgggacaggatattccaatggatcaaagggcagagtcacctgaggaagttgcttgccggaaggaggaagaggaacggaaagctcgggaaaagcaggaggaggaagaggctaaatgtctagagaagttccaggatgctgacccgttggaacaagatgagctccacactttcacagatactatgttgccaggctgcttccaccttcttgatgagctgccagacacagtataccgtgtgtgtgacctgatcatgacagcaatcaaacgtaatggagcagattatcgtgacatgattctgaagcaagtagtcaatcaggtgtgggaagctgctgatgtattgatcaaagctgctcttcccctgacaacaagtgacacaaaaaccgtgtcagagtggataagtcagatggccacactgccccaggcctccaatttggctactagaatcttgcttttaacgctactttttgaggagttgaagctaccttgtgcttgggtggttgaatcaagtggcatccttaatgtcctaatcaaactcttggaagtggttcagccctgcctccaggcagccaaggagcagaaggaagtccagaccccaaagtggatcacaccagtgttgctcctgattgatttctatgaaaagacagccatctcctcaaaaaggagagcccagatgactaagtacctgcaatccaacagcaacaactggcgctggtttgatgatcgctctgggcgttggtgtagttacagtgcaagcaacaatagcactattgattctgcctggaaatctggagagacaagcgtgcgattcactgcaggccgaagaagatacacggtccaattcactacaatggtgcaggttaatgaggaaacagggaaccgacgccctgtgatgctgactctcctcagggtacctcggctgaataaaaattcaaaaaacagcaatggacaggaactagagaagacgctggaagaaagcaaagaaatggatatcaaacgtaaagaaaataaaggcaatgatacccctttggccctagagagtacaaacactgaaaaggagacaagcctggaggaaacaaaaatcggggagatcctgatccagggcttgacagaagatatggtgactgttttaatccgggcctgcgtgagcatgctgggagtccctgtggacccagatactttgcatgccacccttcgtctctgtctgaggctcacccgggaccacaaatatgccatgatgtttgcagaactgaagagtacccgcatgatcttgaatttgacccagagctcaggcttcaatgggtttactcccctggtcacccttctcttaagacacatcattgaggacccctgtacccttcgtcataccatggaaaaggttgttcgctcagcagctacaagtggagctggtagcactacctctggtgttgtgtctggcagcctcggctctcgggagatcaactacatccttcgtgtccttgggccagccgcatgccgcaatccagacatattcacagaagtggccaactgctgtatccgcatcgcccttcctgcccctcgaggctcaggaactggtaagttccgcttgctcctggcccttggatattaagtgtgtggcctggtataaatccagaaatttatttatgaggaggtctgtaacttgaagagcctccttaggcaagtattaggacatttgctggctaattgattgtttgggtcaatttattaggtacttcagtagcttcttctggccttgccctgttgtaatccctgccagagacactgaggactcattcattctagtccttcacttcaaagagctcattttggtggggcagtaggctttacatatagttaatggtttacaaatcaagtgataattaagggttaaatggatgtatgtctcgtgtaacacagtgcgaaatagacgtcatctgtgtattcctgccaagaaatgtttgacctgtatttaattatgaggaaacaattagataaatacaaattgtgagatgttctatataagacaactggcctagactcttcaaaaatattaatgttatg

SEQ ID NO: 467007 - DNA, 5852 bp, Homo sapiens
ctgcatccaacctggggagtgctgtcgatgagctcatgagacatcagcccacccttaaaacagatgcaacgactgccatcatcaagttacttgaagaaatctgtaatcttggaagggaccccaaatacatctgtcagaagccatcaatccagaaggcagatggcactgccactgctcctcccccaaggtctaatcatgccgcagaagaagcctctagtgaggatgaggaggaagaggaagtacaggccatgcagagctttaattctacccagcaaaatgaaactgagcctaatcagcaggttgttggtacagaggaacgtattcctattcccctcatggattacatccttaatgtgatgaaatttgtggaatctattctgagcaacaatacaacagatgaccactgccaggaatttgtgaatcagaaaggactgttgcctttggttaccattttgggtcttcccaatctgcccattgactttcccacatctgctgcctgtcaggctgttgcaggtgtctgcaaatccatattgacactgtcacatgaacccaaagtccttcaagagggtctccttcagttggactccatcctctcctccctggagcccttacaccgccccattgaatcccctgggggctcagtgttgttgcgagaactggcttgcgcaggcaatgttgctgatgctaccctctcagcccaggccacacctctgctgcatgcactcactgctgcccatgcctacatcatgatgtttgttcatacttgcagagttggacagagtgaaattcgttccatctccgtaaaccagtggggctctcaattgggtctgagtgttttgagcaagctgagccagttatactgttccctggtgtgggaaagcactgtcctcctctctctgtgtaccccaaacagcctaccatctgggtgtgaatttggccaggcagatatgcagaaactggttccaaaggatgagaaggcaggtacgacccagggcggaaaaagatcagatggggaacaggatggagcagctggaagtatggatgcttctacccagggcttattagaaggcattgggctagatggtgacacattggctcccatggagacagatgaacctactgcttcagactctaagggcaaatctaaaatcacaccagcaatggctgccagaattaagcaaatcaagcctttgttatcagcttcctccagattaggccgagcacttgctgagctatttggacttcttgttaaactttgtgtgggatctcctgtccgccagagaaggagccatcatgctgccagcaccactacagcaccgacacctgccgcgcgatcaacagcctcagctctcactaagctcttgactaaggggttatcttggcagcccccaccatatacacctactccccgattcaggctgacattcttcatctgttcagttggtttcacatccccaatgctgtttgatgagaggaagtatccctaccacctcatgctgcaaaaatttctctgctccggaggccacaatgctctttttgaaactttcaactgggctctgtccatgggaggtaaagttcctgtttctgagggattggaacactcagacttgcctgatggcacaggagaattcctagatgcctggcttatgctggtggagaagatggtgaatcccaccacggtgcttgaatctccacattcgctgcctgccaaattgcctggaggtgtccagaactttccccagttcagtgcactgcgcttccttgtggtaactcagaaagcagcctttacttgcatcaaaaacttatggaaccggaaacccctgaaggtatatggtggacgaatggctgaatcgatgctggccattctatgccacatcctccgaggagaacctgtgattcgagagagactaagcaaggagaaggaggggtctcgaggagaagaggatacagggcaagaggaaggtggctcccgccgggaacctcaagtcaaccagcaacaactgcaacagctcatggacatgggcttcacaagggaacatgcaatggaggcactgttgaacaccagcaccatggagcaggccacagagtaccttttaacccaccctcctccaatcatgggaggagttgttcgggatctcagcatgtctgaagaggaccagatgatgagagcaattgctatgtctctgggacaggatattccaatggatcaaagggcagagtcacctgaggaagttgcttgccggaaggaggaagaggaacggaaagctcgggaaaagcaggaggaggaagaggctaaatgtctagagaagttccaggatgctgacccgttggaacaagatgagctccacactttcacagatactatgttgccaggctgcttccaccttcttgatgagctgccagacacagtataccgtgtgtgtgacctgatcatgacagcaatcaaacgtaatggagcagattatcgtgacatgattctgaagcaagtagtcaatcaggtgtgggaagctgctgatgtattgatcaaagctgctcttcccctgacaacaagtgacacaaaaaccgtgtcagagtggataagtcagatggccacactgccccaggcctccaatttggctactagaatcttgcttttaacgctactttttgaggagttgaagctaccttgtgcttgggtggttgaatcaagtggcatccttaatgtcctaatcaaactcttggaagtggttcagccctgcctccaggcagccaaggagcagaaggaagtccagaccccaaagtggatcacaccagtgttgctcctgattgatttctatgaaaagacagccatctcctcaaaaaggagagcccagatgactaagtacctgcaatccaacagcaacaactggcgctggtttgatgatcgctctgggcgttggtgtagttacagtgcaagcaacaatagcactattgattctgcctggaaatctggagagacaagcgtgcgattcactgcaggccgaagaagatacacggtccaattcactacaatggtgcaggttaatgaggaaacagggaaccgacgccctgtgatgctgactctcctcagggtacctcggctgaataaaaattcaaaaaacagcaatggacaggaactagagaagacgctggaagaaagcaaagaaatggatatcaaacgtaaagaaaataaaggcaatgatacccctttggccctagagagtacaaacactgaaaaggagacaagcctggaggaaacaaaaatcggggagatcctgatccagggcttgacagaagatatggtgactgttttaatccgggcctgcgtgagcatgctgggagtccctgtggacccagatactttgcatgccacccttcgtctctgtctgaggctcacccgggaccacaaatatgccatgatgtttgcagaactgaagagtacccgcatgatcttgaatttgacccagagctcaggcttcaatgggtttactcccctggtcacccttctcttaagacacatcattgaggacccctgtacccttcgtcataccatggaaaaggttgttcgctcagcagctacaagtggagctggtagcactacctctggtgttgtgtctggcagcctcggctctcgggagatcaactacatccttcgtgtccttgggccagccgcatgccgcaatccagacatattcacagaagtggccaactgctgtatccgcatcgcccttcctgcccctcgaggctcaggaactgcttcagatgatgaatttgagaatcttagaattaaaggccctaatgctgtacagctggtgaagaccacccctttgaagccctcacctctgcctgtcatccctgatactatcaaggaagtgatctatgatatgctgaatgctctggctgcataccatgctccagaggaagcagataaatctgatcctaaacctggggttatgacccaagaggttggccagctcctgcaagacatgggtgatgatgtataccagcagtaccggtcacttacgcgtcagagcagtgactttgatacgcagtcaggtttttccattaatagtcaggtctttgctgcagatggtgcctccactgagacttccgcatctgggacctcccaaggagaggcttcaactccagaggagtctcgagatgggaagaaagataaagaaggggaccgggcctctgaggaaggcaaacagaaaggcaagggcagcaaacctttaatgcctacctccactatccttcgtcttctggcagagttggtgaggtcctatgttggtattgctaccctgattgccaactacagctacactgtgggccagtctgaactgatcaaagaggactgcagtgtgctagcttttgttctggaccacctgctcccacatacccagaatgcagaagacaaggacacccctgccttggcccgcctgttcctcgcaagcctggctgctgcagggagtggcacagatgcccaggtggccctagtgaatgaagtaaaagcagcccttggacgggcactggctatggctgagagtacagagaaacatgccaggcttcaggcagtgatgtgtatcatcagtactatcatggagtcctgcccctccacctccagcttctacagcagtgccacagcgaagacccagcacaatggcatgaacaacatcattcggcttttcctgaagaagggactggttaatgacctggccagagtacctcacagcttagacctgtccagtcccaacatggccaacacagtcaatgctgctctgaagcctttggaaacactttcccggattgtgaaccagcccagtagcctttttggcagcaagagtgcttctagcaagaacaagtctgagcaggatgcccaaggagcctctcaagattccagtagcaaccagcaggacccaggcgagcctggggaagcagaagtgcaggaggaggatcatgatgtcactcagacagaggtggcagatggggatatcatggatggggaggctgaaaccgactcagtggtgattgctgggcagcctgaggtgctcagttcacaagagatgcaggttgagaatgagctggaggacctgatagatgagttgcttgagagggatggcggatctgggaacagtacaattatagtgagcagaagtggagaggatgaatcacaagaggacgtgctgatggatgaagctccttccaacctcagccaagcttccaccttgcaggccaaccgagaagattccatgaatatcctggaccctgaggatgaggaggagcacactcaggaagaggacagcagtggcagtaacgaggatgaggatgatagtcaggatgaagaggaggaggaggaggaagatgaggaagatgatcaggaggatgatgaaggtgaagagggagatgaagacgatgacgacgatggctctgagatggaattggatgaggattatcctgatatgaacgcttctcccttggtccgatttgagcgctttgaccgggaggatgatctcattctctccccgccgcctgtttcctcaccttctctcccctttccatgccgtccatgatccccaccccatgtgttttaaaaaggcagtagcctttgcagggacctgtctgtcccaactgtttgaacagtgtgctcctcagattctgtgttcagaaggatttgctgcattgagacttgaaacctttggataggggaaaaaattatatatatatatatttttttgttctgtttgcatttcttaatttgtgcttggaatgtgttgatgtgcacagctaatgattcaatgcgagacaagattggcgtctgtgttgtggaggtttcaaataaagagcactcttcataa

SEQ ID NO: 467008 - DNA, 1102 bp, Homo sapiens
aagtacactccaaagacggttgtcatatacagctttggccacaatgcgtccgacaaacttgaagtagctgaggtggttggggttgcagtgggaagatggattgatggtgtaggtgactcgatcaccaggtgaggtacggaacaaggcatacatagggttaaacatctctcgagagatgatcatataccactgagcaggagttagagctgcttatatcaggactgcccaccattgacatcgatgatctgaaatccaacactgaataccacaagtaccagtccaactctattcagatccagtggttctggagagcattgcgttctttcgatcaagctgaccgtgccaagttcctccagtttgtcacgggtacttccaaggtacccctgcaaggctttgctgccctcgaaggcatgaatggcattcagaagtttcagatccatcgagatgacaggtccacagatcgcctgccttcagctcacacatgttttaatcagctggatctgcctgcctatgagagctttgagaagctccgccacatgctactgttggctatccaggagtgctctgaaggctttgggctggcctaataaggccctgcccaactccgtggggttttttttaccattgttggacctggggaggggggagttaaaaaaagaaccagaaagaaattgtcaaaaaccaataaatgaaatccaccaactcaccgtgtgtgtcccagctgccccatcttccccagcgcatacctgttcctcttctcattctctccccgccgcctgtttcctcaccttctctcccctttccatgccgtccatgatccccaccccatgtgttttaaaaaggcagtagcctttgcagggacctgtctgtcccaactgtttgaacagtgtgctcctcagattctgtgttcagaaggatttgctgcattgagacttgaaacctttggataggggaaaaaattatatatatatatatttttttgttctgtttgcatttcttaatttgtgcttggaatgtgttgatgtgcacagctaatgattcaatgcgagacaagattggcgtctgtgttgtggaggtttcaaataaagagcactcttcataa

SEQ ID NO: 467009 - DNA, 8659 bp, Homo sapiens
ctgcatccaacctggggagtgctgtcgatgagctcatgagacatcagcccacccttaaaacagatgcaacgactgccatcatcaagttacttgaagaaatctgtaatcttggaagggaccccaaatacatctgtcagaagccatcaatccagaaggcagatggcactgccactgctcctcccccaaggtctaatcatgccgcagaagaagcctctagtgaggatgaggaggaagaggaagtacaggccatgcagagctttaattctacccagcaaaatgaaactgagcctaatcagcaggttgttggtacagaggaacgtattcctattcccctcatggattacatccttaatgtgatgaaatttgtggaatctattctgagcaacaatacaacagatgaccactgccaggaatttgtgaatcagaaaggactgttgcctttggttaccattttgggtcttcccaatctgcccattgactttcccacatctgctgcctgtcaggctgttgcaggtgtctgcaaatccatattgacactgtcacatgaacccaaagtccttcaagagggtctccttcagttggactccatcctctcctccctggagcccttacaccgccccattgaatcccctgggggctcagtgttgttgcgagaactggcttgcgcaggcaatgttgctgatgctaccctctcagcccaggccacacctctgctgcatgcactcactgctgcccatgcctacatcatgatgtttgttcatacttgcagagttggacagagtgaaattcgttccatctccgtaaaccagtggggctctcaattgggtctgagtgttttgagcaagctgagccagttatactgttccctggtgtgggaaagcactgtcctcctctctctgtgtaccccaaacagcctaccatctgggtgtgaatttggccaggcagatatgcagaaactggttccaaaggatgagaaggcaggtacgacccagggcggaaaaagatcagatggggaacaggatggagcagctggaagtatggatgcttctacccagggcttattagaaggcattgggctagatggtgacacattggctcccatggagacagatgaacctactgcttcagactctaagggcaaatctaaaatcacaccagcaatggctgccagaattaagcaaatcaagcctttgttatcagcttcctccagattaggccgagcacttgctgagctatttggacttcttgttaaactttgtgtgggatctcctgtccgccagagaaggagccatcatgctgccagcaccactacagcaccgacacctgccgcgcgatcaacagcctcagctctcactaagctcttgactaaggggttatcttggcagcccccaccatatacacctactccccgattcaggctgacattcttcatctgttcagttggtttcacatccccaatgctgtttgatgagaggaagtatccctaccacctcatgctgcaaaaatttctctgctccggaggccacaatgctctttttgaaactttcaactgggctctgtccatgggaggtaaagttcctgtttctgagggattggaacactcagacttgcctgatggcacaggagaattcctagatgcctggcttatgctggtggagaagatggtgaatcccaccacggtgcttgaatctccacattcgctgcctgccaaattgcctggaggtgtccagaactttccccagttcagtgcactgcgcttccttgtggtaactcagaaagcagcctttacttgcatcaaaaacttatggaaccggaaacccctgaaggtatatggtggacgaatggctgaatcgatgctggccattctatgccacatcctccgaggagaacctgtgattcgagagagactaagcaaggagaaggaggggtctcgaggagaagaggatacagggcaagaggaaggtggctcccgccgggaacctcaagtcaaccagcaacaactgcaacagctcatggacatgggcttcacaagggaacatgcaatggaggcactgttgaacaccagcaccatggagcaggccacagagtaccttttaacccaccctcctccaatcatgggaggagttgttcgggatctcagcatgtctgaagaggaccagatgatgagagcaattgctatgtctctgggacaggatattccaatggatcaaagggcagagtcacctgaggaagttgcttgccggaaggaggaagaggaacggaaagctcgggaaaagcaggaggaggaagaggctaaatgtctagagaagttccaggatgctgacccgttggaacaagatgagctccacactttcacagatactatgttgccaggctgcttccaccttcttgatgagctgccagacacagtataccgtgtgtgtgacctgatcatgacagcaatcaaacgtaatggagcagattatcgtgacatgattctgaagcaagtagtcaatcaggtgtgggaagctgctgatgtattgatcaaagctgctcttcccctgacaacaagtgacacaaaaaccgtgtcagagtggataagtcagatggccacactgccccaggcctccaatttggctactagaatcttgcttttaacgctactttttgaggagttgaagctaccttgtgcttgggtggttgaatcaagtggcatccttaatgtcctaatcaaactcttggaagtggttcagccctgcctccaggcagccaaggagcagaaggaagtccagaccccaaagtggatcacaccagtgttgctcctgattgatttctatgaaaagacagccatctcctcaaaaaggagagcccagatgactaagtacctgcaatccaacagcaacaactggcgctggtttgatgatcgctctgggcgttggtgtagttacagtgcaagcaacaatagcactattgattctgcctggaaatctggagagacaagcgtgcgattcactgcaggccgaagaagatacacggtccaattcactacaatggtgcaggttaatgaggaaacagggaaccgacgccctgtgatgctgactctcctcagggtacctcggctgaataaaaattcaaaaaacagcaatggacaggaactagagaagacgctggaagaaagcaaagaaatggatatcaaacgtaaagaaaataaaggcaatgatacccctttggccctagagagtacaaacactgaaaaggagacaagcctggaggaaacaaaaatcggggagatcctgatccagggcttgacagaagatatggtgactgttttaatccgggcctgcgtgagcatgctgggagtccctgtggacccagatactttgcatgccacccttcgtctctgtctgaggctcacccgggaccacaaatatgccatgatgtttgcagaactgaagagtacccgcatgatcttgaatttgacccagagctcaggcttcaatgggtttactcccctggtcacccttctcttaagacacatcattgaggacccctgtacccttcgtcataccatggaaaaggttgttcgctcagcagctacaagtggagctggtagcactacctctggtgttgtgtctggcagcctcggctctcgggagatcaactacatccttcgtgtccttgggccagccgcatgccgcaatccagacatattcacagaagtggccaactgctgtatccgcatcgcccttcctgcccctcgaggctcaggaactgcttcagatgatgaatttgagaatcttagaattaaaggccctaatgctgtacagctggtgaagaccacccctttgaagccctcacctctgcctgtcatccctgatactatcaaggaagtgatctatgatatgctgaatgctctggctgcataccatgctccagaggaagcagataaatctgatcctaaacctggggttatgacccaagaggttggccagctcctgcaagacatgggtgatgatgtataccagcagtaccggtcacttacgcgtcagagcagtgactttgatacgcagtcaggtttttccattaatagtcaggtctttgctgcagatggtgcctccactgagacttccgcatctgggacctcccaaggagaggcttcaactccagaggagtctcgagatgggaagaaagataaagaaggggaccgggcctctgaggaaggcaaacagaaaggcaagggcagcaaacctttaatgcctacctccactatccttcgtcttctggcagagttggtgaggtcctatgttggtattgctaccctgattgccaactacagctacactgtgggccagtctgaactgatcaaagaggactgcagtgtgctagcttttgttctggaccacctgctcccacatacccagaatgcagaagacaaggacacccctgccttggcccgcctgttcctcgcaagcctggctgctgcagggagtggcacagatgcccaggtggccctagtgaatgaagtaaaagcagcccttggacgggcactggctatggctgagagtacagagaaacatgccaggcttcaggcagtgatgtgtatcatcagtactatcatggagtcctgcccctccacctccagcttctacagcagtgccacagcgaagacccagcacaatggcatgaacaacatcattcggcttttcctgaagaagggactggttaatgacctggccagagtacctcacagcttagacctgtccagtcccaacatggccaacacagtcaatgctgctctgaagcctttggaaacactttcccggattgtgaaccagcccagtagcctttttggcagcaagagtgcttctagcaagaacaagtctgagcaggatgcccaaggagcctctcaagattccagtagcaaccagcaggacccaggcgagcctggggaagcagaagtgcaggaggaggatcatgatgtcactcagacagaggtggcagatggggatatcatggatggggaggctgaaaccgactcagtggtgattgctgggcagcctgaggtgctcagttcacaagagatgcaggttgagaatgagctggaggacctgatagatgagttgcttgagagggatggcggatctgggaacagtacaattatagtgagcagaagtggagaggatgaatcacaagaggacgtgctgatggatgaagctccttccaacctcagccaagcttccaccttgcaggccaaccgagaagattccatgaatatcctggaccctgaggatgaggaggagcacactcaggaagaggacagcagtggcagtaacgaggatgaggatgatagtcaggatgaagaggaggaggaggaggaagatgaggaagatgatcaggaggatgatgaaggtgaagagggagatgaagacgatgacgacgatggctctgagatggaattggatgaggattatcctgatatgaacgcttctcccttggtccgatttgagcgctttgaccgggaggatgatctcatcattgagtttgacaacatgttctccagtgctacagacatccccccatccccaggaaatatccctaccacccatccactgatggtgcgccatgcagaccacagttctctgacactgggcagtggctcttcaacaactcgtctcacccagggcatcgggcgcagtcagaggaccctaaggcagctgacggccaatactggccacaccattcatgttcactaccctgggaatcgccagcccaaccctcctcttatactgcagaggttgcttggtccctcagctgctgctgacatccttcagctgagcagcagccttcccctacaaagccggggtcgggcccgcctcctggtaggcaacgatgacgtccacatcatcgcccgttctgatgatgagctgctggatgactttttccatgatcagagcacagctaccagccaagcaggaaccctgtccagcatccccacagccctgacccgctggacagaagaatgcaaagttctcgatgctgagagcatgcatgactgtgtttcagtggttaaagtgtccattgtcaatcacctggaattcctgagggatgaggagctggaagaaaggcgagagaagcgcaggaaacaactggctgaggaagaaacaaagataactgataaaggcaaagaagataaggagaacagggatcagagtgcacagtgtactgcatctaagtcaaatgactccactgaacagaatctctcagatgggacgcctatgcctgacagctacccaacaaccccatcttcaactgatgcagctacatctgagtccaaggagacccttggcactctgcaatcctcacaacagcaaccaacactcccaaccccaccagctttgggagaggttcctcaggagctgcagtctccagctggagaagggggcagctctacacagctattgatgcctgtagagccagaggaattgggtcccacaaggccaagtggggaagcagaaacaactcagatggagttatccccagctcccactataacctcactttccccagagagagctgaggattctgatgcactgacggctgtcagcagtcagctagaaggctctcctatggatacaagcagcctggcttcctgtaccttagaggaggctgtgggtgacacttcagcagctggcagttctgagcagcccagagcaggcagctccactcctggggatgccccaccagctgtggcggaagtgcaaggcaggagtgatgggtcaggggaatctgcccagccacctgaggacagctccccacctgcatcctctgagagctcttccaccagagattctgccgtggccatttctggagcagattcccgaggaatcctagaagagccgttgccttcaacaagcagtgaagaagaagatccccttgcgggtatcagtctccctgaaggtgtggacccctcttttctggctgccctgcctgatgacatccgtcgggaagttctacagaaccagctaggcattcgtccaccaacccggactgccccctccacaaatagctcagcgcctgcagtggtggggaatcctggtgtgactgaagtgagccctgagtttctggctgccctgcctccagccattcaggaggaagtactggcacagcagagagctgagcagcagcgacgagaactagcacagaatgccagctcagacacccctatggaccctgtgaccttcatccagactctgccctcagacctgcgccgtagtgtcctagaggatatggaggacagtgtgttagctgtgatgccacctgacattgcagctgaggctcaagccctgagacgagagcaagaagcccggcagcgacagctcatgcatgagcgtctgtttgggcacagtagcacctccgcactctctgctattctccgaagcccggctttcaccagtcgcttaagtggcaaccgtggggtccagtatactcgccttgctgtgcagagaggtggcaccttccagatggggggtagcagcagccataacaggccttctggcagtaatgtagatactctcctccgcctccgaggacggctccttctggaccacgaagccctttcttgtctcttggtcctactttttgtggatgagccaaagctcaatactagccgtctacaccgagtactgagaaatctctgctaccatgcccagacccgccactgggtcatccgcagtctgctctccatcttgcagcgcagcagtgagagtgagctatgcattgaaacacccaaactcactacaagtgaggaaaagggcaaaaagtcgagcaagagctgtgggtcaagtagccatgagaaccgtcccctggacctgctacacaagatggagtcaaagagctccaaccagctttcctggctctcagtatccatggatgcagccctaggctgcaggactaatatatttcagatccagcgttcaggggggcgtaaacataccgagaagcatgcaagcggtggctccaccgtccacatccatccccaagctgctcctgttgtctgcagacacgttttggatacactcattcaattggccaaggtatttcccagccacttcacacagcagcggaccaaagaaacaaactgtgagagtgatcgggaaaggggcaataaggcctgtagcccatgctcctcacagtcctccagcagtggcatttgcacagacttctgggacttattggtaaaactggacaacatgaatgtcagccggaaaggcaagaactccgtgaagtcagtgccagtgagcgctggcggtgagggggaaacctctccatacagcctcgaggcctctccactggggcagctcatgaacatgttgtcacacccagtcatccgccggagctctctcttaactgagaaactcctcagactcctttctctcatctcaattgctctcccagaaaacaaggtgtcagaagcacaggctaattctggcagcggtgcttcctccaccaccactgccacctcaaccacatctaccaccaccaccactgccgccagctcgctcctgagtgcagctcgcacctgagttagcatgctcgcccgctgagttagcagctcgcgcctgagttatgcagctcgcttctgagtttagcacgctcgctcctgttataccagctcgcccgt

SEQ ID NO: 467010 - DNA, 1157 bp, Homo sapiens
gcaggctggtacgccccggaagttagggatctcaccttcagcactgaggtccaagagtttggagtttgtgaagttcgtgacctcaaacccaatggggccaacatcttggtaacagaggagaataagaaggagtatgtacacctggtatgccagatgagaatgacaggagccatccgcaagcagttggcggctttcttagaaggcttctatgagatcattccaaagcgcctcatttccatcttcactgagcaggagttagagctgcttatatcaggactgcccaccattgacatcgatgatctgaaatccaacactgaataccacaagtaccagtccaactctattcagatccagtggttctggagagcattgcgttctttcgatcaagctgaccgtgccaagttcctccagtttgtcacgggtacttccaaggtacccctgcaaggctttgctgccctcgaaggcatgaatggcattcagaagtttcagatccatcgagatgacaggtccacagatcgcctgccttcagctcacacatgttttaatcagctggatctgcctgcctatgagagctttgagaagctccgccacatgctactgttggctatccaggagtgctctgaaggctttgggctggcctaataaggccctgcccaactccgtggggttttttttaccattgttggacctggggaggggggagttaaaaaaagaaccagaaagaaattgtcaaaaaccaataaatgaaatccaccaactcaccgtgtgtgtcccagctgccccatcttccccagcgcatacctgttcctcttctcattctctccccgccgcctgtttcctcaccttctctcccctttccatgccgtccatgatccccaccccatgtgttttaaaaaggcagtagcctttgcagggacctgtctgtcccaactgtttgaacagtgtgctcctcagattctgtgttcagaaggatttgctgcattgagacttgaaacctttggataggggaaaaaattatatatatatatatttttttgttctgtttgcatttcttaatttgtgcttggaatgtgttgatgtgcacagctaatgattcaatgcgagacaagattggcgtctgtgttgtggaggtttcaaataaagagcactcttcataa

SEQ ID NO: 467011 - DNA, 9945 bp, Homo sapiens
ctgcatccaacctggggagtgctgtcgatgagctcatgagacatcagcccacccttaaaacagatgcaacgactgccatcatcaagttacttgaagaaatctgtaatcttggaagggaccccaaatacatctgtcagaagccatcaatccagaaggcagatggcactgccactgctcctcccccaaggtctaatcatgccgcagaagaagcctctagtgaggatgaggaggaagaggaagtacaggccatgcagagctttaattctacccagcaaaatgaaactgagcctaatcagcaggttgttggtacagaggaacgtattcctattcccctcatggattacatccttaatgtgatgaaatttgtggaatctattctgagcaacaatacaacagatgaccactgccaggaatttgtgaatcagaaaggactgttgcctttggttaccattttgggtcttcccaatctgcccattgactttcccacatctgctgcctgtcaggctgttgcaggtgtctgcaaatccatattgacactgtcacatgaacccaaagtccttcaagagggtctccttcagttggactccatcctctcctccctggagcccttacaccgccccattgaatcccctgggggctcagtgttgttgcgagaactggcttgcgcaggcaatgttgctgatgctaccctctcagcccaggccacacctctgctgcatgcactcactgctgcccatgcctacatcatgatgtttgttcatacttgcagagttggacagagtgaaattcgttccatctccgtaaaccagtggggctctcaattgggtctgagtgttttgagcaagctgagccagttatactgttccctggtgtgggaaagcactgtcctcctctctctgtgtaccccaaacagcctaccatctgggtgtgaatttggccaggcagatatgcagaaactggttccaaaggatgagaaggcaggtacgacccagggcggaaaaagatcagatggggaacaggatggagcagctggaagtatggatgcttctacccagggcttattagaaggcattgggctagatggtgacacattggctcccatggagacagatgaacctactgcttcagactctaagggcaaatctaaaatcacaccagcaatggctgccagaattaagcaaatcaagcctttgttatcagcttcctccagattaggccgagcacttgctgagctatttggacttcttgttaaactttgtgtgggatctcctgtccgccagagaaggagccatcatgctgccagcaccactacagcaccgacacctgccgcgcgatcaacagcctcagctctcactaagctcttgactaaggggttatcttggcagcccccaccatatacacctactccccgattcaggctgacattcttcatctgttcagttggtttcacatccccaatgctgtttgatgagaggaagtatccctaccacctcatgctgcaaaaatttctctgctccggaggccacaatgctctttttgaaactttcaactgggctctgtccatgggaggtaaagttcctgtttctgagggattggaacactcagacttgcctgatggcacaggagaattcctagatgcctggcttatgctggtggagaagatggtgaatcccaccacggtgcttgaatctccacattcgctgcctgccaaattgcctggaggtgtccagaactttccccagttcagtgcactgcgcttccttgtggtaactcagaaagcagcctttacttgcatcaaaaacttatggaaccggaaacccctgaaggtatatggtggacgaatggctgaatcgatgctggccattctatgccacatcctccgaggagaacctgtgattcgagagagactaagcaaggagaaggaggggtctcgaggagaagaggatacagggcaagaggaaggtggctcccgccgggaacctcaagtcaaccagcaacaactgcaacagctcatggacatgggcttcacaagggaacatgcaatggaggcactgttgaacaccagcaccatggagcaggccacagagtaccttttaacccaccctcctccaatcatgggaggagttgttcgggatctcagcatgtctgaagaggaccagatgatgagagcaattgctatgtctctgggacaggatattccaatggatcaaagggcagagtcacctgaggaagttgcttgccggaaggaggaagaggaacggaaagctcgggaaaagcaggaggaggaagaggctaaatgtctagagaagttccaggatgctgacccgttggaacaagatgagctccacactttcacagatactatgttgccaggctgcttccaccttcttgatgagctgccagacacagtataccgtgtgtgtgacctgatcatgacagcaatcaaacgtaatggagcagattatcgtgacatgattctgaagcaagtagtcaatcaggtgtgggaagctgctgatgtattgatcaaagctgctcttcccctgacaacaagtgacacaaaaaccgtgtcagagtggataagtcagatggccacactgccccaggcctccaatttggctactagaatcttgcttttaacgctactttttgaggagttgaagctaccttgtgcttgggtggttgaatcaagtggcatccttaatgtcctaatcaaactcttggaagtggttcagccctgcctccaggcagccaaggagcagaaggaagtccagaccccaaagtggatcacaccagtgttgctcctgattgatttctatgaaaagacagccatctcctcaaaaaggagagcccagatgactaagtacctgcaatccaacagcaacaactggcgctggtttgatgatcgctctgggcgttggtgtagttacagtgcaagcaacaatagcactattgattctgcctggaaatctggagagacaagcgtgcgattcactgcaggccgaagaagatacacggtccaattcactacaatggtgcaggttaatgaggaaacagggaaccgacgccctgtgatgctgactctcctcagggtacctcggctgaataaaaattcaaaaaacagcaatggacaggaactagagaagacgctggaagaaagcaaagaaatggatatcaaacgtaaagaaaataaaggcaatgatacccctttggccctagagagtacaaacactgaaaaggagacaagcctggaggaaacaaaaatcggggagatcctgatccagggcttgacagaagatatggtgactgttttaatccgggcctgcgtgagcatgctgggagtccctgtggacccagatactttgcatgccacccttcgtctctgtctgaggctcacccgggaccacaaatatgccatgatgtttgcagaactgaagagtacccgcatgatcttgaatttgacccagagctcaggcttcaatgggtttactcccctggtcacccttctcttaagacacatcattgaggacccctgtacccttcgtcataccatggaaaaggttgttcgctcagcagctacaagtggagctggtagcactacctctggtgttgtgtctggcagcctcggctctcgggagatcaactacatccttcgtgtccttgggccagccgcatgccgcaatccagacatattcacagaagtggccaactgctgtatccgcatcgcccttcctgcccctcgaggctcaggaactgcttcagatgatgaatttgagaatcttagaattaaaggccctaatgctgtacagctggtgaagaccacccctttgaagccctcacctctgcctgtcatccctgatactatcaaggaagtgatctatgatatgctgaatgctctggctgcataccatgctccagaggaagcagataaatctgatcctaaacctggggttatgacccaagaggttggccagctcctgcaagacatgggtgatgatgtataccagcagtaccggtcacttacgcgtcagagcagtgactttgatacgcagtcaggtttttccattaatagtcaggtctttgctgcagatggtgcctccactgagacttccgcatctgggacctcccaaggagaggcttcaactccagaggagtctcgagatgggaagaaagataaagaaggggaccgggcctctgaggaaggcaaacagaaaggcaagggcagcaaacctttaatgcctacctccactatccttcgtcttctggcagagttggtgaggtcctatgttggtattgctaccctgattgccaactacagctacactgtgggccagtctgaactgatcaaagaggactgcagtgtgctagcttttgttctggaccacctgctcccacatacccagaatgcagaagacaaggacacccctgccttggcccgcctgttcctcgcaagcctggctgctgcagggagtggcacagatgcccaggtggccctagtgaatgaagtaaaagcagcccttggacgggcactggctatggctgagagtacagagaaacatgccaggcttcaggcagtgatgtgtatcatcagtactatcatggagtcctgcccctccacctccagcttctacagcagtgccacagcgaagacccagcacaatggcatgaacaacatcattcggcttttcctgaagaagggactggttaatgacctggccagagtacctcacagcttagacctgtccagtcccaacatggccaacacagtcaatgctgctctgaagcctttggaaacactttcccggattgtgaaccagcccagtagcctttttggcagcaagagtgcttctagcaagaacaagtctgagcaggatgcccaaggagcctctcaagattccagtagcaaccagcaggacccaggcgagcctggggaagcagaagtgcaggaggaggatcatgatgtcactcagacagaggtggcagatggggatatcatggatggggaggctgaaaccgactcagtggtgattgctgggcagcctgaggtgctcagttcacaagagatgcaggttgagaatgagctggaggacctgatagatgagttgcttgagagggatggcggatctgggaacagtacaattatagtgagcagaagtggagaggatgaatcacaagaggacgtgctgatggatgaagctccttccaacctcagccaagcttccaccttgcaggccaaccgagaagattccatgaatatcctggaccctgaggatgaggaggagcacactcaggaagaggacagcagtggcagtaacgaggatgaggatgatagtcaggatgaagaggaggaggaggaggaagatgaggaagatgatcaggaggatgatgaaggtgaagagggagatgaagacgatgacgacgatggctctgagatggaattggatgaggattatcctgatatgaacgcttctcccttggtccgatttgagcgctttgaccgggaggatgatctcatcattgagtttgacaacatgttctccagtgctacagacatccccccatccccaggaaatatccctaccacccatccactgatggtgcgccatgcagaccacagttctctgacactgggcagtggctcttcaacaactcgtctcacccagggcatcgggcgcagtcagaggaccctaaggcagctgacggccaatactggccacaccattcatgttcactaccctgggaatcgccagcccaaccctcctcttatactgcagaggttgcttggtccctcagctgctgctgacatccttcagctgagcagcagccttcccctacaaagccggggtcgggcccgcctcctggtaggcaacgatgacgtccacatcatcgcccgttctgatgatgagctgctggatgactttttccatgatcagagcacagctaccagccaagcaggaaccctgtccagcatccccacagccctgacccgctggacagaagaatgcaaagttctcgatgctgagagcatgcatgactgtgtttcagtggttaaagtgtccattgtcaatcacctggaattcctgagggatgaggagctggaagaaaggcgagagaagcgcaggaaacaactggctgaggaagaaacaaagataactgataaaggcaaagaagataaggagaacagggatcagagtgcacagtgtactgcatctaagtcaaatgactccactgaacagaatctctcagatgggacgcctatgcctgacagctacccaacaaccccatcttcaactgatgcagctacatctgagtccaaggagacccttggcactctgcaatcctcacaacagcaaccaacactcccaaccccaccagctttgggagaggttcctcaggagctgcagtctccagctggagaagggggcagctctacacagctattgatgcctgtagagccagaggaattgggtcccacaaggccaagtggggaagcagaaacaactcagatggagttatccccagctcccactataacctcactttccccagagagagctgaggattctgatgcactgacggctgtcagcagtcagctagaaggctctcctatggatacaagcagcctggcttcctgtaccttagaggaggctgtgggtgacacttcagcagctggcagttctgagcagcccagagcaggcagctccactcctggggatgccccaccagctgtggcggaagtgcaaggcaggagtgatgggtcaggggaatctgcccagccacctgaggacagctccccacctgcatcctctgagagctcttccaccagagattctgccgtggccatttctggagcagattcccgaggaatcctagaagagccgttgccttcaacaagcagtgaagaagaagatccccttgcgggtatcagtctccctgaaggtgtggacccctcttttctggctgccctgcctgatgacatccgtcgggaagttctacagaaccagctaggcattcgtccaccaacccggactgccccctccacaaatagctcagcgcctgcagtggtggggaatcctggtgtgactgaagtgagccctgagtttctggctgccctgcctccagccattcaggaggaagtactggcacagcagagagctgagcagcagcgacgagaactagcacagaatgccagctcagacacccctatggaccctgtgaccttcatccagactctgccctcagacctgcgccgtagtgtcctagaggatatggaggacagtgtgttagctgtgatgccacctgacattgcagctgaggctcaagccctgagacgagagcaagaagcccggcagcgacagctcatgcatgagcgtctgtttgggcacagtagcacctccgcactctctgctattctccgaagcccggctttcaccagtcgcttaagtggcaaccgtggggtccagtatactcgccttgctgtgcagagaggtggcaccttccagatggggggtagcagcagccataacaggccttctggcagtaatgtagatactctcctccgcctccgaggacggctccttctggaccacgaagccctttcttgtctcttggtcctactttttgtggatgagccaaagctcaatactagccgtctacaccgagtactgagaaatctctgctaccatgcccagacccgccactgggtcatccgcagtctgctctccatcttgcagcgcagcagtgagagtgagctatgcattgaaacacccaaactcactacaagtgaggaaaagggcaaaaagtcgagcaagagctgtgggtcaagtagccatgagaaccgtcccctggacctgctacacaagatggagtcaaagagctccaaccagctttcctggctctcagtatccatggatgcagccctaggctgcaggactaatatatttcagatccagcgttcaggggggcgtaaacataccgagaagcatgcaagcggtggctccaccgtccacatccatccccaagctgctcctgttgtctgcagacacgttttggatacactcattcaattggccaaggtatttcccagccacttcacacagcagcggaccaaagaaacaaactgtgagagtgatcgggaaaggggcaataaggcctgtagcccatgctcctcacagtcctccagcagtggcatttgcacagacttctgggacttattggtaaaactggacaacatgaatgtcagccggaaaggcaagaactccgtgaagtcagtgccagtgagcgctggcggtgagggggaaacctctccatacagcctcgaggcctctccactggggcagctcatgaacatgttgtcacacccagtcatccgccggagctctctcttaactgagaaactcctcagactcctttctctcatctcaattgctctcccagaaaacaaggtgtcagaagcacaggctaattctggcagcggtgcttcctccaccaccactgccacctcaaccacatctaccaccaccaccactgccgcctccaccacgcccacaccccctactgcacccacccctgtcacttctgctccagccctggttgctgccacggctatttccaccattgtcgtagctgcttcgaccacagtgactacccccacgactgctaccactactgtttcaatttctcccactactaagggcagcaaatctccagcgaaggtgagtgatgggggcagcagcagtacagactttaagatggtgtcctctggcctcactgaaaaccagctacagctctctgtagaggtgttgacatcccactcttgttctgaggaaggcttagaggatgcagccaacgtactactgcagctctcccggggggactctgggacccgggacactgttctcaagctgctactgaatggagcccgccatctgggttataccctttgtaaacaaataggtaccctgctggccgagctgcgggaatacaacctcgagcagcagcggcgagcccaatgtgaaaccctctctcctgatggcctgcctgaggagcagccacagaccaccaagctgaagggcaaaatgcagagcaggtttgacatggctgagaatgtggtaattgtggcatctcagaagcgacctttgggtggccgggagctccagctgccttctatgtccatgttgacatccaagacatctacccagaagttcttcttgagggtactacaggtcatcatccagctccgggacgacacgcgccgggctaacaagaaagccaagcagacaggcaggctaggttcctccggtttaggctcagctagcagcatccaggcagctgttcggcagctggaggctgaggctgatgccattatacaaatggtacgtgagggtcaaagggcgcggagacagcaacaagcagcaacgtcggagtctagccagtcagaggcgtctgtccggagggaggaatcacccatggatgtggaccagccatctcccagtgctcaagatactcaatccattggtcagtactacttcctgtttccagccgagcaaaagggatagccagtcttctggaatgtctgctgaatcccctgctcccagcatatataagcccagtgttttcccatttgttccagtaaaccctggtttctgtaaatgatgacaggtgtttgacaaccaaggcacacttttctttcctgtagtaaaggaaagaaaatggtgggatatcatgcattcagacagcatgtttttatggggttttctcttgttgtggtggttgtttttgagacagtctccctctgtcgccaggctggaatgcagtggcacgatgtctgctcactgcaacctctgcctcctgggttcaagcaattctcctgtctcagctactcgggaggctgcggctggaggatcgcttgagtccaggagttctgggctgtagtgcgctatgccgatc

SEQ ID NO: 467012 - DNA, 10066 bp, Homo sapiens
ctgcatccaacctggggagtgctgtcgatgagctcatgagacatcagcccacccttaaaacagatgcaacgactgccatcatcaagttacttgaagaaatctgtaatcttggaagggaccccaaatacatctgtcagaagccatcaatccagaaggcagatggcactgccactgctcctcccccaaggtctaatcatgccgcagaagaagcctctagtgaggatgaggaggaagaggaagtacaggccatgcagagctttaattctacccagcaaaatgaaactgagcctaatcagcaggttgttggtacagaggaacgtattcctattcccctcatggattacatccttaatgtgatgaaatttgtggaatctattctgagcaacaatacaacagatgaccactgccaggaatttgtgaatcagaaaggactgttgcctttggttaccattttgggtcttcccaatctgcccattgactttcccacatctgctgcctgtcaggctgttgcaggtgtctgcaaatccatattgacactgtcacatgaacccaaagtccttcaagagggtctccttcagttggactccatcctctcctccctggagcccttacaccgccccattgaatcccctgggggctcagtgttgttgcgagaactggcttgcgcaggcaatgttgctgatgctaccctctcagcccaggccacacctctgctgcatgcactcactgctgcccatgcctacatcatgatgtttgttcatacttgcagagttggacagagtgaaattcgttccatctccgtaaaccagtggggctctcaattgggtctgagtgttttgagcaagctgagccagttatactgttccctggtgtgggaaagcactgtcctcctctctctgtgtaccccaaacagcctaccatctgggtgtgaatttggccaggcagatatgcagaaactggttccaaaggatgagaaggcaggtacgacccagggcggaaaaagatcagatggggaacaggatggagcagctggaagtatggatgcttctacccagggcttattagaaggcattgggctagatggtgacacattggctcccatggagacagatgaacctactgcttcagactctaagggcaaatctaaaatcacaccagcaatggctgccagaattaagcaaatcaagcctttgttatcagcttcctccagattaggccgagcacttgctgagctatttggacttcttgttaaactttgtgtgggatctcctgtccgccagagaaggagccatcatgctgccagcaccactacagcaccgacacctgccgcgcgatcaacagcctcagctctcactaagctcttgactaaggggttatcttggcagcccccaccatatacacctactccccgattcaggctgacattcttcatctgttcagttggtttcacatccccaatgctgtttgatgagaggaagtatccctaccacctcatgctgcaaaaatttctctgctccggaggccacaatgctctttttgaaactttcaactgggctctgtccatgggaggtaaagttcctgtttctgagggattggaacactcagacttgcctgatggcacaggagaattcctagatgcctggcttatgctggtggagaagatggtgaatcccaccacggtgcttgaatctccacattcgctgcctgccaaattgcctggaggtgtccagaactttccccagttcagtgcactgcgcttccttgtggtaactcagaaagcagcctttacttgcatcaaaaacttatggaaccggaaacccctgaaggtatatggtggacgaatggctgaatcgatgctggccattctatgccacatcctccgaggagaacctgtgattcgagagagactaagcaaggagaaggaggggtctcgaggagaagaggatacagggcaagaggaaggtggctcccgccgggaacctcaagtcaaccagcaacaactgcaacagctcatggacatgggcttcacaagggaacatgcaatggaggcactgttgaacaccagcaccatggagcaggccacagagtaccttttaacccaccctcctccaatcatgggaggagttgttcgggatctcagcatgtctgaagaggaccagatgatgagagcaattgctatgtctctgggacaggatattccaatggatcaaagggcagagtcacctgaggaagttgcttgccggaaggaggaagaggaacggaaagctcgggaaaagcaggaggaggaagaggctaaatgtctagagaagttccaggatgctgacccgttggaacaagatgagctccacactttcacagatactatgttgccaggctgcttccaccttcttgatgagctgccagacacagtataccgtgtgtgtgacctgatcatgacagcaatcaaacgtaatggagcagattatcgtgacatgattctgaagcaagtagtcaatcaggtgtgggaagctgctgatgtattgatcaaagctgctcttcccctgacaacaagtgacacaaaaaccgtgtcagagtggataagtcagatggccacactgccccaggcctccaatttggctactagaatcttgcttttaacgctactttttgaggagttgaagctaccttgtgcttgggtggttgaatcaagtggcatccttaatgtcctaatcaaactcttggaagtggttcagccctgcctccaggcagccaaggagcagaaggaagtccagaccccaaagtggatcacaccagtgttgctcctgattgatttctatgaaaagacagccatctcctcaaaaaggagagcccagatgactaagtacctgcaatccaacagcaacaactggcgctggtttgatgatcgctctgggcgttggtgtagttacagtgcaagcaacaatagcactattgattctgcctggaaatctggagagacaagcgtgcgattcactgcaggccgaagaagatacacggtccaattcactacaatggtgcaggttaatgaggaaacagggaaccgacgccctgtgatgctgactctcctcagggtacctcggctgaataaaaattcaaaaaacagcaatggacaggaactagagaagacgctggaagaaagcaaagaaatggatatcaaacgtaaagaaaataaaggcaatgatacccctttggccctagagagtacaaacactgaaaaggagacaagcctggaggaaacaaaaatcggggagatcctgatccagggcttgacagaagatatggtgactgttttaatccgggcctgcgtgagcatgctgggagtccctgtggacccagatactttgcatgccacccttcgtctctgtctgaggctcacccgggaccacaaatatgccatgatgtttgcagaactgaagagtacccgcatgatcttgaatttgacccagagctcaggcttcaatgggtttactcccctggtcacccttctcttaagacacatcattgaggacccctgtacccttcgtcataccatggaaaaggttgttcgctcagcagctacaagtggagctggtagcactacctctggtgttgtgtctggcagcctcggctctcgggagatcaactacatccttcgtgtccttgggccagccgcatgccgcaatccagacatattcacagaagtggccaactgctgtatccgcatcgcccttcctgcccctcgaggctcaggaactgcttcagatgatgaatttgagaatcttagaattaaaggccctaatgctgtacagctggtgaagaccacccctttgaagccctcacctctgcctgtcatccctgatactatcaaggaagtgatctatgatatgctgaatgctctggctgcataccatgctccagaggaagcagataaatctgatcctaaacctggggttatgacccaagaggttggccagctcctgcaagacatgggtgatgatgtataccagcagtaccggtcacttacgcgtcagagcagtgactttgatacgcagtcaggtttttccattaatagtcaggtctttgctgcagatggtgcctccactgagacttccgcatctgggacctcccaaggagaggcttcaactccagaggagtctcgagatgggaagaaagataaagaaggggaccgggcctctgaggaaggcaaacagaaaggcaagggcagcaaacctttaatgcctacctccactatccttcgtcttctggcagagttggtgaggtcctatgttggtattgctaccctgattgccaactacagctacactgtgggccagtctgaactgatcaaagaggactgcagtgtgctagcttttgttctggaccacctgctcccacatacccagaatgcagaagacaaggacacccctgccttggcccgcctgttcctcgcaagcctggctgctgcagggagtggcacagatgcccaggtggccctagtgaatgaagtaaaagcagcccttggacgggcactggctatggctgagagtacagagaaacatgccaggcttcaggcagtgatgtgtatcatcagtactatcatggagtcctgcccctccacctccagcttctacagcagtgccacagcgaagacccagcacaatggcatgaacaacatcattcggcttttcctgaagaagggactggttaatgacctggccagagtacctcacagcttagacctgtccagtcccaacatggccaacacagtcaatgctgctctgaagcctttggaaacactttcccggattgtgaaccagcccagtagcctttttggcagcaagagtgcttctagcaagaacaagtctgagcaggatgcccaaggagcctctcaagattccagtagcaaccagcaggacccaggcgagcctggggaagcagaagtgcaggaggaggatcatgatgtcactcagacagaggtggcagatggggatatcatggatggggaggctgaaaccgactcagtggtgattgctgggcagcctgaggtgctcagttcacaagagatgcaggttgagaatgagctggaggacctgatagatgagttgcttgagagggatggcggatctgggaacagtacaattatagtgagcagaagtggagaggatgaatcacaagaggacgtgctgatggatgaagctccttccaacctcagccaagcttccaccttgcaggccaaccgagaagattccatgaatatcctggaccctgaggatgaggaggagcacactcaggaagaggacagcagtggcagtaacgaggatgaggatgatagtcaggatgaagaggaggaggaggaggaagatgaggaagatgatcaggaggatgatgaaggtgaagagggagatgaagacgatgacgacgatggctctgagatggaattggatgaggattatcctgatatgaacgcttctcccttggtccgatttgagcgctttgaccgggaggatgatctcatcattgagtttgacaacatgttctccagtgctacagacatccccccatccccaggaaatatccctaccacccatccactgatggtgcgccatgcagaccacagttctctgacactgggcagtggctcttcaacaactcgtctcacccagggcatcgggcgcagtcagaggaccctaaggcagctgacggccaatactggccacaccattcatgttcactaccctgggaatcgccagcccaaccctcctcttatactgcagaggttgcttggtccctcagctgctgctgacatccttcagctgagcagcagccttcccctacaaagccggggtcgggcccgcctcctggtaggcaacgatgacgtccacatcatcgcccgttctgatgatgagctgctggatgactttttccatgatcagagcacagctaccagccaagcaggaaccctgtccagcatccccacagccctgacccgctggacagaagaatgcaaagttctcgatgctgagagcatgcatgactgtgtttcagtggttaaagtgtccattgtcaatcacctggaattcctgagggatgaggagctggaagaaaggcgagagaagcgcaggaaacaactggctgaggaagaaacaaagataactgataaaggcaaagaagataaggagaacagggatcagagtgcacagtgtactgcatctaagtcaaatgactccactgaacagaatctctcagatgggacgcctatgcctgacagctacccaacaaccccatcttcaactgatgcagctacatctgagtccaaggagacccttggcactctgcaatcctcacaacagcaaccaacactcccaaccccaccagctttgggagaggttcctcaggagctgcagtctccagctggagaagggggcagctctacacagctattgatgcctgtagagccagaggaattgggtcccacaaggccaagtggggaagcagaaacaactcagatggagttatccccagctcccactataacctcactttccccagagagagctgaggattctgatgcactgacggctgtcagcagtcagctagaaggctctcctatggatacaagcagcctggcttcctgtaccttagaggaggctgtgggtgacacttcagcagctggcagttctgagcagcccagagcaggcagctccactcctggggatgccccaccagctgtggcggaagtgcaaggcaggagtgatgggtcaggggaatctgcccagccacctgaggacagctccccacctgcatcctctgagagctcttccaccagagattctgccgtggccatttctggagcagattcccgaggaatcctagaagagccgttgccttcaacaagcagtgaagaagaagatccccttgcgggtatcagtctccctgaaggtgtggacccctcttttctggctgccctgcctgatgacatccgtcgggaagttctacagaaccagctaggcattcgtccaccaacccggactgccccctccacaaatagctcagcgcctgcagtggtggggaatcctggtgtgactgaagtgagccctgagtttctggctgccctgcctccagccattcaggaggaagtactggcacagcagagagctgagcagcagcgacgagaactagcacagaatgccagctcagacacccctatggaccctgtgaccttcatccagactctgccctcagacctgcgccgtagtgtcctagaggatatggaggacagtgtgttagctgtgatgccacctgacattgcagctgaggctcaagccctgagacgagagcaagaagcccggcagcgacagctcatgcatgagcgtctgtttgggcacagtagcacctccgcactctctgctattctccgaagcccggctttcaccagtcgcttaagtggcaaccgtggggtccagtatactcgccttgctgtgcagagaggtggcaccttccagatggggggtagcagcagccataacaggccttctggcagtaatgtagatactctcctccgcctccgaggacggctccttctggaccacgaagccctttcttgtctcttggtcctactttttgtggatgagccaaagctcaatactagccgtctacaccgagtactgagaaatctctgctaccatgcccagacccgccactgggtcatccgcagtctgctctccatcttgcagcgcagcagtgagagtgagctatgcattgaaacacccaaactcactacaagtgaggaaaagggcaaaaagtcgagcaagagctgtgggtcaagtagccatgagaaccgtcccctggacctgctacacaagatggagtcaaagagctccaaccagctttcctggctctcagtatccatggatgcagccctaggctgcaggactaatatatttcagatccagcgttcaggggggcgtaaacataccgagaagcatgcaagcggtggctccaccgtccacatccatccccaagctgctcctgttgtctgcagacacgttttggatacactcattcaattggccaaggtatttcccagccacttcacacagcagcggaccaaagaaacaaactgtgagagtgatcgggaaaggggcaataaggcctgtagcccatgctcctcacagtcctccagcagtggcatttgcacagacttctgggacttattggtaaaactggacaacatgaatgtcagccggaaaggcaagaactccgtgaagtcagtgccagtgagcgctggcggtgagggggaaacctctccatacagcctcgaggcctctccactggggcagctcatgaacatgttgtcacacccagtcatccgccggagctctctcttaactgagaaactcctcagactcctttctctcatctcaattgctctcccagaaaacaaggtgtcagaagcacaggctaattctggcagcggtgcttcctccaccaccactgccacctcaaccacatctaccaccaccaccactgccgcctccaccacgcccacaccccctactgcacccacccctgtcacttctgctccagccctggttgctgccacggctatttccaccattgtcgtagctgcttcgaccacagtgactacccccacgactgctaccactactgtttcaatttctcccactactaagggcagcaaatctccagcgaaggtgagtgatgggggcagcagcagtacagactttaagatggtgtcctctggcctcactgaaaaccagctacagctctctgtagaggtgttgacatcccactcttgttctgaggaaggcttagaggatgcagccaacgtactactgcagctctcccggggggactctgggacccgggacactgttctcaagctgctactgaatggagcccgccatctgggttataccctttgtaaacaaataggtaccctgctggccgagctgcgggaatacaacctcgagcagcagcggcgagcccaatgtgaaaccctctctcctgatggcctgcctgaggagcagccacagaccaccaagctgaagggcaaaatgcagagcaggtttgacatggctgagaatgtggtaattgtggcatctcagaagcgacctttgggtggccgggagctccagctgccttctatgtccatgttgacatccaagacatctacccagaagttcttcttgagggtactacaggtcatcatccagctccgggacgacacgcgccgggctaacaagaaagccaagcagacaggcaggctaggttcctccggtttaggctcagctagcagcatccaggcagctgttcggcagctggaggctgaggctgatgccattatacaaatgtcggagtctagccagtcagaggcgtctgtccggagggaggaatcacccatggatgtggaccagccatctcccagtgctcaagatactcaatccattgcctccgatggaaccccacagggggagaaggaaaaggaagaaagaccacctgagttacccctgctcagcgagcagctgagtttggacgagctgtgggacatgcttggggagtgtctaaaggaactagaggaatcccatgaccagcatgcggtgctagtgctacagcctgctgtcgaggccttctttctggtccatgccacagagcgggagagcaagcctcctgtccgagacacccgtgagagccagctggcacacatcaaggacgagcctcctccactctcccctgcccccttaacccagcaggcttctcctgacattctctccggagcctattaatgccatttctcaggctgccccgaacgagaagtcttcggtggagagattcacgacgggggtaaagcggaacctaggggcacagagccactggtgagtgggcatgcaggccggcgacacacctccggccgacaatgagtaaggcaatatccgagcaggggcgtcaaagggcaccgaaaaaacgccaggacacaagccagtgtgaaacacaggggtacgagcgcgagaacaggtatgcacgaagaagacagcgacgagaagataag

SEQ ID NO: 467013 - DNA, 10221 bp, Homo sapiens
ctgcatccaacctggggagtgctgtcgatgagctcatgagacatcagcccacccttaaaacagatgcaacgactgccatcatcaagttacttgaagaaatctgtaatcttggaagggaccccaaatacatctgtcagaagccatcaatccagaaggcagatggcactgccactgctcctcccccaaggtctaatcatgccgcagaagaagcctctagtgaggatgaggaggaagaggaagtacaggccatgcagagctttaattctacccagcaaaatgaaactgagcctaatcagcaggttgttggtacagaggaacgtattcctattcccctcatggattacatccttaatgtgatgaaatttgtggaatctattctgagcaacaatacaacagatgaccactgccaggaatttgtgaatcagaaaggactgttgcctttggttaccattttgggtcttcccaatctgcccattgactttcccacatctgctgcctgtcaggctgttgcaggtgtctgcaaatccatattgacactgtcacatgaacccaaagtccttcaagagggtctccttcagttggactccatcctctcctccctggagcccttacaccgccccattgaatcccctgggggctcagtgttgttgcgagaactggcttgcgcaggcaatgttgctgatgctaccctctcagcccaggccacacctctgctgcatgcactcactgctgcccatgcctacatcatgatgtttgttcatacttgcagagttggacagagtgaaattcgttccatctccgtaaaccagtggggctctcaattgggtctgagtgttttgagcaagctgagccagttatactgttccctggtgtgggaaagcactgtcctcctctctctgtgtaccccaaacagcctaccatctgggtgtgaatttggccaggcagatatgcagaaactggttccaaaggatgagaaggcaggtacgacccagggcggaaaaagatcagatggggaacaggatggagcagctggaagtatggatgcttctacccagggcttattagaaggcattgggctagatggtgacacattggctcccatggagacagatgaacctactgcttcagactctaagggcaaatctaaaatcacaccagcaatggctgccagaattaagcaaatcaagcctttgttatcagcttcctccagattaggccgagcacttgctgagctatttggacttcttgttaaactttgtgtgggatctcctgtccgccagagaaggagccatcatgctgccagcaccactacagcaccgacacctgccgcgcgatcaacagcctcagctctcactaagctcttgactaaggggttatcttggcagcccccaccatatacacctactccccgattcaggctgacattcttcatctgttcagttggtttcacatccccaatgctgtttgatgagaggaagtatccctaccacctcatgctgcaaaaatttctctgctccggaggccacaatgctctttttgaaactttcaactgggctctgtccatgggaggtaaagttcctgtttctgagggattggaacactcagacttgcctgatggcacaggagaattcctagatgcctggcttatgctggtggagaagatggtgaatcccaccacggtgcttgaatctccacattcgctgcctgccaaattgcctggaggtgtccagaactttccccagttcagtgcactgcgcttccttgtggtaactcagaaagcagcctttacttgcatcaaaaacttatggaaccggaaacccctgaaggtatatggtggacgaatggctgaatcgatgctggccattctatgccacatcctccgaggagaacctgtgattcgagagagactaagcaaggagaaggaggggtctcgaggagaagaggatacagggcaagaggaaggtggctcccgccgggaacctcaagtcaaccagcaacaactgcaacagctcatggacatgggcttcacaagggaacatgcaatggaggcactgttgaacaccagcaccatggagcaggccacagagtaccttttaacccaccctcctccaatcatgggaggagttgttcgggatctcagcatgtctgaagaggaccagatgatgagagcaattgctatgtctctgggacaggatattccaatggatcaaagggcagagtcacctgaggaagttgcttgccggaaggaggaagaggaacggaaagctcgggaaaagcaggaggaggaagaggctaaatgtctagagaagttccaggatgctgacccgttggaacaagatgagctccacactttcacagatactatgttgccaggctgcttccaccttcttgatgagctgccagacacagtataccgtgtgtgtgacctgatcatgacagcaatcaaacgtaatggagcagattatcgtgacatgattctgaagcaagtagtcaatcaggtgtgggaagctgctgatgtattgatcaaagctgctcttcccctgacaacaagtgacacaaaaaccgtgtcagagtggataagtcagatggccacactgccccaggcctccaatttggctactagaatcttgcttttaacgctactttttgaggagttgaagctaccttgtgcttgggtggttgaatcaagtggcatccttaatgtcctaatcaaactcttggaagtggttcagccctgcctccaggcagccaaggagcagaaggaagtccagaccccaaagtggatcacaccagtgttgctcctgattgatttctatgaaaagacagccatctcctcaaaaaggagagcccagatgactaagtacctgcaatccaacagcaacaactggcgctggtttgatgatcgctctgggcgttggtgtagttacagtgcaagcaacaatagcactattgattctgcctggaaatctggagagacaagcgtgcgattcactgcaggccgaagaagatacacggtccaattcactacaatggtgcaggttaatgaggaaacagggaaccgacgccctgtgatgctgactctcctcagggtacctcggctgaataaaaattcaaaaaacagcaatggacaggaactagagaagacgctggaagaaagcaaagaaatggatatcaaacgtaaagaaaataaaggcaatgatacccctttggccctagagagtacaaacactgaaaaggagacaagcctggaggaaacaaaaatcggggagatcctgatccagggcttgacagaagatatggtgactgttttaatccgggcctgcgtgagcatgctgggagtccctgtggacccagatactttgcatgccacccttcgtctctgtctgaggctcacccgggaccacaaatatgccatgatgtttgcagaactgaagagtacccgcatgatcttgaatttgacccagagctcaggcttcaatgggtttactcccctggtcacccttctcttaagacacatcattgaggacccctgtacccttcgtcataccatggaaaaggttgttcgctcagcagctacaagtggagctggtagcactacctctggtgttgtgtctggcagcctcggctctcgggagatcaactacatccttcgtgtccttgggccagccgcatgccgcaatccagacatattcacagaagtggccaactgctgtatccgcatcgcccttcctgcccctcgaggctcaggaactgcttcagatgatgaatttgagaatcttagaattaaaggccctaatgctgtacagctggtgaagaccacccctttgaagccctcacctctgcctgtcatccctgatactatcaaggaagtgatctatgatatgctgaatgctctggctgcataccatgctccagaggaagcagataaatctgatcctaaacctggggttatgacccaagaggttggccagctcctgcaagacatgggtgatgatgtataccagcagtaccggtcacttacgcgtcagagcagtgactttgatacgcagtcaggtttttccattaatagtcaggtctttgctgcagatggtgcctccactgagacttccgcatctgggacctcccaaggagaggcttcaactccagaggagtctcgagatgggaagaaagataaagaaggggaccgggcctctgaggaaggcaaacagaaaggcaagggcagcaaacctttaatgcctacctccactatccttcgtcttctggcagagttggtgaggtcctatgttggtattgctaccctgattgccaactacagctacactgtgggccagtctgaactgatcaaagaggactgcagtgtgctagcttttgttctggaccacctgctcccacatacccagaatgcagaagacaaggacacccctgccttggcccgcctgttcctcgcaagcctggctgctgcagggagtggcacagatgcccaggtggccctagtgaatgaagtaaaagcagcccttggacgggcactggctatggctgagagtacagagaaacatgccaggcttcaggcagtgatgtgtatcatcagtactatcatggagtcctgcccctccacctccagcttctacagcagtgccacagcgaagacccagcacaatggcatgaacaacatcattcggcttttcctgaagaagggactggttaatgacctggccagagtacctcacagcttagacctgtccagtcccaacatggccaacacagtcaatgctgctctgaagcctttggaaacactttcccggattgtgaaccagcccagtagcctttttggcagcaagagtgcttctagcaagaacaagtctgagcaggatgcccaaggagcctctcaagattccagtagcaaccagcaggacccaggcgagcctggggaagcagaagtgcaggaggaggatcatgatgtcactcagacagaggtggcagatggggatatcatggatggggaggctgaaaccgactcagtggtgattgctgggcagcctgaggtgctcagttcacaagagatgcaggttgagaatgagctggaggacctgatagatgagttgcttgagagggatggcggatctgggaacagtacaattatagtgagcagaagtggagaggatgaatcacaagaggacgtgctgatggatgaagctccttccaacctcagccaagcttccaccttgcaggccaaccgagaagattccatgaatatcctggaccctgaggatgaggaggagcacactcaggaagaggacagcagtggcagtaacgaggatgaggatgatagtcaggatgaagaggaggaggaggaggaagatgaggaagatgatcaggaggatgatgaaggtgaagagggagatgaagacgatgacgacgatggctctgagatggaattggatgaggattatcctgatatgaacgcttctcccttggtccgatttgagcgctttgaccgggaggatgatctcatcattgagtttgacaacatgttctccagtgctacagacatccccccatccccaggaaatatccctaccacccatccactgatggtgcgccatgcagaccacagttctctgacactgggcagtggctcttcaacaactcgtctcacccagggcatcgggcgcagtcagaggaccctaaggcagctgacggccaatactggccacaccattcatgttcactaccctgggaatcgccagcccaaccctcctcttatactgcagaggttgcttggtccctcagctgctgctgacatccttcagctgagcagcagccttcccctacaaagccggggtcgggcccgcctcctggtaggcaacgatgacgtccacatcatcgcccgttctgatgatgagctgctggatgactttttccatgatcagagcacagctaccagccaagcaggaaccctgtccagcatccccacagccctgacccgctggacagaagaatgcaaagttctcgatgctgagagcatgcatgactgtgtttcagtggttaaagtgtccattgtcaatcacctggaattcctgagggatgaggagctggaagaaaggcgagagaagcgcaggaaacaactggctgaggaagaaacaaagataactgataaaggcaaagaagataaggagaacagggatcagagtgcacagtgtactgcatctaagtcaaatgactccactgaacagaatctctcagatgggacgcctatgcctgacagctacccaacaaccccatcttcaactgatgcagctacatctgagtccaaggagacccttggcactctgcaatcctcacaacagcaaccaacactcccaaccccaccagctttgggagaggttcctcaggagctgcagtctccagctggagaagggggcagctctacacagctattgatgcctgtagagccagaggaattgggtcccacaaggccaagtggggaagcagaaacaactcagatggagttatccccagctcccactataacctcactttccccagagagagctgaggattctgatgcactgacggctgtcagcagtcagctagaaggctctcctatggatacaagcagcctggcttcctgtaccttagaggaggctgtgggtgacacttcagcagctggcagttctgagcagcccagagcaggcagctccactcctggggatgccccaccagctgtggcggaagtgcaaggcaggagtgatgggtcaggggaatctgcccagccacctgaggacagctccccacctgcatcctctgagagctcttccaccagagattctgccgtggccatttctggagcagattcccgaggaatcctagaagagccgttgccttcaacaagcagtgaagaagaagatccccttgcgggtatcagtctccctgaaggtgtggacccctcttttctggctgccctgcctgatgacatccgtcgggaagttctacagaaccagctaggcattcgtccaccaacccggactgccccctccacaaatagctcagcgcctgcagtggtggggaatcctggtgtgactgaagtgagccctgagtttctggctgccctgcctccagccattcaggaggaagtactggcacagcagagagctgagcagcagcgacgagaactagcacagaatgccagctcagacacccctatggaccctgtgaccttcatccagactctgccctcagacctgcgccgtagtgtcctagaggatatggaggacagtgtgttagctgtgatgccacctgacattgcagctgaggctcaagccctgagacgagagcaagaagcccggcagcgacagctcatgcatgagcgtctgtttgggcacagtagcacctccgcactctctgctattctccgaagcccggctttcaccagtcgcttaagtggcaaccgtggggtccagtatactcgccttgctgtgcagagaggtggcaccttccagatggggggtagcagcagccataacaggccttctggcagtaatgtagatactctcctccgcctccgaggacggctccttctggaccacgaagccctttcttgtctcttggtcctactttttgtggatgagccaaagctcaatactagccgtctacaccgagtactgagaaatctctgctaccatgcccagacccgccactgggtcatccgcagtctgctctccatcttgcagcgcagcagtgagagtgagctatgcattgaaacacccaaactcactacaagtgaggaaaagggcaaaaagtcgagcaagagctgtgggtcaagtagccatgagaaccgtcccctggacctgctacacaagatggagtcaaagagctccaaccagctttcctggctctcagtatccatggatgcagccctaggctgcaggactaatatatttcagatccagcgttcaggggggcgtaaacataccgagaagcatgcaagcggtggctccaccgtccacatccatccccaagctgctcctgttgtctgcagacacgttttggatacactcattcaattggccaaggtatttcccagccacttcacacagcagcggaccaaagaaacaaactgtgagagtgatcgggaaaggggcaataaggcctgtagcccatgctcctcacagtcctccagcagtggcatttgcacagacttctgggacttattggtaaaactggacaacatgaatgtcagccggaaaggcaagaactccgtgaagtcagtgccagtgagcgctggcggtgagggggaaacctctccatacagcctcgaggcctctccactggggcagctcatgaacatgttgtcacacccagtcatccgccggagctctctcttaactgagaaactcctcagactcctttctctcatctcaattgctctcccagaaaacaaggtgtcagaagcacaggctaattctggcagcggtgcttcctccaccaccactgccacctcaaccacatctaccaccaccaccactgccgcctccaccacgcccacaccccctactgcacccacccctgtcacttctgctccagccctggttgctgccacggctatttccaccattgtcgtagctgcttcgaccacagtgactacccccacgactgctaccactactgtttcaatttctcccactactaagggcagcaaatctccagcgaaggtgagtgatgggggcagcagcagtacagactttaagatggtgtcctctggcctcactgaaaaccagctacagctctctgtagaggtgttgacatcccactcttgttctgaggaaggcttagaggatgcagccaacgtactactgcagctctcccggggggactctgggacccgggacactgttctcaagctgctactgaatggagcccgccatctgggttataccctttgtaaacaaataggtaccctgctggccgagctgcgggaatacaacctcgagcagcagcggcgagcccaatgtgaaaccctctctcctgatggcctgcctgaggagcagccacagaccaccaagctgaagggcaaaatgcagagcaggtttgacatggctgagaatgtggtaattgtggcatctcagaagcgacctttgggtggccgggagctccagctgccttctatgtccatgttgacatccaagacatctacccagaagttcttcttgagggtactacaggtcatcatccagctccgggacgacacgcgccgggctaacaagaaagccaagcagacaggcaggctaggttcctccggtttaggctcagctagcagcatccaggcagctgttcggcagctggaggctgaggctgatgccattatacaaatggtacgtgagggtcaaagggcgcggagacagcaacaagcagcaacgtcggagtctagccagtcagaggcgtctgtccggagggaggaatcacccatggatgtggaccagccatctcccagtgctcaagatactcaatccattgcctccgatggaaccccacagggggagaaggaaaaggaagaaagaccacctgagttacccctgctcagcgagcagctgagtttggacgagctgtgggacatgcttggggagtgtctaaaggaactagaggaatcccatgaccagcatgcggtgctagtgctacagcctgctgtcgaggccttctttctggtccatgccacagagcgggagagcaagcctcctgtccgagacacccgtgagagccagctggcacacatcaaggacgagcctcctccactctcccctgcccccttaaccccagccacgccttcctcccttgacccattcttctcccgggagccctcatctatgcacatctcctcaagcctgccccctgacacacagaagttccttcgctttgcagagactcaccgcactgtgttaaaccagatcctacggcagtccacgacccaccttgctgatgggccttttgctgtcctggtagactacattcgtgtcctcgactttgatgtcaagcgcaaatatttccgccaagagctggagcgtttagatgaggggctccggaaagaagacatggctgtgcatgtccgtcgtgaccatgtgtttgaagactcctatcgtgagctgcatcgcaaatccccgggaagtcccggtacgagctcaatcgtatcatgcatagcgctgctgttgaaaaacagggggcaagaag

SEQ ID NO: 467014 - DNA, 10829 bp, Homo sapiens
ctgcatccaacctggggagtgctgtcgatgagctcatgagacatcagcccacccttaaaacagatgcaacgactgccatcatcaagttacttgaagaaatctgtaatcttggaagggaccccaaatacatctgtcagaagccatcaatccagaaggcagatggcactgccactgctcctcccccaaggtctaatcatgccgcagaagaagcctctagtgaggatgaggaggaagaggaagtacaggccatgcagagctttaattctacccagcaaaatgaaactgagcctaatcagcaggttgttggtacagaggaacgtattcctattcccctcatggattacatccttaatgtgatgaaatttgtggaatctattctgagcaacaatacaacagatgaccactgccaggaatttgtgaatcagaaaggactgttgcctttggttaccattttgggtcttcccaatctgcccattgactttcccacatctgctgcctgtcaggctgttgcaggtgtctgcaaatccatattgacactgtcacatgaacccaaagtccttcaagagggtctccttcagttggactccatcctctcctccctggagcccttacaccgccccattgaatcccctgggggctcagtgttgttgcgagaactggcttgcgcaggcaatgttgctgatgctaccctctcagcccaggccacacctctgctgcatgcactcactgctgcccatgcctacatcatgatgtttgttcatacttgcagagttggacagagtgaaattcgttccatctccgtaaaccagtggggctctcaattgggtctgagtgttttgagcaagctgagccagttatactgttccctggtgtgggaaagcactgtcctcctctctctgtgtaccccaaacagcctaccatctgggtgtgaatttggccaggcagatatgcagaaactggttccaaaggatgagaaggcaggtacgacccagggcggaaaaagatcagatggggaacaggatggagcagctggaagtatggatgcttctacccagggcttattagaaggcattgggctagatggtgacacattggctcccatggagacagatgaacctactgcttcagactctaagggcaaatctaaaatcacaccagcaatggctgccagaattaagcaaatcaagcctttgttatcagcttcctccagattaggccgagcacttgctgagctatttggacttcttgttaaactttgtgtgggatctcctgtccgccagagaaggagccatcatgctgccagcaccactacagcaccgacacctgccgcgcgatcaacagcctcagctctcactaagctcttgactaaggggttatcttggcagcccccaccatatacacctactccccgattcaggctgacattcttcatctgttcagttggtttcacatccccaatgctgtttgatgagaggaagtatccctaccacctcatgctgcaaaaatttctctgctccggaggccacaatgctctttttgaaactttcaactgggctctgtccatgggaggtaaagttcctgtttctgagggattggaacactcagacttgcctgatggcacaggagaattcctagatgcctggcttatgctggtggagaagatggtgaatcccaccacggtgcttgaatctccacattcgctgcctgccaaattgcctggaggtgtccagaactttccccagttcagtgcactgcgcttccttgtggtaactcagaaagcagcctttacttgcatcaaaaacttatggaaccggaaacccctgaaggtatatggtggacgaatggctgaatcgatgctggccattctatgccacatcctccgaggagaacctgtgattcgagagagactaagcaaggagaaggaggggtctcgaggagaagaggatacagggcaagaggaaggtggctcccgccgggaacctcaagtcaaccagcaacaactgcaacagctcatggacatgggcttcacaagggaacatgcaatggaggcactgttgaacaccagcaccatggagcaggccacagagtaccttttaacccaccctcctccaatcatgggaggagttgttcgggatctcagcatgtctgaagaggaccagatgatgagagcaattgctatgtctctgggacaggatattccaatggatcaaagggcagagtcacctgaggaagttgcttgccggaaggaggaagaggaacggaaagctcgggaaaagcaggaggaggaagaggctaaatgtctagagaagttccaggatgctgacccgttggaacaagatgagctccacactttcacagatactatgttgccaggctgcttccaccttcttgatgagctgccagacacagtataccgtgtgtgtgacctgatcatgacagcaatcaaacgtaatggagcagattatcgtgacatgattctgaagcaagtagtcaatcaggtgtgggaagctgctgatgtattgatcaaagctgctcttcccctgacaacaagtgacacaaaaaccgtgtcagagtggataagtcagatggccacactgccccaggcctccaatttggctactagaatcttgcttttaacgctactttttgaggagttgaagctaccttgtgcttgggtggttgaatcaagtggcatccttaatgtcctaatcaaactcttggaagtggttcagccctgcctccaggcagccaaggagcagaaggaagtccagaccccaaagtggatcacaccagtgttgctcctgattgatttctatgaaaagacagccatctcctcaaaaaggagagcccagatgactaagtacctgcaatccaacagcaacaactggcgctggtttgatgatcgctctgggcgttggtgtagttacagtgcaagcaacaatagcactattgattctgcctggaaatctggagagacaagcgtgcgattcactgcaggccgaagaagatacacggtccaattcactacaatggtgcaggttaatgaggaaacagggaaccgacgccctgtgatgctgactctcctcagggtacctcggctgaataaaaattcaaaaaacagcaatggacaggaactagagaagacgctggaagaaagcaaagaaatggatatcaaacgtaaagaaaataaaggcaatgatacccctttggccctagagagtacaaacactgaaaaggagacaagcctggaggaaacaaaaatcggggagatcctgatccagggcttgacagaagatatggtgactgttttaatccgggcctgcgtgagcatgctgggagtccctgtggacccagatactttgcatgccacccttcgtctctgtctgaggctcacccgggaccacaaatatgccatgatgtttgcagaactgaagagtacccgcatgatcttgaatttgacccagagctcaggcttcaatgggtttactcccctggtcacccttctcttaagacacatcattgaggacccctgtacccttcgtcataccatggaaaaggttgttcgctcagcagctacaagtggagctggtagcactacctctggtgttgtgtctggcagcctcggctctcgggagatcaactacatccttcgtgtccttgggccagccgcatgccgcaatccagacatattcacagaagtggccaactgctgtatccgcatcgcccttcctgcccctcgaggctcaggaactgcttcagatgatgaatttgagaatcttagaattaaaggccctaatgctgtacagctggtgaagaccacccctttgaagccctcacctctgcctgtcatccctgatactatcaaggaagtgatctatgatatgctgaatgctctggctgcataccatgctccagaggaagcagataaatctgatcctaaacctggggttatgacccaagaggttggccagctcctgcaagacatgggtgatgatgtataccagcagtaccggtcacttacgcgtcagagcagtgactttgatacgcagtcaggtttttccattaatagtcaggtctttgctgcagatggtgcctccactgagacttccgcatctgggacctcccaaggagaggcttcaactccagaggagtctcgagatgggaagaaagataaagaaggggaccgggcctctgaggaaggcaaacagaaaggcaagggcagcaaacctttaatgcctacctccactatccttcgtcttctggcagagttggtgaggtcctatgttggtattgctaccctgattgccaactacagctacactgtgggccagtctgaactgatcaaagaggactgcagtgtgctagcttttgttctggaccacctgctcccacatacccagaatgcagaagacaaggacacccctgccttggcccgcctgttcctcgcaagcctggctgctgcagggagtggcacagatgcccaggtggccctagtgaatgaagtaaaagcagcccttggacgggcactggctatggctgagagtacagagaaacatgccaggcttcaggcagtgatgtgtatcatcagtactatcatggagtcctgcccctccacctccagcttctacagcagtgccacagcgaagacccagcacaatggcatgaacaacatcattcggcttttcctgaagaagggactggttaatgacctggccagagtacctcacagcttagacctgtccagtcccaacatggccaacacagtcaatgctgctctgaagcctttggaaacactttcccggattgtgaaccagcccagtagcctttttggcagcaagagtgcttctagcaagaacaagtctgagcaggatgcccaaggagcctctcaagattccagtagcaaccagcaggacccaggcgagcctggggaagcagaagtgcaggaggaggatcatgatgtcactcagacagaggtggcagatggggatatcatggatggggaggctgaaaccgactcagtggtgattgctgggcagcctgaggtgctcagttcacaagagatgcaggttgagaatgagctggaggacctgatagatgagttgcttgagagggatggcggatctgggaacagtacaattatagtgagcagaagtggagaggatgaatcacaagaggacgtgctgatggatgaagctccttccaacctcagccaagcttccaccttgcaggccaaccgagaagattccatgaatatcctggaccctgaggatgaggaggagcacactcaggaagaggacagcagtggcagtaacgaggatgaggatgatagtcaggatgaagaggaggaggaggaggaagatgaggaagatgatcaggaggatgatgaaggtgaagagggagatgaagacgatgacgacgatggctctgagatggaattggatgaggattatcctgatatgaacgcttctcccttggtccgatttgagcgctttgaccgggaggatgatctcatcattgagtttgacaacatgttctccagtgctacagacatccccccatccccaggaaatatccctaccacccatccactgatggtgcgccatgcagaccacagttctctgacactgggcagtggctcttcaacaactcgtctcacccagggcatcgggcgcagtcagaggaccctaaggcagctgacggccaatactggccacaccattcatgttcactaccctgggaatcgccagcccaaccctcctcttatactgcagaggttgcttggtccctcagctgctgctgacatccttcagctgagcagcagccttcccctacaaagccggggtcgggcccgcctcctggtaggcaacgatgacgtccacatcatcgcccgttctgatgatgagctgctggatgactttttccatgatcagagcacagctaccagccaagcaggaaccctgtccagcatccccacagccctgacccgctggacagaagaatgcaaagttctcgatgctgagagcatgcatgactgtgtttcagtggttaaagtgtccattgtcaatcacctggaattcctgagggatgaggagctggaagaaaggcgagagaagcgcaggaaacaactggctgaggaagaaacaaagataactgataaaggcaaagaagataaggagaacagggatcagagtgcacagtgtactgcatctaagtcaaatgactccactgaacagaatctctcagatgggacgcctatgcctgacagctacccaacaaccccatcttcaactgatgcagctacatctgagtccaaggagacccttggcactctgcaatcctcacaacagcaaccaacactcccaaccccaccagctttgggagaggttcctcaggagctgcagtctccagctggagaagggggcagctctacacagctattgatgcctgtagagccagaggaattgggtcccacaaggccaagtggggaagcagaaacaactcagatggagttatccccagctcccactataacctcactttccccagagagagctgaggattctgatgcactgacggctgtcagcagtcagctagaaggctctcctatggatacaagcagcctggcttcctgtaccttagaggaggctgtgggtgacacttcagcagctggcagttctgagcagcccagagcaggcagctccactcctggggatgccccaccagctgtggcggaagtgcaaggcaggagtgatgggtcaggggaatctgcccagccacctgaggacagctccccacctgcatcctctgagagctcttccaccagagattctgccgtggccatttctggagcagattcccgaggaatcctagaagagccgttgccttcaacaagcagtgaagaagaagatccccttgcgggtatcagtctccctgaaggtgtggacccctcttttctggctgccctgcctgatgacatccgtcgggaagttctacagaaccagctaggcattcgtccaccaacccggactgccccctccacaaatagctcagcgcctgcagtggtggggaatcctggtgtgactgaagtgagccctgagtttctggctgccctgcctccagccattcaggaggaagtactggcacagcagagagctgagcagcagcgacgagaactagcacagaatgccagctcagacacccctatggaccctgtgaccttcatccagactctgccctcagacctgcgccgtagtgtcctagaggatatggaggacagtgtgttagctgtgatgccacctgacattgcagctgaggctcaagccctgagacgagagcaagaagcccggcagcgacagctcatgcatgagcgtctgtttgggcacagtagcacctccgcactctctgctattctccgaagcccggctttcaccagtcgcttaagtggcaaccgtggggtccagtatactcgccttgctgtgcagagaggtggcaccttccagatggggggtagcagcagccataacaggccttctggcagtaatgtagatactctcctccgcctccgaggacggctccttctggaccacgaagccctttcttgtctcttggtcctactttttgtggatgagccaaagctcaatactagccgtctacaccgagtactgagaaatctctgctaccatgcccagacccgccactgggtcatccgcagtctgctctccatcttgcagcgcagcagtgagagtgagctatgcattgaaacacccaaactcactacaagtgaggaaaagggcaaaaagtcgagcaagagctgtgggtcaagtagccatgagaaccgtcccctggacctgctacacaagatggagtcaaagagctccaaccagctttcctggctctcagtatccatggatgcagccctaggctgcaggactaatatatttcagatccagcgttcaggggggcgtaaacataccgagaagcatgcaagcggtggctccaccgtccacatccatccccaagctgctcctgttgtctgcagacacgttttggatacactcattcaattggccaaggtatttcccagccacttcacacagcagcggaccaaagaaacaaactgtgagagtgatcgggaaaggggcaataaggcctgtagcccatgctcctcacagtcctccagcagtggcatttgcacagacttctgggacttattggtaaaactggacaacatgaatgtcagccggaaaggcaagaactccgtgaagtcagtgccagtgagcgctggcggtgagggggaaacctctccatacagcctcgaggcctctccactggggcagctcatgaacatgttgtcacacccagtcatccgccggagctctctcttaactgagaaactcctcagactcctttctctcatctcaattgctctcccagaaaacaaggtgtcagaagcacaggctaattctggcagcggtgcttcctccaccaccactgccacctcaaccacatctaccaccaccaccactgccgcctccaccacgcccacaccccctactgcacccacccctgtcacttctgctccagccctggttgctgccacggctatttccaccattgtcgtagctgcttcgaccacagtgactacccccacgactgctaccactactgtttcaatttctcccactactaagggcagcaaatctccagcgaaggtgagtgatgggggcagcagcagtacagactttaagatggtgtcctctggcctcactgaaaaccagctacagctctctgtagaggtgttgacatcccactcttgttctgaggaaggcttagaggatgcagccaacgtactactgcagctctcccggggggactctgggacccgggacactgttctcaagctgctactgaatggagcccgccatctgggttataccctttgtaaacaaataggtaccctgctggccgagctgcgggaatacaacctcgagcagcagcggcgagcccaatgtgaaaccctctctcctgatggcctgcctgaggagcagccacagaccaccaagctgaagggcaaaatgcagagcaggtttgacatggctgagaatgtggtaattgtggcatctcagaagcgacctttgggtggccgggagctccagctgccttctatgtccatgttgacatccaagacatctacccagaagttcttcttgagggtactacaggtcatcatccagctccgggacgacacgcgccgggctaacaagaaagccaagcagacaggcaggctaggttcctccggtttaggctcagctagcagcatccaggcagctgttcggcagctggaggctgaggctgatgccattatacaaatggtacgtgagggtcaaagggcgcggagacagcaacaagcagcaacgtcggagtctagccagtcagaggcgtctgtccggagggaggaatcacccatggatgtggaccagccatctcccagtgctcaagatactcaatccattgcctccgatggaaccccacagggggagaaggaaaaggaagaaagaccacctgagttacccctgctcagcgagcagctgagtttggacgagctgtgggacatgcttggggagtgtctaaaggaactagaggaatcccatgaccagcatgcggtgctagtgctacagcctgctgtcgaggccttctttctggtccatgccacagagcgggagagcaagcctcctgtccgagacacccgtgagagccagctggcacacatcaaggacgagcctcctccactctcccctgcccccttaaccccagccacgccttcctcccttgacccattcttctcccgggagccctcatctatgcacatctcctcaagcctgccccctgacacacagaagttccttcgctttgcagagactcaccgcactgtgttaaaccagatcctacggcagtccacgacccaccttgctgatgggccttttgctgtcctggtagactacattcgtgtcctcgactttgatgtcaagcgcaaatatttccgccaagagctggagcgtttagatgaggggctccggaaagaagacatggctgtgcatgtccgtcgtgaccatgtgtttgaagactcctatcgtgagctgcatcgcaaatcccccgaagaaatgaagaatcgattgtatatagtatttgaaggagaagaagggcaggatgctggcgggctcctgcgggagtggtatatgatcatctctcgagagatgtttaaccctatgtatgccttgttccgtacctcacctggtgatcgagtcacctacaccatcaatccatcttcccactgcaaccccaaccacctcagctacttcaagtttgtcggacgcattgtggccaaagctgtatatgacaaccgtcttctggagtgctactttactcgatccttttacaaacacatcttgggcaagtcagtcagatatacagatatggagagtgaagattaccacttctaccaaggtctggtttatctgctggaaaatgatgtctccacactaggctatgacctcaccttcagcactgaggtccaagagtttggagtttgtgaagttcgtgacctcaaacccaatggggccaacatcttggtaacagaggagaataagaaggagtatgtacacctggtatgccagatgagaatgacaggagccatccgcaagcagttggcggctttcttagaaggcttctatgagatcattccaaagcgcctcatttccatcttcactgagcaggagttagagctgcttatatcagatcatcgatgtcaatggtgggcagtcctgatgtcg

SEQ ID NO: 467015 - DNA, 10359 bp, Homo sapiens
ctgcatccaacctggggagtgctgtcgatgagctcatgagacatcagcccacccttaaaacagatgcaacgactgccatcatcaagttacttgaagaaatctgtaatcttggaagggaccccaaatacatctgtcagaagccatcaatccagaaggcagatggcactgccactgctcctcccccaaggtctaatcatgccgcagaagaagcctctagtgaggatgaggaggaagaggaagtacaggccatgcagagctttaattctacccagcaaaatgaaactgagcctaatcagcaggttgttggtacagaggaacgtattcctattcccctcatggattacatccttaatgtgatgaaatttgtggaatctattctgagcaacaatacaacagatgaccactgccaggaatttgtgaatcagaaaggactgttgcctttggttaccattttgggtcttcccaatctgcccattgactttcccacatctgctgcctgtcaggctgttgcaggtgtctgcaaatccatattgacactgtcacatgaacccaaagtccttcaagagggtctccttcagttggactccatcctctcctccctggagcccttacaccgccccattgaatcccctgggggctcagtgttgttgcgagaactggcttgcgcaggcaatgttgctgatgctaccctctcagcccaggccacacctctgctgcatgcactcactgctgcccatgcctacatcatgatgtttgttcatacttgcagagttggacagagtgaaattcgttccatctccgtaaaccagtggggctctcaattgggtctgagtgttttgagcaagctgagccagttatactgttccctggtgtgggaaagcactgtcctcctctctctgtgtaccccaaacagcctaccatctgggtgtgaatttggccaggcagatatgcagaaactggttccaaaggatgagaaggcaggtacgacccagggcggaaaaagatcagatggggaacaggatggagcagctggaagtatggatgcttctacccagggcttattagaaggcattgggctagatggtgacacattggctcccatggagacagatgaacctactgcttcagactctaagggcaaatctaaaatcacaccagcaatggctgccagaattaagcaaatcaagcctttgttatcagcttcctccagattaggccgagcacttgctgagctatttggacttcttgttaaactttgtgtgggatctcctgtccgccagagaaggagccatcatgctgccagcaccactacagcaccgacacctgccgcgcgatcaacagcctcagctctcactaagctcttgactaaggggttatcttggcagcccccaccatatacacctactccccgattcaggctgacattcttcatctgttcagttggtttcacatccccaatgctgtttgatgagaggaagtatccctaccacctcatgctgcaaaaatttctctgctccggaggccacaatgctctttttgaaactttcaactgggctctgtccatgggaggtaaagttcctgtttctgagggattggaacactcagacttgcctgatggcacaggagaattcctagatgcctggcttatgctggtggagaagatggtgaatcccaccacggtgcttgaatctccacattcgctgcctgccaaattgcctggaggtgtccagaactttccccagttcagtgcactgcgcttccttgtggtaactcagaaagcagcctttacttgcatcaaaaacttatggaaccggaaacccctgaaggtatatggtggacgaatggctgaatcgatgctggccattctatgccacatcctccgaggagaacctgtgattcgagagagactaagcaaggagaaggaggggtctcgaggagaagaggatacagggcaagaggaaggtggctcccgccgggaacctcaagtcaaccagcaacaactgcaacagctcatggacatgggcttcacaagggaacatgcaatggaggcactgttgaacaccagcaccatggagcaggccacagagtaccttttaacccaccctcctccaatcatgggaggagttgttcgggatctcagcatgtctgaagaggaccagatgatgagagcaattgctatgtctctgggacaggatattccaatggatcaaagggcagagtcacctgaggaagttgcttgccggaaggaggaagaggaacggaaagctcgggaaaagcaggaggaggaagaggctaaatgtctagagaagttccaggatgctgacccgttggaacaagatgagctccacactttcacagatactatgttgccaggctgcttccaccttcttgatgagctgccagacacagtataccgtgtgtgtgacctgatcatgacagcaatcaaacgtaatggagcagattatcgtgacatgattctgaagcaagtagtcaatcaggtgtgggaagctgctgatgtattgatcaaagctgctcttcccctgacaacaagtgacacaaaaaccgtgtcagagtggataagtcagatggccacactgccccaggcctccaatttggctactagaatcttgcttttaacgctactttttgaggagttgaagctaccttgtgcttgggtggttgaatcaagtggcatccttaatgtcctaatcaaactcttggaagtggttcagccctgcctccaggcagccaaggagcagaaggaagtccagaccccaaagtggatcacaccagtgttgctcctgattgatttctatgaaaagacagccatctcctcaaaaaggagagcccagatgactaagtacctgcaatccaacagcaacaactggcgctggtttgatgatcgctctgggcgttggtgtagttacagtgcaagcaacaatagcactattgattctgcctggaaatctggagagacaagcgtgcgattcactgcaggccgaagaagatacacggtccaattcactacaatggtgcaggttaatgaggaaacagggaaccgacgccctgtgatgctgactctcctcagggtacctcggctgaataaaaattcaaaaaacagcaatggacaggaactagagaagacgctggaagaaagcaaagaaatggatatcaaacgtaaagaaaataaaggcaatgatacccctttggccctagagagtacaaacactgaaaaggagacaagcctggaggaaacaaaaatcggggagatcctgatccagggcttgacagaagatatggtgactgttttaatccgggcctgcgtgagcatgctgggagtccctgtggacccagatactttgcatgccacccttcgtctctgtctgaggctcacccgggaccacaaatatgccatgatgtttgcagaactgaagagtacccgcatgatcttgaatttgacccagagctcaggcttcaatgggtttactcccctggtcacccttctcttaagacacatcattgaggacccctgtacccttcgtcataccatggaaaaggttgttcgctcagcagctacaagtggagctggtagcactacctctggtgttgtgtctggcagcctcggctctcgggagatcaactacatccttcgtgtccttgggccagccgcatgccgcaatccagacatattcacagaagtggccaactgctgtatccgcatcgcccttcctgcccctcgaggctcaggaactgcttcagatgatgaatttgagaatcttagaattaaaggccctaatgctgtacagctggtgaagaccacccctttgaagccctcacctctgcctgtcatccctgatactatcaaggaagtgatctatgatatgctgaatgctctggctgcataccatgctccagaggaagcagataaatctgatcctaaacctggggttatgacccaagaggttggccagctcctgcaagacatgggtgatgatgtataccagcagtaccggtcacttacgcgtcagagcagtgactttgatacgcagtcaggtttttccattaatagtcaggtctttgctgcagatggtgcctccactgagacttccgcatctgggacctcccaaggagaggcttcaactccagaggagtctcgagatgggaagaaagataaagaaggggaccgggcctctgaggaaggcaaacagaaaggcaagggcagcaaacctttaatgcctacctccactatccttcgtcttctggcagagttggtgaggtcctatgttggtattgctaccctgattgccaactacagctacactgtgggccagtctgaactgatcaaagaggactgcagtgtgctagcttttgttctggaccacctgctcccacatacccagaatgcagaagacaaggacacccctgccttggcccgcctgttcctcgcaagcctggctgctgcagggagtggcacagatgcccaggtggccctagtgaatgaagtaaaagcagcccttggacgggcactggctatggctgagagtacagagaaacatgccaggcttcaggcagtgatgtgtatcatcagtactatcatggagtcctgcccctccacctccagcttctacagcagtgccacagcgaagacccagcacaatggcatgaacaacatcattcggcttttcctgaagaagggactggttaatgacctggccagagtacctcacagcttagacctgtccagtcccaacatggccaacacagtcaatgctgctctgaagcctttggaaacactttcccggattgtgaaccagcccagtagcctttttggcagcaagagtgcttctagcaagaacaagtctgagcaggatgcccaaggagcctctcaagattccagtagcaaccagcaggacccaggcgagcctggggaagcagaagtgcaggaggaggatcatgatgtcactcagacagaggtggcagatggggatatcatggatggggaggctgaaaccgactcagtggtgattgctgggcagcctgaggtgctcagttcacaagagatgcaggttgagaatgagctggaggacctgatagatgagttgcttgagagggatggcggatctgggaacagtacaattatagtgagcagaagtggagaggatgaatcacaagaggacgtgctgatggatgaagctccttccaacctcagccaagcttccaccttgcaggccaaccgagaagattccatgaatatcctggaccctgaggatgaggaggagcacactcaggaagaggacagcagtggcagtaacgaggatgaggatgatagtcaggatgaagaggaggaggaggaggaagatgaggaagatgatcaggaggatgatgaaggtgaagagggagatgaagacgatgacgacgatggctctgagatggaattggatgaggattatcctgatatgaacgcttctcccttggtccgatttgagcgctttgaccgggaggatgatctcatcattgagtttgacaacatgttctccagtgctacagacatccccccatccccaggaaatatccctaccacccatccactgatggtgcgccatgcagaccacagttctctgacactgggcagtggctcttcaacaactcgtctcacccagggcatcgggcgcagtcagaggaccctaaggcagctgacggccaatactggccacaccattcatgttcactaccctgggaatcgccagcccaaccctcctcttatactgcagaggttgcttggtccctcagctgctgctgacatccttcagctgagcagcagccttcccctacaaagccggggtcgggcccgcctcctggtaggcaacgatgacgtccacatcatcgcccgttctgatgatgagctgctggatgactttttccatgatcagagcacagctaccagccaagcaggaaccctgtccagcatccccacagccctgacccgctggacagaagaatgcaaagttctcgatgctgagagcatgcatgactgtgtttcagtggttaaagtgtccattgtcaatcacctggaattcctgagggatgaggagctggaagaaaggcgagagaagcgcaggaaacaactggctgaggaagaaacaaagataactgataaaggcaaagaagataaggagaacagggatcagagtgcacagtgtactgcatctaagtcaaatgactccactgaacagaatctctcagatgggacgcctatgcctgacagctacccaacaaccccatcttcaactgatgcagctacatctgagtccaaggagacccttggcactctgcaatcctcacaacagcaaccaacactcccaaccccaccagctttgggagaggttcctcaggagctgcagtctccagctggagaagggggcagctctacacagctattgatgcctgtagagccagaggaattgggtcccacaaggccaagtggggaagcagaaacaactcagatggagttatccccagctcccactataacctcactttccccagagagagctgaggattctgatgcactgacggctgtcagcagtcagctagaaggctctcctatggatacaagcagcctggcttcctgtaccttagaggaggctgtgggtgacacttcagcagctggcagttctgagcagcccagagcaggcagctccactcctggggatgccccaccagctgtggcggaagtgcaaggcaggagtgatgggtcaggggaatctgcccagccacctgaggacagctccccacctgcatcctctgagagctcttccaccagagattctgccgtggccatttctggagcagattcccgaggaatcctagaagagccgttgccttcaacaagcagtgaagaagaagatccccttgcgggtatcagtctccctgaaggtgtggacccctcttttctggctgccctgcctgatgacatccgtcgggaagttctacagaaccagctaggcattcgtccaccaacccggactgccccctccacaaatagctcagcgcctgcagtggtggggaatcctggtgtgactgaagtgagccctgagtttctggctgccctgcctccagccattcaggaggaagtactggcacagcagagagctgagcagcagcgacgagaactagcacagaatgccagctcagacacccctatggaccctgtgaccttcatccagactctgccctcagacctgcgccgtagtgtcctagaggatatggaggacagtgtgttagctgtgatgccacctgacattgcagctgaggctcaagccctgagacgagagcaagaagcccggcagcgacagctcatgcatgagcgtctgtttgggcacagtagcacctccgcactctctgctattctccgaagcccggctttcaccagtcgcttaagtggcaaccgtggggtccagtatactcgccttgctgtgcagagaggtggcaccttccagatggggggtagcagcagccataacaggccttctggcagtaatgtagatactctcctccgcctccgaggacggctccttctggaccacgaagccctttcttgtctcttggtcctactttttgtggatgagccaaagctcaatactagccgtctacaccgagtactgagaaatctctgctaccatgcccagacccgccactgggtcatccgcagtctgctctccatcttgcagcgcagcagtgagagtgagctatgcattgaaacacccaaactcactacaagtgaggaaaagggcaaaaagtcgagcaagagctgtgggtcaagtagccatgagaaccgtcccctggacctgctacacaagatggagtcaaagagctccaaccagctttcctggctctcagtatccatggatgcagccctaggctgcaggactaatatatttcagatccagcgttcaggggggcgtaaacataccgagaagcatgcaagcggtggctccaccgtccacatccatccccaagctgctcctgttgtctgcagacacgttttggatacactcattcaattggccaaggtatttcccagccacttcacacagcagcggaccaaagaaacaaactgtgagagtgatcgggaaaggggcaataaggcctgtagcccatgctcctcacagtcctccagcagtggcatttgcacagacttctgggacttattggtaaaactggacaacatgaatgtcagccggaaaggcaagaactccgtgaagtcagtgccagtgagcgctggcggtgagggggaaacctctccatacagcctcgaggcctctccactggggcagctcatgaacatgttgtcacacccagtcatccgccggagctctctcttaactgagaaactcctcagactcctttctctcatctcaattgctctcccagaaaacaaggtgtcagaagcacaggctaattctggcagcggtgcttcctccaccaccactgccacctcaaccacatctaccaccaccaccactgccgcctccaccacgcccacaccccctactgcacccacccctgtcacttctgctccagccctggttgctgccacggctatttccaccattgtcgtagctgcttcgaccacagtgactacccccacgactgctaccactactgtttcaatttctcccactactaagggcagcaaatctccagcgaaggtgagtgatgggggcagcagcagtacagactttaagatggtgtcctctggcctcactgaaaaccagctacagctctctgtagaggtgttgacatcccactcttgttctgaggaaggcttagaggatgcagccaacgtactactgcagctctcccggggggactctgggacccgggacactgttctcaagtcctgcgggagtggtatatgatcatctctcgagagatgtttaaccctatgtatgccttgttccgtacctcacctggtgatcgagtcacctacaccatcaatccatcttcccactgcaaccccaaccacctcagctacttcaagtttgtcggacgcattgtggccaaagctgtatatgacaaccgtcttctggagtgctactttactcgatccttttacaaacacatcttgggcaagtcagtcagatatacagatatggagagtgaagattaccacttctaccaaggtctggtttatctgctggaaaatgatgtctccacactaggctatgacctcaccttcagcactgaggtccaagagtttggagtttgtgaagttcgtgacctcaaacccaatggggccaacatcttggtaacagaggagaataagaaggagtatgtacacctggtatgccagatgagaatgacaggagccatccgcaagcagttggcggctttcttagaaggcttctatgagatcattccaaagcgcctcatttccatcttcactgagcaggagttagagctgcttatatcaggactgcccaccattgacatcgatgatctgaaatccaacactgaataccacaagtaccagtccaactctattcagatccagtggttctggagagcattgcgttctttcgatcaagctgaccgtgccaagttcctccagtttgtcacgggtacttccaaggtacccctgcaaggctttgctgccctcgaaggcatgaatggcattcagaagtttcagatccatcgagatgacaggtccacagatcgcctgccttcagctcacacatgttttaatcagctggatctgcctgcctatgagagctttgagaagctccgccacatgctactgttggctatccaggagtgctctgaaggctttgggctggcctaataaggccctgcccaactccgtggggttttttttaccattgttggacctggggaggggggagttaaaaaaagaaccagaaagaaattgtcaaaaaccaataaatgaaatccaccaactcaccgtgtgtgtcccagctgccccatcttccccagcgcatacctgttcctcttctcattctctccccgccgcctgtttcctcaccttctctcccctttccatgccgtccatgatccccaccccatgtgttttaaaaaggcagtagcctttgcagggacctgtctgtcccaactgtttgaacagtgtgctcctcagattctgtgttcagaaggatttgctgcattgagacttgaaacctttggataggggaaaaaattatatatatatatatttttttgttctgtttgcatttcttaatttgtgcttggaatgtgttgatgtgcacagctaatgattcaatgcgagacaagattggcgtctgtgttgtggaggtttcaaataaagagcactcttcataa

SEQ ID NO: 467016 - DNA, 12319 bp, Homo sapiens
ctgcatccaacctggggagtgctgtcgatgagctcatgagacatcagcccacccttaaaacagatgcaacgactgccatcatcaagttacttgaagaaatctgtaatcttggaagggaccccaaatacatctgtcagaagccatcaatccagaaggcagatggcactgccactgctcctcccccaaggtctaatcatgccgcagaagaagcctctagtgaggatgaggaggaagaggaagtacaggccatgcagagctttaattctacccagcaaaatgaaactgagcctaatcagcaggttgttggtacagaggaacgtattcctattcccctcatggattacatccttaatgtgatgaaatttgtggaatctattctgagcaacaatacaacagatgaccactgccaggaatttgtgaatcagaaaggactgttgcctttggttaccattttgggtcttcccaatctgcccattgactttcccacatctgctgcctgtcaggctgttgcaggtgtctgcaaatccatattgacactgtcacatgaacccaaagtccttcaagagggtctccttcagttggactccatcctctcctccctggagcccttacaccgccccattgaatcccctgggggctcagtgttgttgcgagaactggcttgcgcaggcaatgttgctgatgctaccctctcagcccaggccacacctctgctgcatgcactcactgctgcccatgcctacatcatgatgtttgttcatacttgcagagttggacagagtgaaattcgttccatctccgtaaaccagtggggctctcaattgggtctgagtgttttgagcaagctgagccagttatactgttccctggtgtgggaaagcactgtcctcctctctctgtgtaccccaaacagcctaccatctgggtgtgaatttggccaggcagatatgcagaaactggttccaaaggatgagaaggcaggtacgacccagggcggaaaaagatcagatggggaacaggatggagcagctggaagtatggatgcttctacccagggcttattagaaggcattgggctagatggtgacacattggctcccatggagacagatgaacctactgcttcagactctaagggcaaatctaaaatcacaccagcaatggctgccagaattaagcaaatcaagcctttgttatcagcttcctccagattaggccgagcacttgctgagctatttggacttcttgttaaactttgtgtgggatctcctgtccgccagagaaggagccatcatgctgccagcaccactacagcaccgacacctgccgcgcgatcaacagcctcagctctcactaagctcttgactaaggggttatcttggcagcccccaccatatacacctactccccgattcaggctgacattcttcatctgttcagttggtttcacatccccaatgctgtttgatgagaggaagtatccctaccacctcatgctgcaaaaatttctctgctccggaggccacaatgctctttttgaaactttcaactgggctctgtccatgggaggtaaagttcctgtttctgagggattggaacactcagacttgcctgatggcacaggagaattcctagatgcctggcttatgctggtggagaagatggtgaatcccaccacggtgcttgaatctccacattcgctgcctgccaaattgcctggaggtgtccagaactttccccagttcagtgcactgcgcttccttgtggtaactcagaaagcagcctttacttgcatcaaaaacttatggaaccggaaacccctgaaggtatatggtggacgaatggctgaatcgatgctggccattctatgccacatcctccgaggagaacctgtgattcgagagagactaagcaaggagaaggaggggtctcgaggagaagaggatacagggcaagaggaaggtggctcccgccgggaacctcaagtcaaccagcaacaactgcaacagctcatggacatgggcttcacaagggaacatgcaatggaggcactgttgaacaccagcaccatggagcaggccacagagtaccttttaacccaccctcctccaatcatgggaggagttgttcgggatctcagcatgtctgaagaggaccagatgatgagagcaattgctatgtctctgggacaggatattccaatggatcaaagggcagagtcacctgaggaagttgcttgccggaaggaggaagaggaacggaaagctcgggaaaagcaggaggaggaagaggctaaatgtctagagaagttccaggatgctgacccgttggaacaagatgagctccacactttcacagatactatgttgccaggctgcttccaccttcttgatgagctgccagacacagtataccgtgtgtgtgacctgatcatgacagcaatcaaacgtaatggagcagattatcgtgacatgattctgaagcaagtagtcaatcaggtgtgggaagctgctgatgtattgatcaaagctgctcttcccctgacaacaagtgacacaaaaaccgtgtcagagtggataagtcagatggccacactgccccaggcctccaatttggctactagaatcttgcttttaacgctactttttgaggagttgaagctaccttgtgcttgggtggttgaatcaagtggcatccttaatgtcctaatcaaactcttggaagtggttcagccctgcctccaggcagccaaggagcagaaggaagtccagaccccaaagtggatcacaccagtgttgctcctgattgatttctatgaaaagacagccatctcctcaaaaaggagagcccagatgactaagtacctgcaatccaacagcaacaactggcgctggtttgatgatcgctctgggcgttggtgtagttacagtgcaagcaacaatagcactattgattctgcctggaaatctggagagacaagcgtgcgattcactgcaggccgaagaagatacacggtccaattcactacaatggtgcaggttaatgaggaaacagggaaccgacgccctgtgatgctgactctcctcagggtacctcggctgaataaaaattcaaaaaacagcaatggacaggaactagagaagacgctggaagaaagcaaagaaatggatatcaaacgtaaagaaaataaaggcaatgatacccctttggccctagagagtacaaacactgaaaaggagacaagcctggaggaaacaaaaatcggggagatcctgatccagggcttgacagaagatatggtgactgttttaatccgggcctgcgtgagcatgctgggagtccctgtggacccagatactttgcatgccacccttcgtctctgtctgaggctcacccgggaccacaaatatgccatgatgtttgcagaactgaagagtacccgcatgatcttgaatttgacccagagctcaggcttcaatgggtttactcccctggtcacccttctcttaagacacatcattgaggacccctgtacccttcgtcataccatggaaaaggttgttcgctcagcagctacaagtggagctggtagcactacctctggtgttgtgtctggcagcctcggctctcgggagatcaactacatccttcgtgtccttgggccagccgcatgccgcaatccagacatattcacagaagtggccaactgctgtatccgcatcgcccttcctgcccctcgaggctcaggaactgcttcagatgatgaatttgagaatcttagaattaaaggccctaatgctgtacagctggtgaagaccacccctttgaagccctcacctctgcctgtcatccctgatactatcaaggaagtgatctatgatatgctgaatgctctggctgcataccatgctccagaggaagcagataaatctgatcctaaacctggggttatgacccaagaggttggccagctcctgcaagacatgggtgatgatgtataccagcagtaccggtcacttacgcgtcagagcagtgactttgatacgcagtcaggtttttccattaatagtcaggtctttgctgcagatggtgcctccactgagacttccgcatctgggacctcccaaggagaggcttcaactccagaggagtctcgagatgggaagaaagataaagaaggggaccgggcctctgaggaaggcaaacagaaaggcaagggcagcaaacctttaatgcctacctccactatccttcgtcttctggcagagttggtgaggtcctatgttggtattgctaccctgattgccaactacagctacactgtgggccagtctgaactgatcaaagaggactgcagtgtgctagcttttgttctggaccacctgctcccacatacccagaatgcagaagacaaggacacccctgccttggcccgcctgttcctcgcaagcctggctgctgcagggagtggcacagatgcccaggtggccctagtgaatgaagtaaaagcagcccttggacgggcactggctatggctgagagtacagagaaacatgccaggcttcaggcagtgatgtgtatcatcagtactatcatggagtcctgcccctccacctccagcttctacagcagtgccacagcgaagacccagcacaatggcatgaacaacatcattcggcttttcctgaagaagggactggttaatgacctggccagagtacctcacagcttagacctgtccagtcccaacatggccaacacagtcaatgctgctctgaagcctttggaaacactttcccggattgtgaaccagcccagtagcctttttggcagcaagagtgcttctagcaagaacaagtctgagcaggatgcccaaggagcctctcaagattccagtagcaaccagcaggacccaggcgagcctggggaagcagaagtgcaggaggaggatcatgatgtcactcagacagaggtggcagatggggatatcatggatggggaggctgaaaccgactcagtggtgattgctgggcagcctgaggtgctcagttcacaagagatgcaggttgagaatgagctggaggacctgatagatgagttgcttgagagggatggcggatctgggaacagtacaattatagtgagcagaagtggagaggatgaatcacaagaggacgtgctgatggatgaagctccttccaacctcagccaagcttccaccttgcaggccaaccgagaagattccatgaatatcctggaccctgaggatgaggaggagcacactcaggaagaggacagcagtggcagtaacgaggatgaggatgatagtcaggatgaagaggaggaggaggaggaagatgaggaagatgatcaggaggatgatgaaggtgaagagggagatgaagacgatgacgacgatggctctgagatggaattggatgaggattatcctgatatgaacgcttctcccttggtccgatttgagcgctttgaccgggaggatgatctcatcattgagtttgacaacatgttctccagtgctacagacatccccccatccccaggaaatatccctaccacccatccactgatggtgcgccatgcagaccacagttctctgacactgggcagtggctcttcaacaactcgtctcacccagggcatcgggcgcagtcagaggaccctaaggcagctgacggccaatactggccacaccattcatgttcactaccctgggaatcgccagcccaaccctcctcttatactgcagaggttgcttggtccctcagctgctgctgacatccttcagctgagcagcagccttcccctacaaagccggggtcgggcccgcctcctggtaggcaacgatgacgtccacatcatcgcccgttctgatgatgagctgctggatgactttttccatgatcagagcacagctaccagccaagcaggaaccctgtccagcatccccacagccctgacccgctggacagaagaatgcaaagttctcgatgctgagagcatgcatgactgtgtttcagtggttaaagtgtccattgtcaatcacctggaattcctgagggatgaggagctggaagaaaggcgagagaagcgcaggaaacaactggctgaggaagaaacaaagataactgataaaggcaaagaagataaggagaacagggatcagagtgcacagtgtactgcatctaagtcaaatgactccactgaacagaatctctcagatgggacgcctatgcctgacagctacccaacaaccccatcttcaactgatgcagctacatctgagtccaaggagacccttggcactctgcaatcctcacaacagcaaccaacactcccaaccccaccagctttgggagaggttcctcaggagctgcagtctccagctggagaagggggcagctctacacagctattgatgcctgtagagccagaggaattgggtcccacaaggccaagtggggaagcagaaacaactcagatggagttatccccagctcccactataacctcactttccccagagagagctgaggattctgatgcactgacggctgtcagcagtcagctagaaggctctcctatggatacaagcagcctggcttcctgtaccttagaggaggctgtgggtgacacttcagcagctggcagttctgagcagcccagagcaggcagctccactcctggggatgccccaccagctgtggcggaagtgcaaggcaggagtgatgggtcaggggaatctgcccagccacctgaggacagctccccacctgcatcctctgagagctcttccaccagagattctgccgtggccatttctggagcagattcccgaggaatcctagaagagccgttgccttcaacaagcagtgaagaagaagatccccttgcgggtatcagtctccctgaaggtgtggacccctcttttctggctgccctgcctgatgacatccgtcgggaagttctacagaaccagctaggcattcgtccaccaacccggactgccccctccacaaatagctcagcgcctgcagtggtggggaatcctggtgtgactgaagtgagccctgagtttctggctgccctgcctccagccattcaggaggaagtactggcacagcagagagctgagcagcagcgacgagaactagcacagaatgccagctcagacacccctatggaccctgtgaccttcatccagactctgccctcagacctgcgccgtagtgtcctagaggatatggaggacagtgtgttagctgtgatgccacctgacattgcagctgaggctcaagccctgagacgagagcaagaagcccggcagcgacagctcatgcatgagcgtctgtttgggcacagtagcacctccgcactctctgctattctccgaagcccggctttcaccagtcgcttaagtggcaaccgtggggtccagtatactcgccttgctgtgcagagaggtggcaccttccagatggggggtagcagcagccataacaggccttctggcagtaatgtagatactctcctccgcctccgaggacggctccttctggaccacgaagccctttcttgtctcttggtcctactttttgtggatgagccaaagctcaatactagccgtctacaccgagtactgagaaatctctgctaccatgcccagacccgccactgggtcatccgcagtctgctctccatcttgcagcgcagcagtgagagtgagctatgcattgaaacacccaaactcactacaagtgaggaaaagggcaaaaagtcgagcaagagctgtgggtcaagtagccatgagaaccgtcccctggacctgctacacaagatggagtcaaagagctccaaccagctttcctggctctcagtatccatggatgcagccctaggctgcaggactaatatatttcagatccagcgttcaggggggcgtaaacataccgagaagcatgcaagcggtggctccaccgtccacatccatccccaagctgctcctgttgtctgcagacacgttttggatacactcattcaattggccaaggtatttcccagccacttcacacagcagcggaccaaagaaacaaactgtgagagtgatcgggaaaggggcaataaggcctgtagcccatgctcctcacagtcctccagcagtggcatttgcacagacttctgggacttattggtaaaactggacaacatgaatgtcagccggaaaggcaagaactccgtgaagtcagtgccagtgagcgctggcggtgagggggaaacctctccatacagcctcgaggcctctccactggggcagctcatgaacatgttgtcacacccagtcatccgccggagctctctcttaactgagaaactcctcagactcctttctctcatctcaattgctctcccagaaaacaaggtgtcagaagcacaggctaattctggcagcggtgcttcctccaccaccactgccacctcaaccacatctaccaccaccaccactgccgcctccaccacgcccacaccccctactgcacccacccctgtcacttctgctccagccctggttgctgccacggctatttccaccattgtcgtagctgcttcgaccacagtgactacccccacgactgctaccactactgtttcaatttctcccactactaagggcagcaaatctccagcgaaggtgagtgatgggggcagcagcagtacagactttaagatggtgtcctctggcctcactgaaaaccagctacagctctctgtagaggtgttgacatcccactcttgttctgaggaaggcttagaggatgcagccaacgtactactgcagctctcccggggggactctgggacccgggacactgttctcaagctgctactgaatggagcccgccatctgggttataccctttgtaaacaaataggtaccctgctggccgagctgcgggaatacaacctcgagcagcagcggcgagcccaatgtgaaaccctctctcctgatggcctgcctgaggagcagccacagaccaccaagctgaagggcaaaatgcagagcaggtttgacatggctgagaatgtggtaattgtggcatctcagaagcgacctttgggtggccgggagctccagctgccttctatgtccatgttgacatccaagacatctacccagaagttcttcttgagggtactacaggtcatcatccagctccgggacgacacgcgccgggctaacaagaaagccaagcagacaggcaggctaggttcctccggtttaggctcagctagcagcatccaggcagctgttcggcagctggaggctgaggctgatgccattatacaaatggtacgtgagggtcaaagggcgcggagacagcaacaagcagcaacgtcggagtctagccagtcagaggcgtctgtccggagggaggaatcacccatggatgtggaccagccatctcccagtgctcaagatactcaatccattgcctccgatggaaccccacagggggagaaggaaaaggaagaaagaccacctgagttacccctgctcagcgagcagctgagtttggacgagctgtgggacatgcttggggagtgtctaaaggaactagaggaatcccatgaccagcatgcggtgctagagactcaccgcactgtgttaaaccagatcctacggcagtccacgacccaccttgctgatgggccttttgctgtcctggtagactacattcgtgtcctcgactttgatgtcaagcgcaaatatttccgccaagagctggagcgtttagatgaggggctccggaaagaagacatggctgtgcatgtccgtcgtgaccatgtgtttgaagactcctatcgtgagctgcatcgcaaatcccccgaagaaatgaagaatcgattgtaagggcccaggaacggagaaaagatggcgggtgggaggtggggcctcctgcacagtagcgatggcttgctctagcctcaaatttagggaggtgctgccctccctaataggaattccccataggaatctggttttagataatcttactgagttgtctcctatcttctgggcctgccctgctggctggccctttagctaagctacccaacaattcccagacagacaggaaagtctttggtgtttataaggatatacctgctggctttgcaatgagagctttaatattgctatactaggaatgaccatgtatgagtggcctccaccaaactggtaactgctcactggtgattctgaagccacctagaggagatcagcagtttgtaatactgagcgtaggagctgatgagatgaaagacctattggagttgtttaatgattcctccccatctcttgtggtgtgggctctccaactgtgtaatcacaagaagtcagggagtctccctagacagactgtatgccatgttcttccaccaccaaatacctttagagaatttggactctgggcttatccctctctaataccacttttctcccctccccacttcacctaagcaaggcctcatttatttctctgatacctttcctattggtgttttctggaatatctgttaaccttgactattttgggacatctcctctgtcagtggtgcttttgtttgctcccagatctccaccccatttctgggctgtcctggcactctctgtttacctcttcatctgacactgcactccccagacactgcttcacagtctctcactcacacaaatgactggatgtatcctgggttttctgcacagctcttttctgcttctgctttcttatgcaggtatatagtatttgaaggagaagaagggcaggatgctggcgggctcctgcgggagtggtatatgatcatctctcgagagatgtttaaccctatgtatgccttgttccgtacctcacctggtgatcgagtcacctacaccatcaatccatcttcccactgcaaccccaaccacctcagctacttcaagtttgtcggacgcattgtggccaaagctgtatatgacaaccgtcttctggagtgctactttactcgatccttttacaaacacatcttgggcaagtcagtcagatatacagatatggagagtgaagattaccacttctaccaaggtctggtttatctgctggaaaatgatgtctccacactaggctatgacctcaccttcagcactgaggtccaagagtttggagtttgtgaagttcgtgacctcaaacccaatggggccaacatcttggtaacagaggagaataagaaggagtatgtacacctggtatgccagatgagaatgacaggagccatccgcaagcagttggcggctttcttagaaggcttctatgagatcattccaaagcgcctcatttccatcttcactgagcaggagttagagctgcttatatcaggactgcccaccattgacatcgatgatctgaaatccaacactgaataccacaagtaccagtccaactctattcagatccagtggttctggagagcattgcgttctttcgatcaagctgaccgtgccaagttcctccagtttgtcacgggtacttccaaggtacccctgcaaggctttgctgccctcgaaggcatgaatggcattcagaagtttcagatccatcgagatgacaggtccacagatcgcctgccttcagctcacacatgttttaatcagctggatctgcctgcctatgagagctttgagaagctccgccacatgctactgttggctatccaggagtgctctgaaggctttgggctggcctaataaggccctgcccaactccgtggggttttttttaccattgttggacctggggaggggggagttaaaaaaagaaccagaaagaaattgtcaaaaaccaataaatgaaatccaccaactcaccgtgtgtgtcccagctgccccatcttccccagcgcatacctgttcctcttctcattctctccccgccgcctgtttcctcaccttctctcccctttccatgccgtccatgatccccaccccatgtgttttaaaaaggcagtagcctttgcagggacctgtctgtcccaactgtttgaacagtgtgctcctcagattctgtgttcagaaggatttgctgcattgagacttgaaacctttggataggggaaaaaattatatatatatatatttttttgttctgtttgcatttcttaatttgtgcttggaatgtgttgatgtgcacagctaatgattcaatgcgagacaagattggcgtctgtgttgtggaggtttcaaataaagagcactcttcataa

SEQ ID NO: 467017 - DNA, 11739 bp, Homo sapiens
ctgcatccaacctggggagtgctgtcgatgagctcatgagacatcagcccacccttaaaacagatgcaacgactgccatcatcaagttacttgaagaaatctgtaatcttggaagggaccccaaatacatctgtcagaagccatcaatccagaaggcagatggcactgccactgctcctcccccaaggtctaatcatgccgcagaagaagcctctagtgaggatgaggaggaagaggaagtacaggccatgcagagctttaattctacccagcaaaatgaaactgagcctaatcagcaggttgttggtacagaggaacgtattcctattcccctcatggattacatccttaatgtgatgaaatttgtggaatctattctgagcaacaatacaacagatgaccactgccaggaatttgtgaatcagaaaggactgttgcctttggttaccattttgggtcttcccaatctgcccattgactttcccacatctgctgcctgtcaggctgttgcaggtgtctgcaaatccatattgacactgtcacatgaacccaaagtccttcaagagggtctccttcagttggactccatcctctcctccctggagcccttacaccgccccattgaatcccctgggggctcagtgttgttgcgagaactggcttgcgcaggcaatgttgctgatgctaccctctcagcccaggccacacctctgctgcatgcactcactgctgcccatgcctacatcatgatgtttgttcatacttgcagagttggacagagtgaaattcgttccatctccgtaaaccagtggggctctcaattgggtctgagtgttttgagcaagctgagccagttatactgttccctggtgtgggaaagcactgtcctcctctctctgtgtaccccaaacagcctaccatctgggtgtgaatttggccaggcagatatgcagaaactggttccaaaggatgagaaggcaggtacgacccagggcggaaaaagatcagatggggaacaggatggagcagctggaagtatggatgcttctacccagggcttattagaaggcattgggctagatggtgacacattggctcccatggagacagatgaacctactgcttcagactctaagggcaaatctaaaatcacaccagcaatggctgccagaattaagcaaatcaagcctttgttatcagcttcctccagattaggccgagcacttgctgagctatttggacttcttgttaaactttgtgtgggatctcctgtccgccagagaaggagccatcatgctgccagcaccactacagcaccgacacctgccgcgcgatcaacagcctcagctctcactaagctcttgactaaggggttatcttggcagcccccaccatatacacctactccccgattcaggctgacattcttcatctgttcagttggtttcacatccccaatgctgtttgatgagaggaagtatccctaccacctcatgctgcaaaaatttctctgctccggaggccacaatgctctttttgaaactttcaactgggctctgtccatgggaggtaaagttcctgtttctgagggattggaacactcagacttgcctgatggcacaggagaattcctagatgcctggcttatgctggtggagaagatggtgaatcccaccacggtgcttgaatctccacattcgctgcctgccaaattgcctggaggtgtccagaactttccccagttcagtgcactgcgcttccttgtggtaactcagaaagcagcctttacttgcatcaaaaacttatggaaccggaaacccctgaaggtatatggtggacgaatggctgaatcgatgctggccattctatgccacatcctccgaggagaacctgtgattcgagagagactaagcaaggagaaggaggggtctcgaggagaagaggatacagggcaagaggaaggtggctcccgccgggaacctcaagtcaaccagcaacaactgcaacagctcatggacatgggcttcacaagggaacatgcaatggaggcactgttgaacaccagcaccatggagcaggccacagagtaccttttaacccaccctcctccaatcatgggaggagttgttcgggatctcagcatgtctgaagaggaccagatgatgagagcaattgctatgtctctgggacaggatattccaatggatcaaagggcagagtcacctgaggaagttgcttgccggaaggaggaagaggaacggaaagctcgggaaaagcaggaggaggaagaggctaaatgtctagagaagttccaggatgctgacccgttggaacaagatgagctccacactttcacagatactatgttgccaggctgcttccaccttcttgatgagctgccagacacagtataccgtgtgtgtgacctgatcatgacagcaatcaaacgtaatggagcagattatcgtgacatgattctgaagcaagtagtcaatcaggtgtgggaagctgctgatgtattgatcaaagctgctcttcccctgacaacaagtgacacaaaaaccgtgtcagagtggataagtcagatggccacactgccccaggcctccaatttggctactagaatcttgcttttaacgctactttttgaggagttgaagctaccttgtgcttgggtggttgaatcaagtggcatccttaatgtcctaatcaaactcttggaagtggttcagccctgcctccaggcagccaaggagcagaaggaagtccagaccccaaagtggatcacaccagtgttgctcctgattgatttctatgaaaagacagccatctcctcaaaaaggagagcccagatgactaagtacctgcaatccaacagcaacaactggcgctggtttgatgatcgctctgggcgttggtgtagttacagtgcaagcaacaatagcactattgattctgcctggaaatctggagagacaagcgtgcgattcactgcaggccgaagaagatacacggtccaattcactacaatggtgcaggttaatgaggaaacagggaaccgacgccctgtgatgctgactctcctcagggtacctcggctgaataaaaattcaaaaaacagcaatggacaggaactagagaagacgctggaagaaagcaaagaaatggatatcaaacgtaaagaaaataaaggcaatgatacccctttggccctagagagtacaaacactgaaaaggagacaagcctggaggaaacaaaaatcggggagatcctgatccagggcttgacagaagatatggtgactgttttaatccgggcctgcgtgagcatgctgggagtccctgtggacccagatactttgcatgccacccttcgtctctgtctgaggctcacccgggaccacaaatatgccatgatgtttgcagaactgaagagtacccgcatgatcttgaatttgacccagagctcaggcttcaatgggtttactcccctggtcacccttctcttaagacacatcattgaggacccctgtacccttcgtcataccatggaaaaggttgttcgctcagcagctacaagtggagctggtagcactacctctggtgttgtgtctggcagcctcggctctcgggagatcaactacatccttcgtgtccttgggccagccgcatgccgcaatccagacatattcacagaagtggccaactgctgtatccgcatcgcccttcctgcccctcgaggctcaggaactgcttcagatgatgaatttgagaatcttagaattaaaggccctaatgctgtacagctggtgaagaccacccctttgaagccctcacctctgcctgtcatccctgatactatcaaggaagtgatctatgatatgctgaatgctctggctgcataccatgctccagaggaagcagataaatctgatcctaaacctggggttatgacccaagaggttggccagctcctgcaagacatgggtgatgatgtataccagcagtaccggtcacttacgcgtcagagcagtgactttgatacgcagtcaggtttttccattaatagtcaggtctttgctgcagatggtgcctccactgagacttccgcatctgggacctcccaaggagaggcttcaactccagaggagtctcgagatgggaagaaagataaagaaggggaccgggcctctgaggaaggcaaacagaaaggcaagggcagcaaacctttaatgcctacctccactatccttcgtcttctggcagagttggtgaggtcctatgttggtattgctaccctgattgccaactacagctacactgtgggccagtctgaactgatcaaagaggactgcagtgtgctagcttttgttctggaccacctgctcccacatacccagaatgcagaagacaaggacacccctgccttggcccgcctgttcctcgcaagcctggctgctgcagggagtggcacagatgcccaggtggccctagtgaatgaagtaaaagcagcccttggacgggcactggctatggctgagagtacagagaaacatgccaggcttcaggcagtgatgtgtatcatcagtactatcatggagtcctgcccctccacctccagcttctacagcagtgccacagcgaagacccagcacaatggcatgaacaacatcattcggcttttcctgaagaagggactggttaatgacctggccagagtacctcacagcttagacctgtccagtcccaacatggccaacacagtcaatgctgctctgaagcctttggaaacactttcccggattgtgaaccagcccagtagcctttttggcagcaagagtgcttctagcaagaacaagtctgagcaggatgcccaaggagcctctcaagattccagtagcaaccagcaggacccaggcgagcctggggaagcagaagtgcaggaggaggatcatgatgtcactcagacagaggtggcagatggggatatcatggatggggaggctgaaaccgactcagtggtgattgctgggcagcctgaggtgctcagttcacaagagatgcaggttgagaatgagctggaggacctgatagatgagttgcttgagagggatggcggatctgggaacagtacaattatagtgagcagaagtggagaggatgaatcacaagaggacgtgctgatggatgaagctccttccaacctcagccaagcttccaccttgcaggccaaccgagaagattccatgaatatcctggaccctgaggatgaggaggagcacactcaggaagaggacagcagtggcagtaacgaggatgaggatgatagtcaggatgaagaggaggaggaggaggaagatgaggaagatgatcaggaggatgatgaaggtgaagagggagatgaagacgatgacgacgatggctctgagatggaattggatgaggattatcctgatatgaacgcttctcccttggtccgatttgagcgctttgaccgggaggatgatctcatcattgagtttgacaacatgttctccagtgctacagacatccccccatccccaggaaatatccctaccacccatccactgatggtgcgccatgcagaccacagttctctgacactgggcagtggctcttcaacaactcgtctcacccagggcatcgggcgcagtcagaggaccctaaggcagctgacggccaatactggccacaccattcatgttcactaccctgggaatcgccagcccaaccctcctcttatactgcagaggttgcttggtccctcagctgctgctgacatccttcagctgagcagcagccttcccctacaaagccggggtcgggcccgcctcctggtaggcaacgatgacgtccacatcatcgcccgttctgatgatgagctgctggatgactttttccatgatcagagcacagctaccagccaagcaggaaccctgtccagcatccccacagccctgacccgctggacagaagaatgcaaagttctcgatgctgagagcatgcatgactgtgtttcagtggttaaagtgtccattgtcaatcacctggaattcctgagggatgaggagctggaagaaaggcgagagaagcgcaggaaacaactggctgaggaagaaacaaagataactgataaaggcaaagaagataaggagaacagggatcagagtgcacagtgtactgcatctaagtcaaatgactccactgaacagaatctctcagatgggacgcctatgcctgacagctacccaacaaccccatcttcaactgatgcagctacatctgagtccaaggagacccttggcactctgcaatcctcacaacagcaaccaacactcccaaccccaccagctttgggagaggttcctcaggagctgcagtctccagctggagaagggggcagctctacacagctattgatgcctgtagagccagaggaattgggtcccacaaggccaagtggggaagcagaaacaactcagatggagttatccccagctcccactataacctcactttccccagagagagctgaggattctgatgcactgacggctgtcagcagtcagctagaaggctctcctatggatacaagcagcctggcttcctgtaccttagaggaggctgtgggtgacacttcagcagctggcagttctgagcagcccagagcaggcagctccactcctggggatgccccaccagctgtggcggaagtgcaaggcaggagtgatgggtcaggggaatctgcccagccacctgaggacagctccccacctgcatcctctgagagctcttccaccagagattctgccgtggccatttctggagcagattcccgaggaatcctagaagagccgttgccttcaacaagcagtgaagaagaagatccccttgcgggtatcagtctccctgaaggtgtggacccctcttttctggctgccctgcctgatgacatccgtcgggaagttctacagaaccagctaggcattcgtccaccaacccggactgccccctccacaaatagctcagcgcctgcagtggtggggaatcctggtgtgactgaagtgagccctgagtttctggctgccctgcctccagccattcaggaggaagtactggcacagcagagagctgagcagcagcgacgagaactagcacagaatgccagctcagacacccctatggaccctgtgaccttcatccagactctgccctcagacctgcgccgtagtgtcctagaggatatggaggacagtgtgttagctgtgatgccacctgacattgcagctgaggctcaagccctgagacgagagcaagaagcccggcagcgacagctcatgcatgagcgtctgtttgggcacagtagcacctccgcactctctgctattctccgaagcccggctttcaccagtcgcttaagtggcaaccgtggggtccagtatactcgccttgctgtgcagagaggtggcaccttccagatggggggtagcagcagccataacaggccttctggcagtaatgtagatactctcctccgcctccgaggacggctccttctggaccacgaagccctttcttgtctcttggtcctactttttgtggatgagccaaagctcaatactagccgtctacaccgagtactgagaaatctctgctaccatgcccagacccgccactgggtcatccgcagtctgctctccatcttgcagcgcagcagtgagagtgagctatgcattgaaacacccaaactcactacaagtgaggaaaagggcaaaaagtcgagcaagagctgtgggtcaagtagccatgagaaccgtcccctggacctgctacacaagatggagtcaaagagctccaaccagctttcctggctctcagtatccatggatgcagccctaggctgcaggactaatatatttcagatccagcgttcaggggggcgtaaacataccgagaagcatgcaagcggtggctccaccgtccacatccatccccaagctgctcctgttgtctgcagacacgttttggatacactcattcaattggccaaggtatttcccagccacttcacacagcagcggaccaaagaaacaaactgtgagagtgatcgggaaaggggcaataaggcctgtagcccatgctcctcacagtcctccagcagtggcatttgcacagacttctgggacttattggtaaaactggacaacatgaatgtcagccggaaaggcaagaactccgtgaagtcagtgccagtgagcgctggcggtgagggggaaacctctccatacagcctcgaggcctctccactggggcagctcatgaacatgttgtcacacccagtcatccgccggagctctctcttaactgagaaactcctcagactcctttctctcatctcaattgctctcccagaaaacaaggtgtcagaagcacaggctaattctggcagcggtgcttcctccaccaccactgccacctcaaccacatctaccaccaccaccactgccgcctccaccacgcccacaccccctactgcacccacccctgtcacttctgctccagccctggttgctgccacggctatttccaccattgtcgtagctgcttcgaccacagtgactacccccacgactgctaccactactgtttcaatttctcccactactaagggcagcaaatctccagcgaaggtgagtgatgggggcagcagcagtacagactttaagatggtgtcctctggcctcactgaaaaccagctacagctctctgtagaggtgttgacatcccactcttgttctgaggaaggcttagaggatgcagccaacgtactactgcagctctcccggggggactctgggacccgggacactgttctcaagctgctactgaatggagcccgccatctgggttataccctttgtaaacaaataggtaccctgctggccgagctgcgggaatacaacctcgagcagcagcggcgagcccaatgtgaaaccctctctcctgatggcctgcctgaggagcagccacagaccaccaagctgaagggcaaaatgcagagcaggtttgacatggctgagaatgtggtaattgtggcatctcagaagcgacctttgggtggccgggagctccagctgccttctatgtccatgttgacatccaagacatctacccagaagttcttcttgagggtactacaggtcatcatccagctccgggacgacacgcgccgggctaacaagaaagccaagcagacaggcaggctaggttcctccggtttaggctcagctagcagcatccaggcagctgttcggcagctggaggctgaggctgatgccattatacaaatggtacgtgagggtcaaagggcgcggagacagcaacaagcagcaacgtcggagtctagccagtcagaggcgtctgtccggagggaggaatcacccatggatgtggaccagccatctcccagtgctcaagatactcaatccattgcctccgatggaaccccacagggggagaaggaaaaggaagaaagaccacctgagttacccctgctcagcgagcagctgagtttggacgagctgtgggacatgcttggggagtgtctaaaggaactagaggaatcccatgaccagcatgcggtgctagtgctacagcctgctgtcgaggccttctttctggtccatgccacagagcgggagagcaagcctcctgtccgagacacccgtgagagccagctggcacacatcaaggacgagcctcctccactctcccctgcccccttaaccccagccacgccttcctcccttgacccattcttctcccgggagccctcatctatgcacatctcctcaagcctgccccctgacacacagaagttccttcgctttgcagagactcaccgcactgtgttaaaccagatcctacggcagtccacgacccaccttgctgatgggccttttgctgtcctggtagactacattcgtgtcctcgactttgatgtcaagcgcaaatatttccgccaagagctggagcgtttagatgaggggctccggaaagaagacatggctgtgcatgtccgtcgtgaccatgtgtttgaagactcctatcgtgagctgcatcgcaaatcccccgaagaaatgaagaatcgattgtatatagtatttgaaggagaagaagggcaggatgctggcgggctcctgcgggagtggtatatgatcatctctcgagagatgtttaaccctatgtatgccttgttccgtacctcacctggtgatcgagtcacctacaccatcaatccatcttcccactgcaaccccaaccacctcagctacttcaagtttgtcggacgcattgtggccaaagctgtatatgacaaccgtcttctggagtgctactttactcgatccttttacaaacacatcttgggcaagtcagtcagatatacagatatggagagtgaagattaccacttctaccaaggtctggtttatctgctggaaaatgatgtctccacactaggctatgacctcaccttcagcactgaggtccaagagtttggagtttgtgaagttcgtgacctcaaacccaatggggccaacatcttggtaacagaggagaataagaaggagtatgtacacctggtatgccagatgagaatgacaggagccatccgcaagcagttggcggctttcttagaaggcttctatgagatcattccaaagcgcctcatttccatcttcactgagcaggagttagagctgcttatatcaggactgcccaccattgacatcgatgatctgaaatccaacactgaataccacaagtaccagtccaactctattcagatccagtggttctggagagcattgcgttctttcgatcaagctgaccgtgccaagttcctccagtttgtcacgggtacttccaaggtacccctgcaaggctttgctgccctcgaaggcatgaatggcattcagaagtttcagatccatcgagatgacaggtccacagatcgcctgccttcagctcacacatgggccagcgtgactggagcaaggaggagttgcagggagcaaaagtctaaagagctcagcagagttttaatcagctggatctgcctgcctatgagagctttgagaagctccgccacatgctactgttggctatccaggagtgctctgaaggctttgggctggcctaataaggccctgcccaactccgtggggttttttttaccattgttggacctggggaggggggagttaaaaaaagaaccagaaagaaattgtcaaaaaccaataaatgaaatccaccaactcaccgtgtgtgtcccagctgccccatcttccccagcgcatacctgttcctcttctcattctctccccgccgcctgtttcctcaccttctctcccctttccatgccgtccatgatccccaccccatgtgttttaaaaaggcagtagcctttgcagggacctgtctgtcccaactgtttgaacagtgtgctcctcagattctgtgttcagaaggatttgctgcattgagacttgaaacctttggataggggaaaaaattatatatatatatatttttttgttctgtttgcatttcttaatttgtgcttggaatgtgttgatgtgcacagctaatgattcaatgcgagacaagattggcgtctgtgttgtggaggtttcaaataaagagcactcttcataa

SEQ ID NO: 467018 - DNA, 11431 bp, Homo sapiens
ctgcatccaacctggggagtgctgtcgatgagctcatgagacatcagcccacccttaaaacagatgcaacgactgccatcatcaagttacttgaagaaatctgtaatcttggaagggaccccaaatacatctgtcagaagccatcaatccagaaggcagatggcactgccactgctcctcccccaaggtctaatcatgccgcagaagaagcctctagtgaggatgaggaggaagaggaagtacaggccatgcagagctttaattctacccagcaaaatgaaactgagcctaatcagcaggttgttggtacagaggaacgtattcctattcccctcatggattacatccttaatgtgatgaaatttgtggaatctattctgagcaacaatacaacagatgaccactgccaggaatttgtgaatcagaaaggactgttgcctttggttaccattttgggtcttcccaatctgcccattgactttcccacatctgctgcctgtcaggctgttgcaggtgtctgcaaatccatattgacactgtcacatgaacccaaagtccttcaagagggtctccttcagttggactccatcctctcctccctggagcccttacaccgccccattgaatcccctgggggctcagtgttgttgcgagaactggcttgcgcaggcaatgttgctgatgctaccctctcagcccaggccacacctctgctgcatgcactcactgctgcccatgcctacatcatgatgtttgttcatacttgcagagttggacagagtgaaattcgttccatctccgtaaaccagtggggctctcaattgggtctgagtgttttgagcaagctgagccagttatactgttccctggtgtgggaaagcactgtcctcctctctctgtgtaccccaaacagcctaccatctgggtgtgaatttggccaggcagatatgcagaaactggttccaaaggatgagaaggcaggtacgacccagggcggaaaaagatcagatggggaacaggatggagcagctggaagtatggatgcttctacccagggcttattagaaggcattgggctagatggtgacacattggctcccatggagacagatgaacctactgcttcagactctaagggcaaatctaaaatcacaccagcaatggctgccagaattaagcaaatcaagcctttgttatcagcttcctccagattaggccgagcacttgctgagctatttggacttcttgttaaactttgtgtgggatctcctgtccgccagagaaggagccatcatgctgccagcaccactacagcaccgacacctgccgcgcgatcaacagcctcagctctcactaagctcttgactaaggggttatcttggcagcccccaccatatacacctactccccgattcaggctgacattcttcatctgttcagttggtttcacatccccaatgctgtttgatgagaggaagtatccctaccacctcatgctgcaaaaatttctctgctccggaggccacaatgctctttttgaaactttcaactgggctctgtccatgggaggtaaagttcctgtttctgagggattggaacactcagacttgcctgatggcacaggagaattcctagatgcctggcttatgctggtggagaagatggtgaatcccaccacggtgcttgaatctccacattcgctgcctgccaaattgcctggaggtgtccagaactttccccagttcagtgcactgcgcttccttgtggtaactcagaaagcagcctttacttgcatcaaaaacttatggaaccggaaacccctgaaggtatatggtggacgaatggctgaatcgatgctggccattctatgccacatcctccgaggagaacctgtgattcgagagagactaagcaaggagaaggaggggtctcgaggagaagaggatacagggcaagaggaaggtggctcccgccgggaacctcaagtcaaccagcaacaactgcaacagctcatggacatgggcttcacaagggaacatgcaatggaggcactgttgaacaccagcaccatggagcaggccacagagtaccttttaacccaccctcctccaatcatgggaggagttgttcgggatctcagcatgtctgaagaggaccagatgatgagagcaattgctatgtctctgggacaggatattccaatggatcaaagggcagagtcacctgaggaagttgcttgccggaaggaggaagaggaacggaaagctcgggaaaagcaggaggaggaagaggctaaatgtctagagaagttccaggatgctgacccgttggaacaagatgagctccacactttcacagatactatgttgccaggctgcttccaccttcttgatgagctgccagacacagtataccgtgtgtgtgacctgatcatgacagcaatcaaacgtaatggagcagattatcgtgacatgattctgaagcaagtagtcaatcaggtgtgggaagctgctgatgtattgatcaaagctgctcttcccctgacaacaagtgacacaaaaaccgtgtcagagtggataagtcagatggccacactgccccaggcctccaatttggctactagaatcttgcttttaacgctactttttgaggagttgaagctaccttgtgcttgggtggttgaatcaagtggcatccttaatgtcctaatcaaactcttggaagtggttcagccctgcctccaggcagccaaggagcagaaggaagtccagaccccaaagtggatcacaccagtgttgctcctgattgatttctatgaaaagacagccatctcctcaaaaaggagagcccagatgactaagtacctgcaatccaacagcaacaactggcgctggtttgatgatcgctctgggcgttggtgtagttacagtgcaagcaacaatagcactattgattctgcctggaaatctggagagacaagcgtgcgattcactgcaggccgaagaagatacacggtccaattcactacaatggtgcaggttaatgaggaaacagggaaccgacgccctgtgatgctgactctcctcagggtacctcggctgaataaaaattcaaaaaacagcaatggacaggaactagagaagacgctggaagaaagcaaagaaatggatatcaaacgtaaagaaaataaaggcaatgatacccctttggccctagagagtacaaacactgaaaaggagacaagcctggaggaaacaaaaatcggggagatcctgatccagggcttgacagaagatatggtgactgttttaatccgggcctgcgtgagcatgctgggagtccctgtggacccagatactttgcatgccacccttcgtctctgtctgaggctcacccgggaccacaaatatgccatgatgtttgcagaactgaagagtacccgcatgatcttgaatttgacccagagctcaggcttcaatgggtttactcccctggtcacccttctcttaagacacatcattgaggacccctgtacccttcgtcataccatggaaaaggttgttcgctcagcagctacaagtggagctggtagcactacctctggtgttgtgtctggcagcctcggctctcgggagatcaactacatccttcgtgtccttgggccagccgcatgccgcaatccagacatattcacagaagtggccaactgctgtatccgcatcgcccttcctgcccctcgaggctcaggaactgcttcagatgatgaatttgagaatcttagaattaaaggccctaatgctgtacagctggtgaagaccacccctttgaagccctcacctctgcctgtcatccctgatactatcaaggaagtgatctatgatatgctgaatgctctggctgcataccatgctccagaggaagcagataaatctgatcctaaacctggggttatgacccaagaggttggccagctcctgcaagacatgggtgatgatgtataccagcagtaccggtcacttacgcgtcagagcagtgactttgatacgcagtcaggtttttccattaatagtcaggtctttgctgcagatggtgcctccactgagacttccgcatctgggacctcccaaggagaggcttcaactccagaggagtctcgagatgggaagaaagataaagaaggggaccgggcctctgaggaaggcaaacagaaaggcaagggcagcaaacctttaatgcctacctccactatccttcgtcttctggcagagttggtgaggtcctatgttggtattgctaccctgattgccaactacagctacactgtgggccagtctgaactgatcaaagaggactgcagtgtgctagcttttgttctggaccacctgctcccacatacccagaatgcagaagacaaggacacccctgccttggcccgcctgttcctcgcaagcctggctgctgcagggagtggcacagatgcccaggtggccctagtgaatgaagtaaaagcagcccttggacgggcactggctatggctgagagtacagagaaacatgccaggcttcaggcagtgatgtgtatcatcagtactatcatggagtcctgcccctccacctccagcttctacagcagtgccacagcgaagacccagcacaatggcatgaacaacatcattcggcttttcctgaagaagggactggttaatgacctggccagagtacctcacagcttagacctgtccagtcccaacatggccaacacagtcaatgctgctctgaagcctttggaaacactttcccggattgtgaaccagcccagtagcctttttggcagcaagagtgcttctagcaagaacaagtctgagcaggatgcccaaggagcctctcaagattccagtagcaaccagcaggacccaggcgagcctggggaagcagaagtgcaggaggaggatcatgatgtcactcagacagaggtggcagatggggatatcatggatggggaggctgaaaccgactcagtggtgattgctgggcagcctgaggtgctcagttcacaagagatgcaggttgagaatgagctggaggacctgatagatgagttgcttgagagggatggcggatctgggaacagtacaattatagtgagcagaagtggagaggatgaatcacaagaggacgtgctgatggatgaagctccttccaacctcagccaagcttccaccttgcaggccaaccgagaagattccatgaatatcctggaccctgaggatgaggaggagcacactcaggaagaggacagcagtggcagtaacgaggatgaggatgatagtcaggatgaagaggaggaggaggaggaagatgaggaagatgatcaggaggatgatgaaggtgaagagggagatgaagacgatgacgacgatggctctgagatggaattggatgaggattatcctgatatgaacgcttctcccttggtccgatttgagcgctttgaccgggaggatgatctcatcattgagtttgacaacatgttctccagtgctacagacatccccccatccccaggaaatatccctaccacccatccactgatggtgcgccatgcagaccacagttctctgacactgggcagtggctcttcaacaactcgtctcacccagggcatcgggcgcagtcagaggaccctaaggcagctgacggccaatactggccacaccattcatgttcactaccctgggaatcgccagcccaaccctcctcttatactgcagaggttgcttggtccctcagctgctgctgacatccttcagctgagcagcagccttcccctacaaagccggggtcgggcccgcctcctggtaggcaacgatgacgtccacatcatcgcccgttctgatgatgagctgctggatgactttttccatgatcagagcacagctaccagccaagcaggaaccctgtccagcatccccacagccctgacccgctggacagaagaatgcaaagttctcgatgctgagagcatgcatgactgtgtttcagtggttaaagtgtccattgtcaatcacctggaattcctgagggatgaggagctggaagaaaggcgagagaagcgcaggaaacaactggctgaggaagaaacaaagataactgataaaggcaaagaagataaggagaacagggatcagagtgcacagtgtactgcatctaagtcaaatgactccactgaacagaatctctcagatgggacgcctatgcctgacagctacccaacaaccccatcttcaactgatgcagctacatctgagtccaaggagacccttggcactctgcaatcctcacaacagcaaccaacactcccaaccccaccagctttgggagaggttcctcaggagctgcagtctccagctggagaagggggcagctctacacagctattgatgcctgtagagccagaggaattgggtcccacaaggccaagtggggaagcagaaacaactcagatggagttatccccagctcccactataacctcactttccccagagagagctgaggattctgatgcactgacggctgtcagcagtcagctagaaggctctcctatggatacaagcagcctggcttcctgtaccttagaggaggctgtgggtgacacttcagcagctggcagttctgagcagcccagagcaggcagctccactcctggggatgccccaccagctgtggcggaagtgcaaggcaggagtgatgggtcaggggaatctgcccagccacctgaggacagctccccacctgcatcctctgagagctcttccaccagagattctgccgtggccatttctggagcagattcccgaggaatcctagaagagccgttgccttcaacaagcagtgaagaagaagatccccttgcgggtatcagtctccctgaaggtgtggacccctcttttctggctgccctgcctgatgacatccgtcgggaagttctacagaaccagctaggcattcgtccaccaacccggactgccccctccacaaatagctcagcgcctgcagtggtggggaatcctggtgtgactgaagtgagccctgagtttctggctgccctgcctccagccattcaggaggaagtactggcacagcagagagctgagcagcagcgacgagaactagcacagaatgccagctcagacacccctatggaccctgtgaccttcatccagactctgccctcagacctgcgccgtagtgtcctagaggatatggaggacagtgtgttagctgtgatgccacctgacattgcagctgaggctcaagccctgagacgagagcaagaagcccggcagcgacagctcatgcatgagcgtctgtttgggcacagtagcacctccgcactctctgctattctccgaagcccggctttcaccagtcgcttaagtggcaaccgtggggtccagtatactcgccttgctgtgcagagaggtggcaccttccagatggggggtagcagcagccataacaggccttctggcagtaatgtagatactctcctccgcctccgaggacggctccttctggaccacgaagccctttcttgtctcttggtcctactttttgtggatgagccaaagctcaatactagccgtctacaccgagtactgagaaatctctgctaccatgcccagacccgccactgggtcatccgcagtctgctctccatcttgcagcgcagcagtgagagtgagctatgcattgaaacacccaaactcactacaagtgaggaaaagggcaaaaagtcgagcaagagctgtgggtcaagtagccatgagaaccgtcccctggacctgctacacaagatggagtcaaagagctccaaccagctttcctggctctcagtatccatggatgcagccctaggctgcaggactaatatatttcagatccagcgttcaggggggcgtaaacataccgagaagcatgcaagcggtggctccaccgtccacatccatccccaagctgctcctgttgtctgcagacacgttttggatacactcattcaattggccaaggtatttcccagccacttcacacagcagcggaccaaagaaacaaactgtgagagtgatcgggaaaggggcaataaggcctgtagcccatgctcctcacagtcctccagcagtggcatttgcacagacttctgggacttattggtaaaactggacaacatgaatgtcagccggaaaggcaagaactccgtgaagtcagtgccagtgagcgctggcggtgagggggaaacctctccatacagcctcgaggcctctccactggggcagctcatgaacatgttgtcacacccagtcatccgccggagctctctcttaactgagaaactcctcagactcctttctctcatctcaattgctctcccagaaaacaaggtgtcagaagcacaggctaattctggcagcggtgcttcctccaccaccactgccacctcaaccacatctaccaccaccaccactgccgcctccaccacgcccacaccccctactgcacccacccctgtcacttctgctccagccctggttgctgccacggctatttccaccattgtcgtagctgcttcgaccacagtgactacccccacgactgctaccactactgtttcaatttctcccactactaagggcagcaaatctccagcgaaggtgagtgatgggggcagcagcagtacagactttaagatggtgtcctctggcctcactgaaaaccagctacagctctctgtagaggtgttgacatcccactcttgttctgaggaaggcttagaggatgcagccaacgtactactgcagctctcccggggggactctgggacccgggacactgttctcaagctgctactgaatggagcccgccatctgggttataccctttgtaaacaaataggtaccctgctggccgagctgcgggaatacaacctcgagcagcagcggcgagcccaatgtgaaaccctctctcctgatggcctgcctgaggagcagccacagaccaccaagctgaagggcaaaatgcagagcaggtttgacatggctgagaatgtggtaattgtggcatctcagaagcgacctttgggtggccgggagctccagctgccttctatgtccatgttgacatccaagacatctacccagaagttcttcttgagggtactacaggtcatcatccagctccgggacgacacgcgccgggctaacaagaaagccaagcagacaggcaggctaggttcctccggtttaggctcagctagcagcatccaggcagctgttcggcagctggaggctgaggctgatgccattatacaaatggtacgtgagggtcaaagggcgcggagacagcaacaagcagcaacgtcggagtctagccagtcagaggcgtctgtccggagggaggaatcacccatggatgtggaccagccatctcccagtgctcaagatactcaatccattgcctccgatggaaccccacagggggagaaggaaaaggaagaaagaccacctgagttacccctgctcagcgagcagctgagtttggacgagctgtgggacatgcttggggagtgtctaaaggaactagaggaatcccatgaccagcatgcggtgctagagactcaccgcactgtgttaaaccagatcctacggcagtccacgacccaccttgctgatgggccttttgctgtcctggtagactacattcgtgtcctcgactttgatgtcaagcgcaaatatttccgccaagagctggagcgtttagatgaggggctccggaaagaagacatggctgtgcatgtccgtcgtgaccatgtgtttgaagactcctatcgtgagctgcatcgcaaatcccccgaagaaatgaagaatcgattgtatatagtatttgaaggagaagaagggcaggatgctggcgggctcctgcgggagtggtatatgatcatctctcgagagatgtttaaccctatgtatgccttgttccgtacctcacctggtgatcgagtcacctacaccatcaatccatcttcccactgcaaccccaaccacctcagctacttcaagtttgtcggacgcattgtggccaaagctgtatatgacaaccgtcttctggagtgctactttactcgatccttttacaaacacatcttgggcaagtcagtcagatatacagatatggagagtgaagattaccacttctaccaaggtctggtttatctgctggaaaatgatgtctccacactaggctatgacctcaccttcagcactgaggtccaagagtttggagtttgtgaagttcgtgacctcaaacccaatggggccaacatcttggtaacagaggagaataagaaggagtatgtacacctggtatgccagatgagaatgacaggagccatccgcaagcagttggcggctttcttagaaggcttctatgagatcattccaaagcgcctcatttccatcttcactgagcaggagttagagctgcttatatcaggactgcccaccattgacatcgatgatctgaaatccaacactgaataccacaagtaccagtccaactctattcagatccagtggttctggagagcattgcgttctttcgatcaagctgaccgtgccaagttcctccagtttgtcacgggtacttccaaggtacccctgcaaggctttgctgccctcgaaggcatgaatggcattcagaagtttcagatccatcgagatgacaggtccacagatcgcctgccttcagctcacacatgttttaatcagctggatctgcctgcctatgagagctttgagaagctccgccacatgctactgttggctatccaggagtgctctgaaggctttgggctggcctaataaggccctgcccaactccgtggggttttttttaccattgttggacctggggaggggggagttaaaaaaagaaccagaaagaaattgtcaaaaaccaataaatgaaatccaccaactcaccgtgtgtgtcccagctgccccatcttccccagcgcatacctgttcctcttctcattctctccccgccgcctgtttcctcaccttctctcccctttccatgccgtccatgatccccaccccatgtgttttaaaaaggcagtagcctttgcagggacctgtctgtcccaactgtttgaacagtgtgctcctcagattctgtgttcagaaggatttgctgcattgagacttgaaacctttggataggggaaaaaattatatatatatatatttttttgttctgtttgcatttcttaatttgtgcttggaatgtgttgatgtgcacagctaatgattcaatgcgagacaagattggcgtctgtgttgtggaggtttcaaataaagagcactcttcataa

SEQ ID NO: 467019 - DNA, 11429 bp, Homo sapiens
ctgcatccaacctggggagtgctgtcgatgagctcatgagacatcagcccacccttaaaacagatgcaacgactgccatcatcaagttacttgaagaaatctgtaatcttggaagggaccccaaatacatctgtcagaagccatcaatccagaaggcagatggcactgccactgctcctcccccaaggtctaatcatgccgcagaagaagcctctagtgaggatgaggaggaagaggaagtacaggccatgcagagctttaattctacccagcaaaatgaaactgagcctaatcagcaggttgttggtacagaggaacgtattcctattcccctcatggattacatccttaatgtgatgaaatttgtggaatctattctgagcaacaatacaacagatgaccactgccaggaatttgtgaatcagaaaggactgttgcctttggttaccattttgggtcttcccaatctgcccattgactttcccacatctgctgcctgtcaggctgttgcaggtgtctgcaaatccatattgacactgtcacatgaacccaaagtccttcaagagggtctccttcagttggactccatcctctcctccctggagcccttacaccgccccattgaatcccctgggggctcagtgttgttgcgagaactggcttgcgcaggcaatgttgctgatgctaccctctcagcccaggccacacctctgctgcatgcactcactgctgcccatgcctacatcatgatgtttgttcatacttgcagagttggacagagtgaaattcgttccatctccgtaaaccagtggggctctcaattgggtctgagtgttttgagcaagctgagccagttatactgttccctggtgtgggaaagcactgtcctcctctctctgtgtaccccaaacagcctaccatctgggtgtgaatttggccaggcagatatgcagaaactggttccaaaggatgagaaggcaggtacgacccagggcggaaaaagatcagatggggaacaggatggagcagctggaagtatggatgcttctacccagggcttattagaaggcattgggctagatggtgacacattggctcccatggagacagatgaacctactgcttcagactctaagggcaaatctaaaatcacaccagcaatggctgccagaattaagcaaatcaagcctttgttatcagcttcctccagattaggccgagcacttgctgagctatttggacttcttgttaaactttgtgtgggatctcctgtccgccagagaaggagccatcatgctgccagcaccactacagcaccgacacctgccgcgcgatcaacagcctcagctctcactaagctcttgactaaggggttatcttggcagcccccaccatatacacctactccccgattcaggctgacattcttcatctgttcagttggtttcacatccccaatgctgtttgatgagaggaagtatccctaccacctcatgctgcaaaaatttctctgctccggaggccacaatgctctttttgaaactttcaactgggctctgtccatgggaggtaaagttcctgtttctgagggattggaacactcagacttgcctgatggcacaggagaattcctagatgcctggcttatgctggtggagaagatggtgaatcccaccacggtgcttgaatctccacattcgctgcctgccaaattgcctggaggtgtccagaactttccccagttcagtgcactgcgcttccttgtggtaactcagaaagcagcctttacttgcatcaaaaacttatggaaccggaaacccctgaaggtatatggtggacgaatggctgaatcgatgctggccattctatgccacatcctccgaggagaacctgtgattcgagagagactaagcaaggagaaggaggggtctcgaggagaagaggatacagggcaagaggaaggtggctcccgccgggaacctcaagtcaaccagcaacaactgcaacagctcatggacatgggcttcacaagggaacatgcaatggaggcactgttgaacaccagcaccatggagcaggccacagagtaccttttaacccaccctcctccaatcatgggaggagttgttcgggatctcagcatgtctgaagaggaccagatgatgagagcaattgctatgtctctgggacaggatattccaatggatcaaagggcagagtcacctgaggaagttgcttgccggaaggaggaagaggaacggaaagctcgggaaaagcaggaggaggaagaggctaaatgtctagagaagttccaggatgctgacccgttggaacaagatgagctccacactttcacagatactatgttgccaggctgcttccaccttcttgatgagctgccagacacagtataccgtgtgtgtgacctgatcatgacagcaatcaaacgtaatggagcagattatcgtgacatgattctgaagcaagtagtcaatcaggtgtgggaagctgctgatgtattgatcaaagctgctcttcccctgacaacaagtgacacaaaaaccgtgtcagagtggataagtcagatggccacactgccccaggcctccaatttggctactagaatcttgcttttaacgctactttttgaggagttgaagctaccttgtgcttgggtggttgaatcaagtggcatccttaatgtcctaatcaaactcttggaagtggttcagccctgcctccaggcagccaaggagcagaaggaagtccagaccccaaagtggatcacaccagtgttgctcctgattgatttctatgaaaagacagccatctcctcaaaaaggagagcccagatgactaagtacctgcaatccaacagcaacaactggcgctggtttgatgatcgctctgggcgttggtgtagttacagtgcaagcaacaatagcactattgattctgcctggaaatctggagagacaagcgtgcgattcactgcaggccgaagaagatacacggtccaattcactacaatggtgcaggttaatgaggaaacagggaaccgacgccctgtgatgctgactctcctcagggtacctcggctgaataaaaattcaaaaaacagcaatggacaggaactagagaagacgctggaagaaagcaaagaaatggatatcaaacgtaaagaaaataaaggcaatgatacccctttggccctagagagtacaaacactgaaaaggagacaagcctggaggaaacaaaaatcggggagatcctgatccagggcttgacagaagatatggtgactgttttaatccgggcctgcgtgagcatgctgggagtccctgtggacccagatactttgcatgccacccttcgtctctgtctgaggctcacccgggaccacaaatatgccatgatgtttgcagaactgaagagtacccgcatgatcttgaatttgacccagagctcaggcttcaatgggtttactcccctggtcacccttctcttaagacacatcattgaggacccctgtacccttcgtcataccatggaaaaggttgttcgctcagcagctacaagtggagctggtagcactacctctggtgttgtgtctggcagcctcggctctcgggagatcaactacatccttcgtgtccttgggccagccgcatgccgcaatccagacatattcacagaagtggccaactgctgtatccgcatcgcccttcctgcccctcgaggctcaggaactgcttcagatgatgaatttgagaatcttagaattaaaggccctaatgctgtacagctggtgaagaccacccctttgaagccctcacctctgcctgtcatccctgatactatcaaggaagtgatctatgatatgctgaatgctctggctgcataccatgctccagaggaagcagataaatctgatcctaaacctggggttatgacccaagaggttggccagctcctgcaagacatgggtgatgatgtataccagcagtaccggtcacttacgcgtcagagcagtgactttgatacgcagtcaggtttttccattaatagtcaggtctttgctgcagatggtgcctccactgagacttccgcatctgggacctcccaaggagaggcttcaactccagaggagtctcgagatgggaagaaagataaagaaggggaccgggcctctgaggaaggcaaacagaaaggcaagggcagcaaacctttaatgcctacctccactatccttcgtcttctggcagagttggtgaggtcctatgttggtattgctaccctgattgccaactacagctacactgtgggccagtctgaactgatcaaagaggactgcagtgtgctagcttttgttctggaccacctgctcccacatacccagaatgcagaagacaaggacacccctgccttggcccgcctgttcctcgcaagcctggctgctgcagggagtggcacagatgcccaggtggccctagtgaatgaagtaaaagcagcccttggacgggcactggctatggctgagagtacagagaaacatgccaggcttcaggcagtgatgtgtatcatcagtactatcatggagtcctgcccctccacctccagcttctacagcagtgccacagcgaagacccagcacaatggcatgaacaacatcattcggcttttcctgaagaagggactggttaatgacctggccagagtacctcacagcttagacctgtccagtcccaacatggccaacacagtcaatgctgctctgaagcctttggaaacactttcccggattgtgaaccagcccagtagcctttttggcagcaagagtgcttctagcaagaacaagtctgagcaggatgcccaaggagcctctcaagattccagtagcaaccagcaggacccaggcgagcctggggaagcagaagtgcaggaggaggatcatgatgtcactcagacagaggtggcagatggggatatcatggatggggaggctgaaaccgactcagtggtgattgctgggcagcctgaggtgctcagttcacaagagatgcaggttgagaatgagctggaggacctgatagatgagttgcttgagagggatggcggatctgggaacagtacaattatagtgagcagaagtggagaggatgaatcacaagaggacgtgctgatggatgaagctccttccaacctcagccaagcttccaccttgcaggccaaccgagaagattccatgaatatcctggaccctgaggatgaggaggagcacactcaggaagaggacagcagtggcagtaacgaggatgaggatgatagtcaggatgaagaggaggaggaggaggaagatgaggaagatgatcaggaggatgatgaaggtgaagagggagatgaagacgatgacgacgatggctctgagatggaattggatgaggattatcctgatatgaacgcttctcccttggtccgatttgagcgctttgaccgggaggatgatctcatcattgagtttgacaacatgttctccagtgctacagacatccccccatccccaggaaatatccctaccacccatccactgatggtgcgccatgcagaccacagttctctgacactgggcagtggctcttcaacaactcgtctcacccagggcatcgggcgcagtcagaggaccctaaggcagctgacggccaatactggccacaccattcatgttcactaccctgggaatcgccagcccaaccctcctcttatactgcagaggttgcttggtccctcagctgctgctgacatccttcagctgagcagcagccttcccctacaaagccggggtcgggcccgcctcctggtaggcaacgatgacgtccacatcatcgcccgttctgatgatgagctgctggatgactttttccatgatcagagcacagctaccagccaagcaggaaccctgtccagcatccccacagccctgacccgctggacagaagaatgcaaagttctcgatgctgagagcatgcatgactgtgtttcagtggttaaagtgtccattgtcaatcacctggaattcctgagggatgaggagctggaagaaaggcgagagaagcgcaggaaacaactggctgaggaagaaacaaagataactgataaaggcaaagaagataaggagaacagggatcagagtgcacagtgtactgcatctaagtcaaatgactccactgaacagaatctctcagatgggacgcctatgcctgacagctacccaacaaccccatcttcaactgatgcagctacatctgagtccaaggagacccttggcactctgcaatcctcacaacagcaaccaacactcccaaccccaccagctttgggagaggttcctcaggagctgcagtctccagctggagaagggggcagctctacacagctattgatgcctgtagagccagaggaattgggtcccacaaggccaagtggggaagcagaaacaactcagatggagttatccccagctcccactataacctcactttccccagagagagctgaggattctgatgcactgacggctgtcagcagtcagctagaaggctctcctatggatacaagcagcctggcttcctgtaccttagaggaggctgtgggtgacacttcagcagctggcagttctgagcagcccagagcaggcagctccactcctggggatgccccaccagctgtggcggaagtgcaaggcaggagtgatgggtcaggggaatctgcccagccacctgaggacagctccccacctgcatcctctgagagctcttccaccagagattctgccgtggccatttctggagcagattcccgaggaatcctagaagagccgttgccttcaacaagcagtgaagaagaagatccccttgcgggtatcagtctccctgaaggtgtggacccctcttttctggctgccctgcctgatgacatccgtcgggaagttctacagaaccagctaggcattcgtccaccaacccggactgccccctccacaaatagctcagcgcctgcagtggtggggaatcctggtgtgactgaagtgagccctgagtttctggctgccctgcctccagccattcaggaggaagtactggcacagcagagagctgagcagcagcgacgagaactagcacagaatgccagctcagacacccctatggaccctgtgaccttcatccagactctgccctcagacctgcgccgtagtgtcctagaggatatggaggacagtgtgttagctgtgatgccacctgacattgcagctgaggctcaagccctgagacgagagcaagaagcccggcagcgacagctcatgcatgagcgtctgtttgggcacagtagcacctccgcactctctgctattctccgaagcccggctttcaccagtcgcttaagtggcaaccgtggggtccagtatactcgccttgctgtgcagagaggtggcaccttccagatggggggtagcagcagccataacaggccttctggcagtaatgtagatactctcctccgcctccgaggacggctccttctggaccacgaagccctttcttgtctcttggtcctactttttgtggatgagccaaagctcaatactagccgtctacaccgagtactgagaaatctctgctaccatgcccagacccgccactgggtcatccgcagtctgctctccatcttgcagcgcagcagtgagagtgagctatgcattgaaacacccaaactcactacaagtgaggaaaagggcaaaaagtcgagcaagagctgtgggtcaagtagccatgagaaccgtcccctggacctgctacacaagatggagtcaaagagctccaaccagctttcctggctctcagtatccatggatgcagccctaggctgcaggactaatatatttcagatccagcgttcaggggggcgtaaacataccgagaagcatgcaagcggtggctccaccgtccacatccatccccaagctgctcctgttgtctgcagacacgttttggatacactcattcaattggccaaggtatttcccagccacttcacacagcagcggaccaaagaaacaaactgtgagagtgatcgggaaaggggcaataaggcctgtagcccatgctcctcacagtcctccagcagtggcatttgcacagacttctgggacttattggtaaaactggacaacatgaatgtcagccggaaaggcaagaactccgtgaagtcagtgccagtgagcgctggcggtgagggggaaacctctccatacagcctcgaggcctctccactggggcagctcatgaacatgttgtcacacccagtcatccgccggagctctctcttaactgagaaactcctcagactcctttctctcatctcaattgctctcccagaaaacaaggtgtcagaagcacaggctaattctggcagcggtgcttcctccaccaccactgccacctcaaccacatctaccaccaccaccactgccgcctccaccacgcccacaccccctactgcacccacccctgtcacttctgctccagccctggttgctgccacggctatttccaccattgtcgtagctgcttcgaccacagtgactacccccacgactgctaccactactgtttcaatttctcccactactaagggcagcaaatctccagcgaaggtgagtgatgggggcagcagcagtacagactttaagatggtgtcctctggcctcactgaaaaccagctacagctctctgtagaggtgttgacatcccactcttgttctgaggaaggcttagaggatgcagccaacgtactactgcagctctcccggggggactctgggacccgggacactgttctcaagctgctactgaatggagcccgccatctgggttataccctttgtaaacaaataggtaccctgctggccgagctgcgggaatacaacctcgagcagcagcggcgagcccaatgtgaaaccctctctcctgatggcctgcctgaggagcagccacagaccaccaagctgaagggcaaaatgcagagcaggttcctccggtttaggctcagctagcagcatccaggcagctgttcggcagctggaggctgaggctgatgccattatacaaatgtcggagtctagccagtcagaggcgtctgtccggagggaggaatcacccatggatgtggaccagccatctcccagtgctcaagatactcaatccattgcctccgatggaaccccacagggggagaaggaaaaggaagaaagaccacctgagttacccctgctcagcgagcagctgagtttggacgagctgtgggacatgcttggggagtgtctaaaggaactagaggaatcccatgaccagcatgcggtgctagtgctacagcctgctgtcgaggccttctttctggtccatgccacagagcgggagagcaagcctcctgtccgagacacccgtgagagccagctggcacacatcaaggacgagcctcctccactctcccctgcccccttaaccccagccacgccttcctcccttgacccattcttctcccgggagccctcatctatgcacatctcctcaagcctgccccctgacacacagaagttccttcgctttgcagagactcaccgcactgtgttaaaccagatcctacggcagtccacgacccaccttgctgatgggccttttgctgtcctggtagactacattcgtgtcctcgactttgatgtcaagcgcaaatatttccgccaagagctggagcgtttagatgaggggctccggaaagaagacatggctgtgcatgtccgtcgtgaccatgtgtttgaagactcctatcgtgagctgcatcgcaaatcccccgaagaaatgaagaatcgattgtatatagtatttgaaggagaagaagggcaggatgctggcgggctcctgcgggagtggtatatgatcatctctcgagagatgtttaaccctatgtatgccttgttccgtacctcacctggtgatcgagtcacctacaccatcaatccatcttcccactgcaaccccaaccacctcagctacttcaagtttgtcggacgcattgtggccaaagctgtatatgacaaccgtcttctggagtgctactttactcgatccttttacaaacacatcttgggcaagtcagtcagatatacagatatggagagtgaagattaccacttctaccaaggtctggtttatctgctggaaaatgatgtctccacactaggctatgacctcaccttcagcactgaggtccaagagtttggagtttgtgaagttcgtgacctcaaacccaatggggccaacatcttggtaacagaggagaataagaaggagtatgtacacctggtatgccagatgagaatgacaggagccatccgcaagcagttggcggctttcttagaaggcttctatgagatcattccaaagcgcctcatttccatcttcactgagcaggagttagagctgcttatatcaggactgcccaccattgacatcgatgatctgaaatccaacactgaataccacaagtaccagtccaactctattcagatccagtggttctggagagcattgcgttctttcgatcaagctgaccgtgccaagttcctccagtttgtcacgggtacttccaaggtacccctgcaaggctttgctgccctcgaaggcatgaatggcattcagaagtttcagatccatcgagatgacaggtccacagatcgcctgccttcagctcacacatgttttaatcagctggatctgcctgcctatgagagctttgagaagctccgccacatgctactgttggctatccaggagtgctctgaaggctttgggctggcctaataaggccctgcccaactccgtggggttttttttaccattgttggacctggggaggggggagttaaaaaaagaaccagaaagaaattgtcaaaaaccaataaatgaaatccaccaactcaccgtgtgtgtcccagctgccccatcttccccagcgcatacctgttcctcttctcattctctccccgccgcctgtttcctcaccttctctcccctttccatgccgtccatgatccccaccccatgtgttttaaaaaggcagtagcctttgcagggacctgtctgtcccaactgtttgaacagtgtgctcctcagattctgtgttcagaaggatttgctgcattgagacttgaaacctttggataggggaaaaaattatatatatatatatttttttgttctgtttgcatttcttaatttgtgcttggaatgtgttgatgtgcacagctaatgattcaatgcgagacaagattggcgtctgtgttgtggaggtttcaaataaagagcactcttcataa

SEQ ID NO: 467020 - DNA, 11448 bp, Homo sapiens
ctgcatccaacctggggagtgctgtcgatgagctcatgagacatcagcccacccttaaaacagatgcaacgactgccatcatcaagttacttgaagaaatctgtaatcttggaagggaccccaaatacatctgtcagaagccatcaatccagaaggcagatggcactgccactgctcctcccccaaggtctaatcatgccgcagaagaagcctctagtgaggatgaggaggaagaggaagtacaggccatgcagagctttaattctacccagcaaaatgaaactgagcctaatcagcaggttgttggtacagaggaacgtattcctattcccctcatggattacatccttaatgtgatgaaatttgtggaatctattctgagcaacaatacaacagatgaccactgccaggaatttgtgaatcagaaaggactgttgcctttggttaccattttgggtcttcccaatctgcccattgactttcccacatctgctgcctgtcaggctgttgcaggtgtctgcaaatccatattgacactgtcacatgaacccaaagtccttcaagagggtctccttcagttggactccatcctctcctccctggagcccttacaccgccccattgaatcccctgggggctcagtgttgttgcgagaactggcttgcgcaggcaatgttgctgatgctaccctctcagcccaggccacacctctgctgcatgcactcactgctgcccatgcctacatcatgatgtttgttcatacttgcagagttggacagagtgaaattcgttccatctccgtaaaccagtggggctctcaattgggtctgagtgttttgagcaagctgagccagttatactgttccctggtgtgggaaagcactgtcctcctctctctgtgtaccccaaacagcctaccatctgggtgtgaatttggccaggcagatatgcagaaactggttccaaaggatgagaaggcaggtacgacccagggcggaaaaagatcagatggggaacaggatggagcagctggaagtatggatgcttctacccagggcttattagaaggcattgggctagatggtgacacattggctcccatggagacagatgaacctactgcttcagactctaagggcaaatctaaaatcacaccagcaatggctgccagaattaagcaaatcaagcctttgttatcagcttcctccagattaggccgagcacttgctgagctatttggacttcttgttaaactttgtgtgggatctcctgtccgccagagaaggagccatcatgctgccagcaccactacagcaccgacacctgccgcgcgatcaacagcctcagctctcactaagctcttgactaaggggttatcttggcagcccccaccatatacacctactccccgattcaggctgacattcttcatctgttcagttggtttcacatccccaatgctgtttgatgagaggaagtatccctaccacctcatgctgcaaaaatttctctgctccggaggccacaatgctctttttgaaactttcaactgggctctgtccatgggaggtaaagttcctgtttctgagggattggaacactcagacttgcctgatggcacaggagaattcctagatgcctggcttatgctggtggagaagatggtgaatcccaccacggtgcttgaatctccacattcgctgcctgccaaattgcctggaggtgtccagaactttccccagttcagtgcactgcgcttccttgtggtaactcagaaagcagcctttacttgcatcaaaaacttatggaaccggaaacccctgaaggtatatggtggacgaatggctgaatcgatgctggccattctatgccacatcctccgaggagaacctgtgattcgagagagactaagcaaggagaaggaggggtctcgaggagaagaggatacagggcaagaggaaggtggctcccgccgggaacctcaagtcaaccagcaacaactgcaacagctcatggacatgggcttcacaagggaacatgcaatggaggcactgttgaacaccagcaccatggagcaggccacagagtaccttttaacccaccctcctccaatcatgggaggagttgttcgggatctcagcatgtctgaagaggaccagatgatgagagcaattgctatgtctctgggacaggatattccaatggatcaaagggcagagtcacctgaggaagttgcttgccggaaggaggaagaggaacggaaagctcgggaaaagcaggaggaggaagaggctaaatgtctagagaagttccaggatgctgacccgttggaacaagatgagctccacactttcacagatactatgttgccaggctgcttccaccttcttgatgagctgccagacacagtataccgtgtgtgtgacctgatcatgacagcaatcaaacgtaatggagcagattatcgtgacatgattctgaagcaagtagtcaatcaggtgtgggaagctgctgatgtattgatcaaagctgctcttcccctgacaacaagtgacacaaaaaccgtgtcagagtggataagtcagatggccacactgccccaggcctccaatttggctactagaatcttgcttttaacgctactttttgaggagttgaagctaccttgtgcttgggtggttgaatcaagtggcatccttaatgtcctaatcaaactcttggaagtggttcagccctgcctccaggcagccaaggagcagaaggaagtccagaccccaaagtggatcacaccagtgttgctcctgattgatttctatgaaaagacagccatctcctcaaaaaggagagcccagatgactaagtacctgcaatccaacagcaacaactggcgctggtttgatgatcgctctgggcgttggtgtagttacagtgcaagcaacaatagcactattgattctgcctggaaatctggagagacaagcgtgcgattcactgcaggccgaagaagatacacggtccaattcactacaatggtgcaggttaatgaggaaacagggaaccgacgccctgtgatgctgactctcctcagggtacctcggctgaataaaaattcaaaaaacagcaatggacaggaactagagaagacgctggaagaaagcaaagaaatggatatcaaacgtaaagaaaataaaggcaatgatacccctttggccctagagagtacaaacactgaaaaggagacaagcctggaggaaacaaaaatcggggagatcctgatccagggcttgacagaagatatggtgactgttttaatccgggcctgcgtgagcatgctgggagtccctgtggacccagatactttgcatgccacccttcgtctctgtctgaggctcacccgggaccacaaatatgccatgatgtttgcagaactgaagagtacccgcatgatcttgaatttgacccagagctcaggcttcaatgggtttactcccctggtcacccttctcttaagacacatcattgaggacccctgtacccttcgtcataccatggaaaaggttgttcgctcagcagctacaagtggagctggtagcactacctctggtgttgtgtctggcagcctcggctctcgggagatcaactacatccttcgtgtccttgggccagccgcatgccgcaatccagacatattcacagaagtggccaactgctgtatccgcatcgcccttcctgcccctcgaggctcaggaactgcttcagatgatgaatttgagaatcttagaattaaaggccctaatgctgtacagctggtgaagaccacccctttgaagccctcacctctgcctgtcatccctgatactatcaaggaagtgatctatgatatgctgaatgctctggctgcataccatgctccagaggaagcagataaatctgatcctaaacctggggttatgacccaagaggttggccagctcctgcaagacatgggtgatgatgtataccagcagtaccggtcacttacgcgtcagagcagtgactttgatacgcagtcaggtttttccattaatagtcaggtctttgctgcagatggtgcctccactgagacttccgcatctgggacctcccaaggagaggcttcaactccagaggagtctcgagatgggaagaaagataaagaaggggaccgggcctctgaggaaggcaaacagaaaggcaagggcagcaaacctttaatgcctacctccactatccttcgtcttctggcagagttggtgaggtcctatgttggtattgctaccctgattgccaactacagctacactgtgggccagtctgaactgatcaaagaggactgcagtgtgctagcttttgttctggaccacctgctcccacatacccagaatgcagaagacaaggacacccctgccttggcccgcctgttcctcgcaagcctggctgctgcagggagtggcacagatgcccaggtggccctagtgaatgaagtaaaagcagcccttggacgggcactggctatggctgagagtacagagaaacatgccaggcttcaggcagtgatgtgtatcatcagtactatcatggagtcctgcccctccacctccagcttctacagcagtgccacagcgaagacccagcacaatggcatgaacaacatcattcggcttttcctgaagaagggactggttaatgacctggccagagtacctcacagcttagacctgtccagtcccaacatggccaacacagtcaatgctgctctgaagcctttggaaacactttcccggattgtgaaccagcccagtagcctttttggcagcaagagtgcttctagcaagaacaagtctgagcaggatgcccaaggagcctctcaagattccagtagcaaccagcaggacccaggcgagcctggggaagcagaagtgcaggaggaggatcatgatgtcactcagacagaggtggcagatggggatatcatggatggggaggctgaaaccgactcagtggtgattgctgggcagcctgaggtgctcagttcacaagagatgcaggttgagaatgagctggaggacctgatagatgagttgcttgagagggatggcggatctgggaacagtacaattatagtgagcagaagtggagaggatgaatcacaagaggacgtgctgatggatgaagctccttccaacctcagccaagcttccaccttgcaggccaaccgagaagattccatgaatatcctggaccctgaggatgaggaggagcacactcaggaagaggacagcagtggcagtaacgaggatgaggatgatagtcaggatgaagaggaggaggaggaggaagatgaggaagatgatcaggaggatgatgaaggtgaagagggagatgaagacgatgacgacgatggctctgagatggaattggatgaggattatcctgatatgaacgcttctcccttggtccgatttgagcgctttgaccgggaggatgatctcatcattgagtttgacaacatgttctccagtgctacagacatccccccatccccaggaaatatccctaccacccatccactgatggtgcgccatgcagaccacagttctctgacactgggcagtggctcttcaacaactcgtctcacccagggcatcgggcgcagtcagaggaccctaaggcagctgacggccaatactggccacaccattcatgttcactaccctgggaatcgccagcccaaccctcctcttatactgcagaggttgcttggtccctcagctgctgctgacatccttcagctgagcagcagccttcccctacaaagccggggtcgggcccgcctcctggtaggcaacgatgacgtccacatcatcgcccgttctgatgatgagctgctggatgactttttccatgatcagagcacagctaccagccaagcaggaaccctgtccagcatccccacagccctgacccgctggacagaagaatgcaaagttctcgatgctgagagcatgcatgactgtgtttcagtggttaaagtgtccattgtcaatcacctggaattcctgagggatgaggagctggaagaaaggcgagagaagcgcaggaaacaactggctgaggaagaaacaaagataactgataaaggcaaagaagataaggagaacagggatcagagtgcacagtgtactgcatctaagtcaaatgactccactgaacagaatctctcagatgggacgcctatgcctgacagctacccaacaaccccatcttcaactgatgcagctacatctgagtccaaggagacccttggcactctgcaatcctcacaacagcaaccaacactcccaaccccaccagctttgggagaggttcctcaggagctgcagtctccagctggagaagggggcagctctacacagctattgatgcctgtagagccagaggaattgggtcccacaaggccaagtggggaagcagaaacaactcagatggagttatccccagctcccactataacctcactttccccagagagagctgaggattctgatgcactgacggctgtcagcagtcagctagaaggctctcctatggatacaagcagcctggcttcctgtaccttagaggaggctgtgggtgacacttcagcagctggcagttctgagcagcccagagcaggcagctccactcctggggatgccccaccagctgtggcggaagtgcaaggcaggagtgatgggtcaggggaatctgcccagccacctgaggacagctccccacctgcatcctctgagagctcttccaccagagattctgccgtggccatttctggagcagattcccgaggaatcctagaagagccgttgccttcaacaagcagtgaagaagaagatccccttgcgggtatcagtctccctgaaggtgtggacccctcttttctggctgccctgcctgatgacatccgtcgggaagttctacagaaccagctaggcattcgtccaccaacccggactgccccctccacaaatagctcagcgcctgcagtggtggggaatcctggtgtgactgaagtgagccctgagtttctggctgccctgcctccagccattcaggaggaagtactggcacagcagagagctgagcagcagcgacgagaactagcacagaatgccagctcagacacccctatggaccctgtgaccttcatccagactctgccctcagacctgcgccgtagtgtcctagaggatatggaggacagtgtgttagctgtgatgccacctgacattgcagctgaggctcaagccctgagacgagagcaagaagcccggcagcgacagctcatgcatgagcgtctgtttgggcacagtagcacctccgcactctctgctattctccgaagcccggctttcaccagtcgcttaagtggcaaccgtggggtccagtatactcgccttgctgtgcagagaggtggcaccttccagatggggggtagcagcagccataacaggccttctggcagtaatgtagatactctcctccgcctccgaggacggctccttctggaccacgaagccctttcttgtctcttggtcctactttttgtggatgagccaaagctcaatactagccgtctacaccgagtactgagaaatctctgctaccatgcccagacccgccactgggtcatccgcagtctgctctccatcttgcagcgcagcagtgagagtgagctatgcattgaaacacccaaactcactacaagtgaggaaaagggcaaaaagtcgagcaagagctgtgggtcaagtagccatgagaaccgtcccctggacctgctacacaagatggagtcaaagagctccaaccagctttcctggctctcagtatccatggatgcagccctaggctgcaggactaatatatttcagatccagcgttcaggggggcgtaaacataccgagaagcatgcaagcggtggctccaccgtccacatccatccccaagctgctcctgttgtctgcagacacgttttggatacactcattcaattggccaaggtatttcccagccacttcacacagcagcggaccaaagaaacaaactgtgagagtgatcgggaaaggggcaataaggcctgtagcccatgctcctcacagtcctccagcagtggcatttgcacagacttctgggacttattggtaaaactggacaacatgaatgtcagccggaaaggcaagaactccgtgaagtcagtgccagtgagcgctggcggtgagggggaaacctctccatacagcctcgaggcctctccactggggcagctcatgaacatgttgtcacacccagtcatccgccggagctctctcttaactgagaaactcctcagactcctttctctcatctcaattgctctcccagaaaacaaggtgtcagaagcacaggctaattctggcagcggtgcttcctccaccaccactgccacctcaaccacatctaccaccaccaccactgccgcctccaccacgcccacaccccctactgcacccacccctgtcacttctgctccagccctggttgctgccacggctatttccaccattgtcgtagctgcttcgaccacagtgactacccccacgactgctaccactactgtttcaatttctcccactactaagggcagcaaatctccagcgaaggtgagtgatgggggcagcagcagtacagactttaagatggtgtcctctggcctcactgaaaaccagctacagctctctgtagaggtgttgacatcccactcttgttctgaggaaggcttagaggatgcagccaacgtactactgcagctctcccggggggactctgggacccgggacactgttctcaagctgctactgaatggagcccgccatctgggttataccctttgtaaacaaataggtaccctgctggccgagctgcgggaatacaacctcgagcagcagcggcgagcccaatgtgaaaccctctctcctgatggcctgcctgaggagcagccacagaccaccaagctgaagggcaaaatgcagagcaggtttgacatggctgagaatgtggtaattgtggcatctcagaagcgacctttgggtggccgggagctccagctgccttctatgtccatgttgacatccaagacatctacccagaagttcttcttgagggtactacaggtcatcatccagctccgggacgacacgcgccgggctaacaagaaagccaagcagacaggcaggctaggttcctccggtttaggctcagctagcagcatccaggcagctgttcggcagctggaggctgaggctgatgccattatacaaatggtacgtgagggtcaaagggcgcggagacagcaacaagcagcaacgtcggagtctagccagtcagaggcgtctgtccggagggaggaatcacccatggatgtggaccagccatctcccagtgctcaagatactcaatccattgcctccgatggaaccccacagggggagaaggaaaaggaagaaagaccacctgagttacccctgctcagcgagcagctgagtttggacgagctgtgggacatgcttggggagtgtctaaaggaactagaggaatcccatgaccagcatgcggtgctagtgctacagcctgctgtcgaggccttctttctggtccatgccacagagcgggagagcaagcctcctgtccgagacacccgtgagagccagctggcacacatcaaggacgagcctcctccactctcccctgcccccttaaccccagccacgccttcctcccttgacccattcttctcccgggagccctcatctatgcacatctcctcaagcctgccccctgacacacagaagttccttcgctttgcagagactcaccgcactgtgttaaaccagatcctacggcagtccacgacccaccttgctgatgggccttttgctgtcctggtagactacattcgtgtcctcgactttgatgtcaagcgcaaatatttccgccaagagctggagcgtttagatgaggggctccggaaagaagacatggctgtgcatgtccgtcgtgaccatgtgtttgaagactcctatcgtgagctgcatcgcaaatcccccgaagaaatgaagaatcgattgtatatagtatttgaaggagaagaagggcaggatgctggcgggctcctgcgggagtggtatatgatcatctctcgagagatgtttaaccctatgtatgccttgttccgtacctcacctggtgatcgagtcacctacaccatcaatccatcttcccactgcaaccccaaccacctcagctacttcaagtttgtcggacgcattgtggccaaagctgtatatgacaaccgtcttctggagtgctactttactcgatccttttacaaacacatcttgggcaagtcagtcagatatacagatatggagagtgaagattaccacttctaccaaggtctggtttatctgctggaaaatgatgtctccacactaggctatgacctcaccttcagcactgaggtccaagagtttggagtttgtgaagttcgtgacctcaaacccaatggggccaacatcttggtaacagaggagaataagaaggagtatgtacacctggtatgccagatgagaatgacaggagccatccgcaagcagttggcggctttcttagaaggcttctatgagatcattccaaagcgcctcatttccatcttcactgagcaggagttagagctgcttatatcaggactgcccaccattgacatcgatgatctgaaatccaacactgaataccacaagtaccagtccaactctattcagatccagtggttctggagagcattgcgttctttcgatcaagctgaccgtgccaagttcctccagtttgtcacgggtacttccaaggtacccctgcaaggctttgctgccctcgaaggcatgaatggcattcagaagtttcagatccatcgagatgacaggtccacagatcgcctgccttcagctcacacatgttttaatcagctggatctgcctgcctatgagagctttgagaagctccgccacatgctactgttggctatccaggagtgctctgaaggctttgggctggcctaataaggccctgcccaactccgtggggttttttttaccattgttggacctggggaggggggagttaaaaaaagaaccagaaagaaattgtcaaaaaccaataaatgaaatccaccaactcaccgtgtgtgtcccagctgccccatcttccccagcgcatacctgttcctcttctcattctctccccgccgcctgtttcctcaccttctctcccctttccatgccgtccatgatcccttccccctcgccgccgaccgagttcttccttttcagaccaaagtcgcctgcc

SEQ ID NO: 467021 - DNA, 11527 bp, Homo sapiens
ctgcatccaacctggggagtgctgtcgatgagctcatgagacatcagcccacccttaaaacagatgcaacgactgccatcatcaagttacttgaagaaatctgtaatcttggaagggaccccaaatacatctgtcagaagccatcaatccagaaggcagatggcactgccactgctcctcccccaaggtctaatcatgccgcagaagaagcctctagtgaggatgaggaggaagaggaagtacaggccatgcagagctttaattctacccagcaaaatgaaactgagcctaatcagcaggttgttggtacagaggaacgtattcctattcccctcatggattacatccttaatgtgatgaaatttgtggaatctattctgagcaacaatacaacagatgaccactgccaggaatttgtgaatcagaaaggactgttgcctttggttaccattttgggtcttcccaatctgcccattgactttcccacatctgctgcctgtcaggctgttgcaggtgtctgcaaatccatattgacactgtcacatgaacccaaagtccttcaagagggtctccttcagttggactccatcctctcctccctggagcccttacaccgccccattgaatcccctgggggctcagtgttgttgcgagaactggcttgcgcaggcaatgttgctgatgctaccctctcagcccaggccacacctctgctgcatgcactcactgctgcccatgcctacatcatgatgtttgttcatacttgcagagttggacagagtgaaattcgttccatctccgtaaaccagtggggctctcaattgggtctgagtgttttgagcaagctgagccagttatactgttccctggtgtgggaaagcactgtcctcctctctctgtgtaccccaaacagcctaccatctgggtgtgaatttggccaggcagatatgcagaaactggttccaaaggatgagaaggcaggtacgacccagggcggaaaaagatcagatggggaacaggatggagcagctggaagtatggatgcttctacccagggcttattagaaggcattgggctagatggtgacacattggctcccatggagacagatgaacctactgcttcagactctaagggcaaatctaaaatcacaccagcaatggctgccagaattaagcaaatcaagcctttgttatcagcttcctccagattaggccgagcacttgctgagctatttggacttcttgttaaactttgtgtgggatctcctgtccgccagagaaggagccatcatgctgccagcaccactacagcaccgacacctgccgcgcgatcaacagcctcagctctcactaagctcttgactaaggggttatcttggcagcccccaccatatacacctactccccgattcaggctgacattcttcatctgttcagttggtttcacatccccaatgctgtttgatgagaggaagtatccctaccacctcatgctgcaaaaatttctctgctccggaggccacaatgctctttttgaaactttcaactgggctctgtccatgggaggtaaagttcctgtttctgagggattggaacactcagacttgcctgatggcacaggagaattcctagatgcctggcttatgctggtggagaagatggtgaatcccaccacggtgcttgaatctccacattcgctgcctgccaaattgcctggaggtgtccagaactttccccagttcagtgcactgcgcttccttgtggtaactcagaaagcagcctttacttgcatcaaaaacttatggaaccggaaacccctgaaggtatatggtggacgaatggctgaatcgatgctggccattctatgccacatcctccgaggagaacctgtgattcgagagagactaagcaaggagaaggaggggtctcgaggagaagaggatacagggcaagaggaaggtggctcccgccgggaacctcaagtcaaccagcaacaactgcaacagctcatggacatgggcttcacaagggaacatgcaatggaggcactgttgaacaccagcaccatggagcaggccacagagtaccttttaacccaccctcctccaatcatgggaggagttgttcgggatctcagcatgtctgaagaggaccagatgatgagagcaattgctatgtctctgggacaggatattccaatggatcaaagggcagagtcacctgaggaagttgcttgccggaaggaggaagaggaacggaaagctcgggaaaagcaggaggaggaagaggctaaatgtctagagaagttccaggatgctgacccgttggaacaagatgagctccacactttcacagatactatgttgccaggctgcttccaccttcttgatgagctgccagacacagtataccgtgtgtgtgacctgatcatgacagcaatcaaacgtaatggagcagattatcgtgacatgattctgaagcaagtagtcaatcaggtgtgggaagctgctgatgtattgatcaaagctgctcttcccctgacaacaagtgacacaaaaaccgtgtcagagtggataagtcagatggccacactgccccaggcctccaatttggctactagaatcttgcttttaacgctactttttgaggagttgaagctaccttgtgcttgggtggttgaatcaagtggcatccttaatgtcctaatcaaactcttggaagtggttcagccctgcctccaggcagccaaggagcagaaggaagtccagaccccaaagtggatcacaccagtgttgctcctgattgatttctatgaaaagacagccatctcctcaaaaaggagagcccagatgactaagtacctgcaatccaacagcaacaactggcgctggtttgatgatcgctctgggcgttggtgtagttacagtgcaagcaacaatagcactattgattctgcctggaaatctggagagacaagcgtgcgattcactgcaggccgaagaagatacacggtccaattcactacaatggtgcaggttaatgaggaaacagggaaccgacgccctgtgatgctgactctcctcagggtacctcggctgaataaaaattcaaaaaacagcaatggacaggaactagagaagacgctggaagaaagcaaagaaatggatatcaaacgtaaagaaaataaaggcaatgatacccctttggccctagagagtacaaacactgaaaaggagacaagcctggaggaaacaaaaatcggggagatcctgatccagggcttgacagaagatatggtgactgttttaatccgggcctgcgtgagcatgctgggagtccctgtggacccagatactttgcatgccacccttcgtctctgtctgaggctcacccgggaccacaaatatgccatgatgtttgcagaactgaagagtacccgcatgatcttgaatttgacccagagctcaggcttcaatgggtttactcccctggtcacccttctcttaagacacatcattgaggacccctgtacccttcgtcataccatggaaaaggttgttcgctcagcagctacaagtggagctggtagcactacctctggtgttgtgtctggcagcctcggctctcgggagatcaactacatccttcgtgtccttgggccagccgcatgccgcaatccagacatattcacagaagtggccaactgctgtatccgcatcgcccttcctgcccctcgaggctcaggaactgcttcagatgatgaatttgagaatcttagaattaaaggccctaatgctgtacagctggtgaagaccacccctttgaagccctcacctctgcctgtcatccctgatactatcaaggaagtgatctatgatatgctgaatgctctggctgcataccatgctccagaggaagcagataaatctgatcctaaacctggggttatgacccaagaggttggccagctcctgcaagacatgggtgatgatgtataccagcagtaccggtcacttacgcgtcagagcagtgactttgatacgcagtcaggtttttccattaatagtcaggtctttgctgcagatggtgcctccactgagacttccgcatctgggacctcccaaggagaggcttcaactccagaggagtctcgagatgggaagaaagataaagaaggggaccgggcctctgaggaaggcaaacagaaaggcaagggcagcaaacctttaatgcctacctccactatccttcgtcttctggcagagttggtgaggtcctatgttggtattgctaccctgattgccaactacagctacactgtgggccagtctgaactgatcaaagaggactgcagtgtgctagcttttgttctggaccacctgctcccacatacccagaatgcagaagacaaggacacccctgccttggcccgcctgttcctcgcaagcctggctgctgcagggagtggcacagatgcccaggtggccctagtgaatgaagtaaaagcagcccttggacgggcactggctatggctgagagtacagagaaacatgccaggcttcaggcagtgatgtgtatcatcagtactatcatggagtcctgcccctccacctccagcttctacagcagtgccacagcgaagacccagcacaatggcatgaacaacatcattcggcttttcctgaagaagggactggttaatgacctggccagagtacctcacagcttagacctgtccagtcccaacatggccaacacagtcaatgctgctctgaagcctttggaaacactttcccggattgtgaaccagcccagtagcctttttggcagcaagagtgcttctagcaagaacaagtctgagcaggatgcccaaggagcctctcaagattccagtagcaaccagcaggacccaggcgagcctggggaagcagaagtgcaggaggaggatcatgatgtcactcagacagaggtggcagatggggatatcatggatggggaggctgaaaccgactcagtggtgattgctgggcagcctgaggtgctcagttcacaagagatgcaggttgagaatgagctggaggacctgatagatgagttgcttgagagggatggcggatctgggaacagtacaattatagtgagcagaagtggagaggatgaatcacaagaggacgtgctgatggatgaagctccttccaacctcagccaagcttccaccttgcaggccaaccgagaagattccatgaatatcctggaccctgaggatgaggaggagcacactcaggaagaggacagcagtggcagtaacgaggatgaggatgatagtcaggatgaagaggaggaggaggaggaagatgaggaagatgatcaggaggatgatgaaggtgaagagggagatgaagacgatgacgacgatggctctgagatggaattggatgaggattatcctgatatgaacgcttctcccttggtccgatttgagcgctttgaccgggaggatgatctcatcattgagtttgacaacatgttctccagtgctacagacatccccccatccccaggaaatatccctaccacccatccactgatggtgcgccatgcagaccacagttctctgacactgggcagtggctcttcaacaactcgtctcacccagggcatcgggcgcagtcagaggaccctaaggcagctgacggccaatactggccacaccattcatgttcactaccctgggaatcgccagcccaaccctcctcttatactgcagaggttgcttggtccctcagctgctgctgacatccttcagctgagcagcagccttcccctacaaagccggggtcgggcccgcctcctggtaggcaacgatgacgtccacatcatcgcccgttctgatgatgagctgctggatgactttttccatgatcagagcacagctaccagccaagcaggaaccctgtccagcatccccacagccctgacccgctggacagaagaatgcaaagttctcgatgctgagagcatgcatgactgtgtttcagtggttaaagtgtccattgtcaatcacctggaattcctgagggatgaggagctggaagaaaggcgagagaagcgcaggaaacaactggctgaggaagaaacaaagataactgataaaggcaaagaagataaggagaacagggatcagagtgcacagtgtactgcatctaagtcaaatgactccactgaacagaatctctcagatgggacgcctatgcctgacagctacccaacaaccccatcttcaactgatgcagctacatctgagtccaaggagacccttggcactctgcaatcctcacaacagcaaccaacactcccaaccccaccagctttgggagaggttcctcaggagctgcagtctccagctggagaagggggcagctctacacacagtcagctagaaggctctcctatggatacaagcagcctggcttcctgtaccttagaggaggctgtgggtgacacttcagcagctggcagttctgagcagcccagagcaggcagctccactcctggggatgccccaccagctgtggcggaagtgcaaggcaggagtgatgggtcaggggaatctgcccagccacctgaggacagctccccacctgcatcctctgagagctcttccaccagagattctgccgtggccatttctggagcagattcccgaggaatcctagaagagccgttgccttcaacaagcagtgaagaagaagatccccttgcgggtatcagtctccctgaaggtgtggacccctcttttctggctgccctgcctgatgacatccgtcgggaagttctacagaaccagctaggcattcgtccaccaacccggactgccccctccacaaatagctcagcgcctgcagtggtggggaatcctggtgtgactgaagtgagccctgagtttctggctgccctgcctccagccattcaggaggaagtactggcacagcagagagctgagcagcagcgacgagaactagcacagaatgccagctcagacacccctatggaccctgtgaccttcatccagactctgccctcagacctgcgccgtagtgtcctagaggatatggaggacagtgtgttagctgtgatgccacctgacattgcagctgaggctcaagccctgagacgagagcaagaagcccggcagcgacagctcatgcatgagcgtctgtttgggcacagtagcacctccgcactctctgctattctccgaagcccggctttcaccagtcgcttaagtggcaaccgtggggtccagtatactcgccttgctgtgcagagaggtggcaccttccagatggggggtagcagcagccataacaggccttctggcagtaatgtagatactctcctccgcctccgaggacggctccttctggaccacgaagccctttcttgtctcttggtcctactttttgtggatgagccaaagctcaatactagccgtctacaccgagtactgagaaatctctgctaccatgcccagacccgccactgggtcatccgcagtctgctctccatcttgcagcgcagcagtgagagtgagctatgcattgaaacacccaaactcactacaagtgaggaaaagggcaaaaagtcgagcaagagctgtgggtcaagtagccatgagaaccgtcccctggacctgctacacaagatggagtcaaagagctccaaccagctttcctggctctcagtatccatggatgcagccctaggctgcaggactaatatatttcagatccagcgttcaggggggcgtaaacataccgagaagcatgcaagcggtggctccaccgtccacatccatccccaagctgctcctgttgtctgcagacacgttttggatacactcattcaattggccaaggtatttcccagccacttcacacagcagcggaccaaagaaacaaactgtgagagtgatcgggaaaggggcaataaggcctgtagcccatgctcctcacagtcctccagcagtggcatttgcacagacttctgggacttattggtaaaactggacaacatgaatgtcagccggaaaggcaagaactccgtgaagtcagtgccagtgagcgctggcggtgagggggaaacctctccatacagcctcgaggcctctccactggggcagctcatgaacatgttgtcacacccagtcatccgccggagctctctcttaactgagaaactcctcagactcctttctctcatctcaattgctctcccagaaaacaaggtgtcagaagcacaggctaattctggcagcggtgcttcctccaccaccactgccacctcaaccacatctaccaccaccaccactgccgcctccaccacgcccacaccccctactgcacccacccctgtcacttctgctccagccctggttgctgccacggctatttccaccattgtcgtagctgcttcgaccacagtgactacccccacgactgctaccactactgtttcaatttctcccactactaagggcagcaaatctccagcgaaggtgagtgatgggggcagcagcagtacagactttaagatggtgtcctctggcctcactgaaaaccagctacagctctctgtagaggtgttgacatcccactcttgttctgaggaaggcttagaggatgcagccaacgtactactgcagctctcccggggggactctgggacccgggacactgttctcaagctgctactgaatggagcccgccatctgggttataccctttgtaaacaaataggtaccctgctggccgagctgcgggaatacaacctcgagcagcagcggcgagcccaatgtgaaaccctctctcctgatggcctgcctgaggagcagccacagaccaccaagctgaagggcaaaatgcagagcaggtttgacatggctgagaatgtggtaattgtggcatctcagaagcgacctttgggtggccgggagctccagctgccttctatgtccatgttgacatccaagacatctacccagaagttcttcttgagggtactacaggtcatcatccagctccgggacgacacgcgccgggctaacaagaaagccaagcagacaggcaggctaggttcctccggtttaggctcagctagcagcatccaggcagctgttcggcagctggaggctgaggctgatgccattatacaaatggtacgtgagggtcaaagggcgcggagacagcaacaagcagcaacgtcggagtctagccagtcagaggcgtctgtccggagggaggaatcacccatggatgtggaccagccatctcccagtgctcaagatactcaatccattgcctccgatggaaccccacagggggagaaggaaaaggaagaaagaccacctgagttacccctgctcagcgagcagctgagtttggacgagctgtgggacatgcttggggagtgtctaaaggaactagaggaatcccatgaccagcatgcggtgctagtgctacagcctgctgtcgaggccttctttctggtccatgccacagagcgggagagcaagcctcctgtccgagacacccgtgagagccagctggcacacatcaaggacgagcctcctccactctcccctgcccccttaaccccagccacgccttcctcccttgacccattcttctcccgggagccctcatctatgcacatctcctcaagcctgccccctgacacacagaagttccttcgctttgcagagactcaccgcactgtgttaaaccagatcctacggcagtccacgacccaccttgctgatgggccttttgctgtcctggtagactacattcgtgtcctcgactttgatgtcaagcgcaaatatttccgccaagagctggagcgtttagatgaggggctccggaaagaagacatggctgtgcatgtccgtcgtgaccatgtgtttgaagactcctatcgtgagctgcatcgcaaatcccccgaagaaatgaagaatcgattgtatatagtatttgaaggagaagaagggcaggatgctggcgggctcctgcgggagtggtatatgatcatctctcgagagatgtttaaccctatgtatgccttgttccgtacctcacctggtgatcgagtcacctacaccatcaatccatcttcccactgcaaccccaaccacctcagctacttcaagtttgtcggacgcattgtggccaaagctgtatatgacaaccgtcttctggagtgctactttactcgatccttttacaaacacatcttgggcaagtcagtcagatatacagatatggagagtgaagattaccacttctaccaaggtctggtttatctgctggaaaatgatgtctccacactaggctatgacctcaccttcagcactgaggtccaagagtttggagtttgtgaagttcgtgacctcaaacccaatggggccaacatcttggtaacagaggagaataagaaggagtatgtacacctggtatgccagatgagaatgacaggagccatccgcaagcagttggcggctttcttagaaggcttctatgagatcattccaaagcgcctcatttccatcttcactgagcaggagttagagctgcttatatcaggactgcccaccattgacatcgatgatctgaaatccaacactgaataccacaagtaccagtccaactctattcagatccagtggttctggagagcattgcgttctttcgatcaagctgaccgtgccaagttcctccagtttgtcacgggtacttccaaggtacccctgcaaggctttgctgccctcgaaggcatgaatggcattcagaagtttcagatccatcgagatgacaggtccacagatcgcctgccttcagctcacacatgttttaatcagctggatctgcctgcctatgagagctttgagaagctccgccacatgctactgttggctatccaggagtgctctgaaggctttgggctggcctaataaggccctgcccaactccgtggggttttttttaccattgttggacctggggaggggggagttaaaaaaagaaccagaaagaaattgtcaaaaaccaataaatgaaatccaccaactcaccgtgtgtgtcccagctgccccatcttccccagcgcatacctgttcctcttctcattctctccccgccgcctgtttcctcaccttctctcccctttccatgccgtccatgatccccaccccatgtgttttaaaaaggcagtagcctttgcagggacctgtctgtcccaactgtttgaacagtgtgctcctcagattctgtgttcagaaggatttgctgcattgagacttgaaacctttggataggggaaaaaattatatatatatatatttttttgttctgtttgcatttcttaatttgtgcttggaatgtgttgatgtgcacagctaatgattcaatgcgagacaagattggcgtctgtgttgtggaggtttcaaataaagagcactcttcataa

SEQ ID NO: 467022 - DNA, 6557 bp, Homo sapiens
ggctctgctctgtaaccttcagtgagcagaagtggagaggatgaatcacaagaggacgtgctgatggatgaagctccttccaacctcagccaagcttccaccttgcaggccaaccgagaagattccatgaatatcctggaccctgaggatgaggaggagcacactcaggaagaggacagcagtggcagtaacgaggatgaggatgatagtcaggatgaagaggaggaggaggaggaagatgaggaagatgatcaggaggatgatgaaggtgaagagggagatgaagacgatgacgacgatggctctgagatggaattggatgaggattatcctgatatgaacgcttctcccttggtccgatttgagcgctttgaccgggaggatgatctcatcattgagtttgacaacatgttctccagtgctacagacatccccccatccccaggaaatatccctaccacccatccactgatggtgcgccatgcagaccacagttctctgacactgggcagtggctcttcaacaactcgtctcacccagggcatcgggcgcagtcagaggaccctaaggcagctgacggccaatactggccacaccattcatgttcactaccctgggaatcgccagcccaaccctcctcttatactgcagaggttgcttggtccctcagctgctgctgacatccttcagctgagcagcagccttcccctacaaagccggggtcgggcccgcctcctggtaggcaacgatgacgtccacatcatcgcccgttctgatgatgagctgctggatgactttttccatgatcagagcacagctaccagccaagcaggaaccctgtccagcatccccacagccctgacccgctggacagaagaatgcaaagttctcgatgctgagagcatgcatgactgtgtttcagtggttaaagtgtccattgtcaatcacctggaattcctgagggatgaggagctggaagaaaggcgagagaagcgcaggaaacaactggctgaggaagaaacaaagataactgataaaggcaaagaagataaggagaacagggatcagagtgcacagtgtactgcatctaagtcaaatgactccactgaacagaatctctcagatgggacgcctatgcctgacagctacccaacaaccccatcttcaactgatgcagctacatctgagtccaaggagacccttggcactctgcaatcctcacaacagcaaccaacactcccaaccccaccagctttgggagaggttcctcaggagctgcagtctccagctggagaagggggcagctctacacagctattgatgcctgtagagccagaggaattgggtcccacaaggccaagtggggaagcagaaacaactcagatggagttatccccagctcccactataacctcactttccccagagagagctgaggattctgatgcactgacggctgtcagcagtcagctagaaggctctcctatggatacaagcagcctggcttcctgtaccttagaggaggctgtgggtgacacttcagcagctggcagttctgagcagcccagagcaggcagctccactcctggggatgccccaccagctgtggcggaagtgcaaggcaggagtgatgggtcaggggaatctgcccagccacctgaggacagctccccacctgcatcctctgagagctcttccaccagagattctgccgtggccatttctggagcagattcccgaggaatcctagaagagccgttgccttcaacaagcagtgaagaagaagatccccttgcgggtatcagtctccctgaaggtgtggacccctcttttctggctgccctgcctgatgacatccgtcgggaagttctacagaaccagctaggcattcgtccaccaacccggactgccccctccacaaatagctcagcgcctgcagtggtggggaatcctggtgtgactgaagtgagccctgagtttctggctgccctgcctccagccattcaggaggaagtactggcacagcagagagctgagcagcagcgacgagaactagcacagaatgccagctcagacacccctatggaccctgtgaccttcatccagactctgccctcagacctgcgccgtagtgtcctagaggatatggaggacagtgtgttagctgtgatgccacctgacattgcagctgaggctcaagccctgagacgagagcaagaagcccggcagcgacagctcatgcatgagcgtctgtttgggcacagtagcacctccgcactctctgctattctccgaagcccggctttcaccagtcgcttaagtggcaaccgtggggtccagtatactcgccttgctgtgcagagaggtggcaccttccagatggggggtagcagcagccataacaggccttctggcagtaatgtagatactctcctccgcctccgaggacggctccttctggaccacgaagccctttcttgtctcttggtcctactttttgtggatgagccaaagctcaatactagccgtctacaccgagtactgagaaatctctgctaccatgcccagacccgccactgggtcatccgcagtctgctctccatcttgcagcgcagcagtgagagtgagctatgcattgaaacacccaaactcactacaagtgaggaaaagggcaaaaagtcgagcaagagctgtgggtcaagtagccatgagaaccgtcccctggacctgctacacaagatggagtcaaagagctccaaccagctttcctggctctcagtatccatggatgcagccctaggctgcaggactaatatatttcagatccagcgttcaggggggcgtaaacataccgagaagcatgcaagcggtggctccaccgtccacatccatccccaagctgctcctgttgtctgcagacacgttttggatacactcattcaattggccaaggtatttcccagccacttcacacagcagcggaccaaagaaacaaactgtgagagtgatcgggaaaggggcaataaggcctgtagcccatgctcctcacagtcctccagcagtggcatttgcacagacttctgggacttattggtaaaactggacaacatgaatgtcagccggaaaggcaagaactccgtgaagtcagtgccagtgagcgctggcggtgagggggaaacctctccatacagcctcgaggcctctccactggggcagctcatgaacatgttgtcacacccagtcatccgccggagctctctcttaactgagaaactcctcagactcctttctctcatctcaattgctctcccagaaaacaaggtgtcagaagcacaggctaattctggcagcggtgcttcctccaccaccactgccacctcaaccacatctaccaccaccaccactgccgcctccaccacgcccacaccccctactgcacccacccctgtcacttctgctccagccctggttgctgccacggctatttccaccattgtcgtagctgcttcgaccacagtgactacccccacgactgctaccactactgtttcaatttctcccactactaagggcagcaaatctccagcgaaggtgagtgatgggggcagcagcagtacagactttaagatggtgtcctctggcctcactgaaaaccagctacagctctctgtagaggtgttgacatcccactcttgttctgaggaaggcttagaggatgcagccaacgtactactgcagctctcccggggggactctgggacccgggacactgttctcaagctgctactgaatggagcccgccatctgggttataccctttgtaaacaaataggtaccctgctggccgagctgcgggaatacaacctcgagcagcagcggcgagcccaatgtgaaaccctctctcctgatggcctgcctgaggagcagccacagaccaccaagctgaagggcaaaatgcagagcaggtttgacatggctgagaatgtggtaattgtggcatctcagaagcgacctttgggtggccgggagctccagctgccttctatgtccatgttgacatccaagacatctacccagaagttcttcttgagggtactacaggtcatcatccagctccgggacgacacgcgccgggctaacaagaaagccaagcagacaggcaggctaggttcctccggtttaggctcagctagcagcatccaggcagctgttcggcagctggaggctgaggctgatgccattatacaaatggtacgtgagggtcaaagggcgcggagacagcaacaagcagcaacgtcggagtctagccagtcagaggcgtctgtccggagggaggaatcacccatggatgtggaccagccatctcccagtgctcaagatactcaatccattgcctccgatggaaccccacagggggagaaggaaaaggaagaaagaccacctgagttacccctgctcagcgagcagctgagtttggacgagctgtgggacatgcttggggagtgtctaaaggaactagaggaatcccatgaccagcatgcggtgctagtgctacagcctgctgtcgaggccttctttctggtccatgccacagagcgggagagcaagcctcctgtccgagacacccgtgagagccagctggcacacatcaaggacgagcctcctccactctcccctgcccccttaaccccagccacgccttcctcccttgacccattcttctcccgggagccctcatctatgcacatctcctcaagcctgccccctgacacacagaagttccttcgctttgcagagactcaccgcactgtgttaaaccagatcctacggcagtccacgacccaccttgctgatgggccttttgctgtcctggtagactacattcgtgtcctcgactttgatgtcaagcgcaaatatttccgccaagagctggagcgtttagatgaggggctccggaaagaagacatggctgtgcatgtccgtcgtgaccatgtgtttgaagactcctatcgtgagctgcatcgcaaatcccccgaagaaatgaagaatcgattgtatatagtatttgaaggagaagaagggcaggatgctggcgggctcctgcgggagtggtatatgatcatctctcgagagatgtttaaccctatgtatgccttgttccgtacctcacctggtgatcgagtcacctacaccatcaatccatcttcccactgcaaccccaaccacctcagctacttcaagtttgtcggacgcattgtggccaaagctgtatatgacaaccgtcttctggagtgctactttactcgatccttttacaaacacatcttgggcaagtcagtcagatatacagatatggagagtgaagattaccacttctaccaaggtctggtttatctgctggaaaatgatgtctccacactaggctatgacctcaccttcagcactgaggtccaagagtttggagtttgtgaagttcgtgacctcaaacccaatggggccaacatcttggtaacagaggagaataagaaggagtatgtacacctggtatgccagatgagaatgacaggagccatccgcaagcagttggcggctttcttagaaggcttctatgagatcattccaaagcgcctcatttccatcttcactgagcaggagttagagctgcttatatcaggactgcccaccattgacatcgatgatctgaaatccaacactgaataccacaagtaccagtccaactctattcagatccagtggttctggagagcattgcgttctttcgatcaagctgaccgtgccaagttcctccagtttgtcacgggtacttccaaggtacccctgcaaggctttgctgccctcgaaggcatgaatggcattcagaagtttcagatccatcgagatgacaggtccacagatcgcctgccttcagctcacacatgttttaatcagctggatctgcctgcctatgagagctttgagaagctccgccacatgctactgttggctatccaggagtgctctgaaggctttgggctggcctaataaggccctgcccaactccgtggggttttttttaccattgttggacctggggaggggggagttaaaaaaagaaccagaaagaaattgtcaaaaaccaataaatgaaatccaccaactcaccgtgtgtgtcccagctgccccatcttccccagcgcatacctgttcctcttctcattctctccccgccgcctgtttcctcaccttctctcccctttccatgccgtccatgatccccaccccatgtgttttaaaaaggcagtagcctttgcagggacctgtctgtcccaactgtttgaacagtgtgctcctcagattctgtgttcagaaggatttgctgcattgagacttgaaacctttggataggggaaaaaattatatatatatatatttttttgttctgtttgcatttcttaatttgtgcttggaatgtgttgatgtgcacagctaatgattcaatgcgagacaagattggcgtctgtgttgtggaggtttcaaataaagagcactcttcataa

SEQ ID NO: 467023 - DNA, 11691 bp, Homo sapiens
ctgcatccaacctggggagtgctgtcgatgagctcatgagacatcagcccacccttaaaacagatgcaacgactgccatcatcaagttacttgaagaaatctgtaatcttggaagggaccccaaatacatctgtcagaagccatcaatccagaaggcagatggcactgccactgctcctcccccaaggtctaatcatgccgcagtagtacagatactattttgatgggtgctgagagaatagtaaatagtggatagtctaaattaaaagttctaaccaatgaaatataaacggaggcgatcctctagattgtagctgcagagcgtgcatattcgtattcggctgatggtatttacataccgttcgtgtgtatgaaatttgtggaatctattctgagcaacaatacaacagatgaccactgccaggaatttgtgaatcagaaaggactgttgcctttggttaccattttgggtcttcccaatctgcccattgactttcccacatctgctgcctgtcaggctgttgcaggtgtctgcaaatccatattgacactgtcacatgaacccaaagtccttcaagagggtctccttcagttggactccatcctctcctccctggagcccttacaccgccccattgaatcccctgggggctcagtgttgttgcgagaactggcttgcgcaggcaatgttgctgatgctaccctctcagcccaggccacacctctgctgcatgcactcactgctgcccatgcctacatcatgatgtttgttcatacttgcagagttggacagagtgaaattcgttccatctccgtaaaccagtggggctctcaattgggtctgagtgttttgagcaagctgagccagttatactgttccctggtgtgggaaagcactgtcctcctctctctgtgtaccccaaacagcctaccatctgggtgtgaatttggccaggcagatatgcagaaactggttccaaaggatgagaaggcaggtacgacccagggcggaaaaagatcagatggggaacaggatggagcagctggaagtatggatgcttctacccagggcttattagaaggcattgggctagatggtgacacattggctcccatggagacagatgaacctactgcttcagactctaagggcaaatctaaaatcacaccagcaatggctgccagaattaagcaaatcaagcctttgttatcagcttcctccagattaggccgagcacttgctgagctatttggacttcttgttaaactttgtgtgggatctcctgtccgccagagaaggagccatcatgctgccagcaccactacagcaccgacacctgccgcgcgatcaacagcctcagctctcactaagctcttgactaaggggttatcttggcagcccccaccatatacacctactccccgattcaggctgacattcttcatctgttcagttggtttcacatccccaatgctgtttgatgagaggaagtatccctaccacctcatgctgcaaaaatttctctgctccggaggccacaatgctctttttgaaactttcaactgggctctgtccatgggaggtaaagttcctgtttctgagggattggaacactcagacttgcctgatggcacaggagaattcctagatgcctggcttatgctggtggagaagatggtgaatcccaccacggtgcttgaatctccacattcgctgcctgccaaattgcctggaggtgtccagaactttccccagttcagtgcactgcgcttccttgtggtaactcagaaagcagcctttacttgcatcaaaaacttatggaaccggaaacccctgaaggtatatggtggacgaatggctgaatcgatgctggccattctatgccacatcctccgaggagaacctgtgattcgagagagactaagcaaggagaaggaggggtctcgaggagaagaggatacagggcaagaggaaggtggctcccgccgggaacctcaagtcaaccagcaacaactgcaacagctcatggacatgggcttcacaagggaacatgcaatggaggcactgttgaacaccagcaccatggagcaggccacagagtaccttttaacccaccctcctccaatcatgggaggagttgttcgggatctcagcatgtctgaagaggaccagatgatgagagcaattgctatgtctctgggacaggatattccaatggatcaaagggcagagtcacctgaggaagttgcttgccggaaggaggaagaggaacggaaagctcgggaaaagcaggaggaggaagaggctaaatgtctagagaagttccaggatgctgacccgttggaacaagatgagctccacactttcacagatactatgttgccaggctgcttccaccttcttgatgagctgccagacacagtataccgtgtgtgtgacctgatcatgacagcaatcaaacgtaatggagcagattatcgtgacatgattctgaagcaagtagtcaatcaggtgtgggaagctgctgatgtattgatcaaagctgctcttcccctgacaacaagtgacacaaaaaccgtgtcagagtggataagtcagatggccacactgccccaggcctccaatttggctactagaatcttgcttttaacgctactttttgaggagttgaagctaccttgtgcttgggtggttgaatcaagtggcatccttaatgtcctaatcaaactcttggaagtggttcagccctgcctccaggcagccaaggagcagaaggaagtccagaccccaaagtggatcacaccagtgttgctcctgattgatttctatgaaaagacagccatctcctcaaaaaggagagcccagatgactaagtacctgcaatccaacagcaacaactggcgctggtttgatgatcgctctgggcgttggtgtagttacagtgcaagcaacaatagcactattgattctgcctggaaatctggagagacaagcgtgcgattcactgcaggccgaagaagatacacggtccaattcactacaatggtgcaggttaatgaggaaacagggaaccgacgccctgtgatgctgactctcctcagggtacctcggctgaataaaaattcaaaaaacagcaatggacaggaactagagaagacgctggaagaaagcaaagaaatggatatcaaacgtaaagaaaataaaggcaatgatacccctttggccctagagagtacaaacactgaaaaggagacaagcctggaggaaacaaaaatcggggagatcctgatccagggcttgacagaagatatggtgactgttttaatccgggcctgcgtgagcatgctgggagtccctgtggacccagatactttgcatgccacccttcgtctctgtctgaggctcacccgggaccacaaatatgccatgatgtttgcagaactgaagagtacccgcatgatcttgaatttgacccagagctcaggcttcaatgggtttactcccctggtcacccttctcttaagacacatcattgaggacccctgtacccttcgtcataccatggaaaaggttgttcgctcagcagctacaagtggagctggtagcactacctctggtgttgtgtctggcagcctcggctctcgggagatcaactacatccttcgtgtccttgggccagccgcatgccgcaatccagacatattcacagaagtggccaactgctgtatccgcatcgcccttcctgcccctcgaggctcaggaactgcttcagatgatgaatttgagaatcttagaattaaaggccctaatgctgtacagctggtgaagaccacccctttgaagccctcacctctgcctgtcatccctgatactatcaaggaagtgatctatgatatgctgaatgctctggctgcataccatgctccagaggaagcagataaatctgatcctaaacctggggttatgacccaagaggttggccagctcctgcaagacatgggtgatgatgtataccagcagtaccggtcacttacgcgtcagagcagtgactttgatacgcagtcaggtttttccattaatagtcaggtctttgctgcagatggtgcctccactgagacttccgcatctgggacctcccaaggagaggcttcaactccagaggagtctcgagatgggaagaaagataaagaaggggaccgggcctctgaggaaggcaaacagaaaggcaagggcagcaaacctttaatgcctacctccactatccttcgtcttctggcagagttggtgaggtcctatgttggtattgctaccctgattgccaactacagctacactgtgggccagtctgaactgatcaaagaggactgcagtgtgctagcttttgttctggaccacctgctcccacatacccagaatgcagaagacaaggacacccctgccttggcccgcctgttcctcgcaagcctggctgctgcagggagtggcacagatgcccaggtggccctagtgaatgaagtaaaagcagcccttggacgggcactggctatggctgagagtacagagaaacatgccaggcttcaggcagtgatgtgtatcatcagtactatcatggagtcctgcccctccacctccagcttctacagcagtgccacagcgaagacccagcacaatggcatgaacaacatcattcggcttttcctgaagaagggactggttaatgacctggccagagtacctcacagcttagacctgtccagtcccaacatggccaacacagtcaatgctgctctgaagcctttggaaacactttcccggattgtgaaccagcccagtagcctttttggcagcaagagtgcttctagcaagaacaagtctgagcaggatgcccaaggagcctctcaagattccagtagcaaccagcaggacccaggcgagcctggggaagcagaagtgcaggaggaggatcatgatgtcactcagacagaggtggcagatggggatatcatggatggggaggctgaaaccgactcagtggtgattgctgggcagcctgaggtgctcagttcacaagagatgcaggttgagaatgagctggaggacctgatagatgagttgcttgagagggatggcggatctgggaacagtacaattatagtgagcagaagtggagaggatgaatcacaagaggacgtgctgatggatgaagctccttccaacctcagccaagcttccaccttgcaggccaaccgagaagattccatgaatatcctggaccctgaggatgaggaggagcacactcaggaagaggacagcagtggcagtaacgaggatgaggatgatagtcaggatgaagaggaggaggaggaggaagatgaggaagatgatcaggaggatgatgaaggtgaagagggagatgaagacgatgacgacgatggctctgagatggaattggatgaggattatcctgatatgaacgcttctcccttggtccgatttgagcgctttgaccgggaggatgatctcatcattgagtttgacaacatgttctccagtgctacagacatccccccatccccaggaaatatccctaccacccatccactgatggtgcgccatgcagaccacagttctctgacactgggcagtggctcttcaacaactcgtctcacccagggcatcgggcgcagtcagaggaccctaaggcagctgacggccaatactggccacaccattcatgttcactaccctgggaatcgccagcccaaccctcctcttatactgcagaggttgcttggtccctcagctgctgctgacatccttcagctgagcagcagccttcccctacaaagccggggtcgggcccgcctcctggtaggcaacgatgacgtccacatcatcgcccgttctgatgatgagctgctggatgactttttccatgatcagagcacagctaccagccaagcaggaaccctgtccagcatccccacagccctgacccgctggacagaagaatgcaaagttctcgatgctgagagcatgcatgactgtgtttcagtggttaaagtgtccattgtcaatcacctggaattcctgagggatgaggagctggaagaaaggcgagagaagcgcaggaaacaactggctgaggaagaaacaaagataactgataaaggcaaagaagataaggagaacagggatcagagtgcacagtgtactgcatctaagtcaaatgactccactgaacagaatctctcagatgggacgcctatgcctgacagctacccaacaaccccatcttcaactgatgcagctacatctgagtccaaggagacccttggcactctgcaatcctcacaacagcaaccaacactcccaaccccaccagctttgggagaggttcctcaggagctgcagtctccagctggagaagggggcagctctacacagctattgatgcctgtagagccagaggaattgggtcccacaaggccaagtggggaagcagaaacaactcagatggagttatccccagctcccactataacctcactttccccagagagagctgaggattctgatgcactgacggctgtcagcagtcagctagaaggctctcctatggatacaagcagcctggcttcctgtaccttagaggaggctgtgggtgacacttcagcagctggcagttctgagcagcccagagcaggcagctccactcctggggatgccccaccagctgtggcggaagtgcaaggcaggagtgatgggtcaggggaatctgcccagccacctgaggacagctccccacctgcatcctctgagagctcttccaccagagattctgccgtggccatttctggagcagattcccgaggaatcctagaagagccgttgccttcaacaagcagtgaagaagaagatccccttgcgggtatcagtctccctgaaggtgtggacccctcttttctggctgccctgcctgatgacatccgtcgggaagttctacagaaccagctaggcattcgtccaccaacccggactgccccctccacaaatagctcagcgcctgcagtggtggggaatcctggtgtgactgaagtgagccctgagtttctggctgccctgcctccagccattcaggaggaagtactggcacagcagagagctgagcagcagcgacgagaactagcacagaatgccagctcagacacccctatggaccctgtgaccttcatccagactctgccctcagacctgcgccgtagtgtcctagaggatatggaggacagtgtgttagctgtgatgccacctgacattgcagctgaggctcaagccctgagacgagagcaagaagcccggcagcgacagctcatgcatgagcgtctgtttgggcacagtagcacctccgcactctctgctattctccgaagcccggctttcaccagtcgcttaagtggcaaccgtggggtccagtatactcgccttgctgtgcagagaggtggcaccttccagatggggggtagcagcagccataacaggccttctggcagtaatgtagatactctcctccgcctccgaggacggctccttctggaccacgaagccctttcttgtctcttggtcctactttttgtggatgagccaaagctcaatactagccgtctacaccgagtactgagaaatctctgctaccatgcccagacccgccactgggtcatccgcagtctgctctccatcttgcagcgcagcagtgagagtgagctatgcattgaaacacccaaactcactacaagtgaggaaaagggcaaaaagtcgagcaagagctgtgggtcaagtagccatgagaaccgtcccctggacctgctacacaagatggagtcaaagagctccaaccagctttcctggctctcagtatccatggatgcagccctaggctgcaggactaatatatttcagatccagcgttcaggggggcgtaaacataccgagaagcatgcaagcggtggctccaccgtccacatccatccccaagctgctcctgttgtctgcagacacgttttggatacactcattcaattggccaaggtatttcccagccacttcacacagcagcggaccaaagaaacaaactgtgagagtgatcgggaaaggggcaataaggcctgtagcccatgctcctcacagtcctccagcagtggcatttgcacagacttctgggacttattggtaaaactggacaacatgaatgtcagccggaaaggcaagaactccgtgaagtcagtgccagtgagcgctggcggtgagggggaaacctctccatacagcctcgaggcctctccactggggcagctcatgaacatgttgtcacacccagtcatccgccggagctctctcttaactgagaaactcctcagactcctttctctcatctcaattgctctcccagaaaacaaggtgtcagaagcacaggctaattctggcagcggtgcttcctccaccaccactgccacctcaaccacatctaccaccaccaccactgccgcctccaccacgcccacaccccctactgcacccacccctgtcacttctgctccagccctggttgctgccacggctatttccaccattgtcgtagctgcttcgaccacagtgactacccccacgactgctaccactactgtttcaatttctcccactactaagggcagcaaatctccagcgaaggtgagtgatgggggcagcagcagtacagactttaagatggtgtcctctggcctcactgaaaaccagctacagctctctgtagaggtgttgacatcccactcttgttctgaggaaggcttagaggatgcagccaacgtactactgcagctctcccggggggactctgggacccgggacactgttctcaagctgctactgaatggagcccgccatctgggttataccctttgtaaacaaataggtaccctgctggccgagctgcgggaatacaacctcgagcagcagcggcgagcccaatgtgaaaccctctctcctgatggcctgcctgaggagcagccacagaccaccaagctgaagggcaaaatgcagagcaggtttgacatggctgagaatgtggtaattgtggcatctcagaagcgacctttgggtggccgggagctccagctgccttctatgtccatgttgacatccaagacatctacccagaagttcttcttgagggtactacaggtcatcatccagctccgggacgacacgcgccgggctaacaagaaagccaagcagacaggcaggctaggttcctccggtttaggctcagctagcagcatccaggcagctgttcggcagctggaggctgaggctgatgccattatacaaatggtacgtgagggtcaaagggcgcggagacagcaacaagcagcaacgtcggagtctagccagtcagaggcgtctgtccggagggaggaatcacccatggatgtggaccagccatctcccagtgctcaagatactcaatccattgcctccgatggaaccccacagggggagaaggaaaaggaagaaagaccacctgagttacccctgctcagcgagcagctgagtttggacgagctgtgggacatgcttggggagtgtctaaaggaactagaggaatcccatgaccagcatgcggtgctagtgctacagcctgctgtcgaggccttctttctggtccatgccacagagcgggagagcaagcctcctgtccgagacacccgtgagagccagctggcacacatcaaggacgagcctcctccactctcccctgcccccttaaccccagccacgccttcctcccttgacccattcttctcccgggagccctcatctatgcacatctcctcaagcctgccccctgacacacagaagttccttcgctttgcagagactcaccgcactgtgttaaaccagatcctacggcagtccacgacccaccttgctgatgggccttttgctgtcctggtagactacattcgtgtcctcgactttgatgtcaagcgcaaatatttccgccaagagctggagcgtttagatgaggggctccggaaagaagacatggctgtgcatgtccgtcgtgaccatgtgtttgaagactcctatcgtgagctgcatcgcaaatcccccgaagaaatgaagaatcgattgtatatagtatttgaaggagaagaagggcaggatgctggcgggctcctgcgggagtggtatatgatcatctctcgagagatgtttaaccctatgtatgccttgttccgtacctcacctggtgatcgagtcacctacaccatcaatccatcttcccactgcaaccccaaccacctcagctacttcaagtttgtcggacgcattgtggccaaagctgtatatgacaaccgtcttctggagtgctactttactcgatccttttacaaacacatcttgggcaagtcagtcagatatacagatatggagagtgaagattaccacttctaccaaggtctggtttatctgctggaaaatgatgtctccacactaggctatgacctcaccttcagcactgaggtccaagagtttggagtttgtgaagttcgtgacctcaaacccaatggggccaacatcttggtaacagaggagaataagaaggagtatgtacacctggtatgccagatgagaatgacaggagccatccgcaagcagttggcggctttcttagaaggcttctatgagatcattccaaagcgcctcatttccatcttcactgagcaggagttagagctgcttatatcaggactgcccaccattgacatcgatgatctgaaatccaacactgaataccacaagtaccagtccaactctattcagatccagtggttctggagagcattgcgttctttcgatcaagctgaccgtgccaagttcctccagtttgtcacgggtacttccaaggtacccctgcaaggctttgctgccctcgaaggcatgaatggcattcagaagtttcagatccatcgagatgacaggtccacagatcgcctgccttcagctcacacatgttttaatcagctggatctgcctgcctatgagagctttgagaagctccgccacatgctactgttggctatccaggagtgctctgaaggctttgggctggcctaataaggccctgcccaactccgtggggttttttttaccattgttggacctggggaggggggagttaaaaaaagaaccagaaagaaattgtcaaaaaccaataaatgaaatccaccaactcaccgtgtgtgtcccagctgccccatcttccccagcgcatacctgttcctcttctcattctctccccgccgcctgtttcctcaccttctctcccctttccatgccgtccatgatccccaccccatgtgttttaaaaaggcagtagcctttgcagggacctgtctgtcccaactgtttgaacagtgtgctcctcagattctgtgttcagaaggatttgctgcattgagacttgaaacctttggataggggaaaaaattatatatatatatatttttttgttctgtttgcatttcttaatttgtgcttggaatgtgttgatgtgcacagctaatgattcaatgcgagacaagattggcgtctgtgttgtggaggtttcaaataaagagcactcttcataa

SEQ ID NO: 467024 - DNA, 10813 bp, Homo sapiens
gaccatagaggatccccgcctgtaccctctctctgtgtaccccaaacagcctaccatctgggtgtgaatttggccaggcagatatgcagaaactggttccaaaggatgagaaggcaggtacgacccagggcggaaaaagatcagatggggaacaggatggagcagctggaagtatggatgcttctacccagggcttattagaaggcattgggctagatggtgacacattggctcccatggagacagatgaacctactgcttcagactctaagggcaaatctaaaatcacaccagcaatggctgccagaattaagcaaatcaagcctttgttatcagcttcctccagattaggccgagcacttgctgagctatttggacttcttgttaaactttgtgtgggatctcctgtccgccagagaaggagccatcatgctgccagcaccactacagcaccgacacctgccgcgcgatcaacagcctcagctctcactaagctcttgactaaggggttatcttggcagcccccaccatatacacctactccccgattcaggctgacattcttcatctgttcagttggtttcacatccccaatgctgtttgatgagaggaagtatccctaccacctcatgctgcaaaaatttctctgctccggaggccacaatgctctttttgaaactttcaactgggctctgtccatgggaggtaaagttcctgtttctgagggattggaacactcagacttgcctgatggcacaggagaattcctagatgcctggcttatgctggtggagaagatggtgaatcccaccacggtgcttgaatctccacattcgctgcctgccaaattgcctggaggtgtccagaactttccccagttcagtgcactgcgcttccttgtggtaactcagaaagcagcctttacttgcatcaaaaacttatggaaccggaaacccctgaaggtatatggtggacgaatggctgaatcgatgctggccattctatgccacatcctccgaggagaacctgtgattcgagagagactaagcaaggagaaggaggggtctcgaggagaagaggatacagggcaagaggaaggtggctcccgccgggaacctcaagtcaaccagcaacaactgcaacagctcatggacatgggcttcacaagggaacatgcaatggaggcactgttgaacaccagcaccatggagcaggccacagagtaccttttaacccaccctcctccaatcatgggaggagttgttcgggatctcagcatgtctgaagaggaccagatgatgagagcaattgctatgtctctgggacaggatattccaatggatcaaagggcagagtcacctgaggaagttgcttgccggaaggaggaagaggaacggaaagctcgggaaaagcaggaggaggaagaggctaaatgtctagagaagttccaggatgctgacccgttggaacaagatgagctccacactttcacagatactatgttgccaggctgcttccaccttcttgatgagctgccagacacagtataccgtgtgtgtgacctgatcatgacagcaatcaaacgtaatggagcagattatcgtgacatgattctgaagcaagtagtcaatcaggtgtgggaagctgctgatgtattgatcaaagctgctcttcccctgacaacaagtgacacaaaaaccgtgtcagagtggataagtcagatggccacactgccccaggcctccaatttggctactagaatcttgcttttaacgctactttttgaggagttgaagctaccttgtgcttgggtggttgaatcaagtggcatccttaatgtcctaatcaaactcttggaagtggttcagccctgcctccaggcagccaaggagcagaaggaagtccagaccccaaagtggatcacaccagtgttgctcctgattgatttctatgaaaagacagccatctcctcaaaaaggagagcccagatgactaagtacctgcaatccaacagcaacaactggcgctggtttgatgatcgctctgggcgttggtgtagttacagtgcaagcaacaatagcactattgattctgcctggaaatctggagagacaagcgtgcgattcactgcaggccgaagaagatacacggtccaattcactacaatggtgcaggttaatgaggaaacagggaaccgacgccctgtgatgctgactctcctcagggtacctcggctgaataaaaattcaaaaaacagcaatggacaggaactagagaagacgctggaagaaagcaaagaaatggatatcaaacgtaaagaaaataaaggcaatgatacccctttggccctagagagtacaaacactgaaaaggagacaagcctggaggaaacaaaaatcggggagatcctgatccagggcttgacagaagatatggtgactgttttaatccgggcctgcgtgagcatgctgggagtccctgtggacccagatactttgcatgccacccttcgtctctgtctgaggctcacccgggaccacaaatatgccatgatgtttgcagaactgaagagtacccgcatgatcttgaatttgacccagagctcaggcttcaatgggtttactcccctggtcacccttctcttaagacacatcattgaggacccctgtacccttcgtcataccatggaaaaggttgttcgctcagcagctacaagtggagctggtagcactacctctggtgttgtgtctggcagcctcggctctcgggagatcaactacatccttcgtgtccttgggccagccgcatgccgcaatccagacatattcacagaagtggccaactgctgtatccgcatcgcccttcctgcccctcgaggctcaggaactgcttcagatgatgaatttgagaatcttagaattaaaggccctaatgctgtacagctggtgaagaccacccctttgaagccctcacctctgcctgtcatccctgatactatcaaggaagtgatctatgatatgctgaatgctctggctgcataccatgctccagaggaagcagataaatctgatcctaaacctggggttatgacccaagaggttggccagctcctgcaagacatgggtgatgatgtataccagcagtaccggtcacttacgcgtcagagcagtgactttgatacgcagtcaggtttttccattaatagtcaggtctttgctgcagatggtgcctccactgagacttccgcatctgggacctcccaaggagaggcttcaactccagaggagtctcgagatgggaagaaagataaagaaggggaccgggcctctgaggaaggcaaacagaaaggcaagggcagcaaacctttaatgcctacctccactatccttcgtcttctggcagagttggtgaggtcctatgttggtattgctaccctgattgccaactacagctacactgtgggccagtctgaactgatcaaagaggactgcagtgtgctagcttttgttctggaccacctgctcccacatacccagaatgcagaagacaaggacacccctgccttggcccgcctgttcctcgcaagcctggctgctgcagggagtggcacagatgcccaggtggccctagtgaatgaagtaaaagcagcccttggacgggcactggctatggctgagagtacagagaaacatgccaggcttcaggcagtgatgtgtatcatcagtactatcatggagtcctgcccctccacctccagcttctacagcagtgccacagcgaagacccagcacaatggcatgaacaacatcattcggcttttcctgaagaagggactggttaatgacctggccagagtacctcacagcttagacctgtccagtcccaacatggccaacacagtcaatgctgctctgaagcctttggaaacactttcccggattgtgaaccagcccagtagcctttttggcagcaagagtgcttctagcaagaacaagtctgagcaggatgcccaaggagcctctcaagattccagtagcaaccagcaggacccaggcgagcctggggaagcagaagtgcaggaggaggatcatgatgtcactcagacagaggtggcagatggggatatcatggatggggaggctgaaaccgactcagtggtgattgctgggcagcctgaggtgctcagttcacaagagatgcaggttgagaatgagctggaggacctgatagatgagttgcttgagagggatggcggatctgggaacagtacaattatagtgagcagaagtggagaggatgaatcacaagaggacgtgctgatggatgaagctccttccaacctcagccaagcttccaccttgcaggccaaccgagaagattccatgaatatcctggaccctgaggatgaggaggagcacactcaggaagaggacagcagtggcagtaacgaggatgaggatgatagtcaggatgaagaggaggaggaggaggaagatgaggaagatgatcaggaggatgatgaaggtgaagagggagatgaagacgatgacgacgatggctctgagatggaattggatgaggattatcctgatatgaacgcttctcccttggtccgatttgagcgctttgaccgggaggatgatctcatcattgagtttgacaacatgttctccagtgctacagacatccccccatccccaggaaatatccctaccacccatccactgatggtgcgccatgcagaccacagttctctgacactgggcagtggctcttcaacaactcgtctcacccagggcatcgggcgcagtcagaggaccctaaggcagctgacggccaatactggccacaccattcatgttcactaccctgggaatcgccagcccaaccctcctcttatactgcagaggttgcttggtccctcagctgctgctgacatccttcagctgagcagcagccttcccctacaaagccggggtcgggcccgcctcctggtaggcaacgatgacgtccacatcatcgcccgttctgatgatgagctgctggatgactttttccatgatcagagcacagctaccagccaagcaggaaccctgtccagcatccccacagccctgacccgctggacagaagaatgcaaagttctcgatgctgagagcatgcatgactgtgtttcagtggttaaagtgtccattgtcaatcacctggaattcctgagggatgaggagctggaagaaaggcgagagaagcgcaggaaacaactggctgaggaagaaacaaagataactgataaaggcaaagaagataaggagaacagggatcagagtgcacagtgtactgcatctaagtcaaatgactccactgaacagaatctctcagatgggacgcctatgcctgacagctacccaacaaccccatcttcaactgatgcagctacatctgagtccaaggagacccttggcactctgcaatcctcacaacagcaaccaacactcccaaccccaccagctttgggagaggttcctcaggagctgcagtctccagctggagaagggggcagctctacacagctattgatgcctgtagagccagaggaattgggtcccacaaggccaagtggggaagcagaaacaactcagatggagttatccccagctcccactataacctcactttccccagagagagctgaggattctgatgcactgacggctgtcagcagtcagctagaaggctctcctatggatacaagcagcctggcttcctgtaccttagaggaggctgtgggtgacacttcagcagctggcagttctgagcagcccagagcaggcagctccactcctggggatgccccaccagctgtggcggaagtgcaaggcaggagtgatgggtcaggggaatctgcccagccacctgaggacagctccccacctgcatcctctgagagctcttccaccagagattctgccgtggccatttctggagcagattcccgaggaatcctagaagagccgttgccttcaacaagcagtgaagaagaagatccccttgcgggtatcagtctccctgaaggtgtggacccctcttttctggctgccctgcctgatgacatccgtcgggaagttctacagaaccagctaggcattcgtccaccaacccggactgccccctccacaaatagctcagcgcctgcagtggtggggaatcctggtgtgactgaagtgagccctgagtttctggctgccctgcctccagccattcaggaggaagtactggcacagcagagagctgagcagcagcgacgagaactagcacagaatgccagctcagacacccctatggaccctgtgaccttcatccagactctgccctcagacctgcgccgtagtgtcctagaggatatggaggacagtgtgttagctgtgatgccacctgacattgcagctgaggctcaagccctgagacgagagcaagaagcccggcagcgacagctcatgcatgagcgtctgtttgggcacagtagcacctccgcactctctgctattctccgaagcccggctttcaccagtcgcttaagtggcaaccgtggggtccagtatactcgccttgctgtgcagagaggtggcaccttccagatggggggtagcagcagccataacaggccttctggcagtaatgtagatactctcctccgcctccgaggacggctccttctggaccacgaagccctttcttgtctcttggtcctactttttgtggatgagccaaagctcaatactagccgtctacaccgagtactgagaaatctctgctaccatgcccagacccgccactgggtcatccgcagtctgctctccatcttgcagcgcagcagtgagagtgagctatgcattgaaacacccaaactcactacaagtgaggaaaagggcaaaaagtcgagcaagagctgtgggtcaagtagccatgagaaccgtcccctggacctgctacacaagatggagtcaaagagctccaaccagctttcctggctctcagtatccatggatgcagccctaggctgcaggactaatatatttcagatccagcgttcaggggggcgtaaacataccgagaagcatgcaagcggtggctccaccgtccacatccatccccaagctgctcctgttgtctgcagacacgttttggatacactcattcaattggccaaggtatttcccagccacttcacacagcagcggaccaaagaaacaaactgtgagagtgatcgggaaaggggcaataaggcctgtagcccatgctcctcacagtcctccagcagtggcatttgcacagacttctgggacttattggtaaaactggacaacatgaatgtcagccggaaaggcaagaactccgtgaagtcagtgccagtgagcgctggcggtgagggggaaacctctccatacagcctcgaggcctctccactggggcagctcatgaacatgttgtcacacccagtcatccgccggagctctctcttaactgagaaactcctcagactcctttctctcatctcaattgctctcccagaaaacaaggtgtcagaagcacaggctaattctggcagcggtgcttcctccaccaccactgccacctcaaccacatctaccaccaccaccactgccgcctccaccacgcccacaccccctactgcacccacccctgtcacttctgctccagccctggttgctgccacggctatttccaccattgtcgtagctgcttcgaccacagtgactacccccacgactgctaccactactgtttcaatttctcccactactaagggcagcaaatctccagcgaaggtgagtgatgggggcagcagcagtacagactttaagatggtgtcctctggcctcactgaaaaccagctacagctctctgtagaggtgttgacatcccactcttgttctgaggaaggcttagaggatgcagccaacgtactactgcagctctcccggggggactctgggacccgggacactgttctcaagctgctactgaatggagcccgccatctgggttataccctttgtaaacaaataggtaccctgctggccgagctgcgggaatacaacctcgagcagcagcggcgagcccaatgtgaaaccctctctcctgatggcctgcctgaggagcagccacagaccaccaagctgaagggcaaaatgcagagcaggtttgacatggctgagaatgtggtaattgtggcatctcagaagcgacctttgggtggccgggagctccagctgccttctatgtccatgttgacatccaagacatctacccagaagttcttcttgagggtactacaggtcatcatccagctccgggacgacacgcgccgggctaacaagaaagccaagcagacaggcaggctaggttcctccggtttaggctcagctagcagcatccaggcagctgttcggcagctggaggctgaggctgatgccattatacaaatggtacgtgagggtcaaagggcgcggagacagcaacaagcagcaacgtcggagtctagccagtcagaggcgtctgtccggagggaggaatcacccatggatgtggaccagccatctcccagtgctcaagatactcaatccattgcctccgatggaaccccacagggggagaaggaaaaggaagaaagaccacctgagttacccctgctcagcgagcagctgagtttggacgagctgtgggacatgcttggggagtgtctaaaggaactagaggaatcccatgaccagcatgcggtgctagtgctacagcctgctgtcgaggccttctttctggtccatgccacagagcgggagagcaagcctcctgtccgagacacccgtgagagccagctggcacacatcaaggacgagcctcctccactctcccctgcccccttaaccccagccacgccttcctcccttgacccattcttctcccgggagccctcatctatgcacatctcctcaagcctgccccctgacacacagaagttccttcgctttgcagagactcaccgcactgtgttaaaccagatcctacggcagtccacgacccaccttgctgatgggccttttgctgtcctggtagactacattcgtgtcctcgactttgatgtcaagcgcaaatatttccgccaagagctggagcgtttagatgaggggctccggaaagaagacatggctgtgcatgtccgtcgtgaccatgtgtttgaagactcctatcgtgagctgcatcgcaaatcccccgaagaaatgaagaatcgattgtatatagtatttgaaggagaagaagggcaggatgctggcgggctcctgcgggagtggtatatgatcatctctcgagagatgtttaaccctatgtatgccttgttccgtacctcacctggtgatcgagtcacctacaccatcaatccatcttcccactgcaaccccaaccacctcagctacttcaagtttgtcggacgcattgtggccaaagctgtatatgacaaccgtcttctggagtgctactttactcgatccttttacaaacacatcttgggcaagtcagtcagatatacagatatggagagtgaagattaccacttctaccaaggtctggtttatctgctggaaaatgatgtctccacactaggctatgacctcaccttcagcactgaggtccaagagtttggagtttgtgaagttcgtgacctcaaacccaatggggccaacatcttggtaacagaggagaataagaaggagtatgtacacctggtatgccagatgagaatgacaggagccatccgcaagcagttggcggctttcttagaaggcttctatgagatcattccaaagcgcctcatttccatcttcactgagcaggagttagagctgcttatatcaggactgcccaccattgacatcgatgatctgaaatccaacactgaataccacaagtaccagtccaactctattcagatccagtggttctggagagcattgcgttctttcgatcaagctgaccgtgccaagttcctccagtttgtcacgggtacttccaaggtacccctgcaaggctttgctgccctcgaaggcatgaatggcattcagaagtttcagatccatcgagatgacaggtccacagatcgcctgccttcagctcacacatgttttaatcagctggatctgcctgcctatgagagctttgagaagctccgccacatgctactgttggctatccaggagtgctctgaaggctttgggctggcctaataaggccctgcccaactccgtggggttttttttaccattgttggacctggggaggggggagttaaaaaaagaaccagaaagaaattgtcaaaaaccaataaatgaaatccaccaactcaccgtgtgtgtcccagctgccccatcttccccagcgcatacctgttcctcttctcattctctccccgccgcctgtttcctcaccttctctcccctttccatgccgtccatgatccccaccccatgtgttttaaaaaggcagtagcctttgcagggacctgtctgtcccaactgtttgaacagtgtgctcctcagattctgtgttcagaaggatttgctgcattgagacttgaaacctttggataggggaaaaaattatatatatatatatttttttgttctgtttgcatttcttaatttgtgcttggaatgtgttgatgtgcacagctaatgattcaatgcgagacaagattggcgtctgtgttgtggaggtttcaaataaagagcactcttcataa

SEQ ID NO: 467025 - DNA, 450 bp, Homo sapiens
ctccactttctggtcccgtgccccagtcagcaccgcgctcagcaagtagcgtccagccagtggcgctgtgaacacgcctgtctctggatcataatagcctccatcattgagcaggactctgtcgaaggggaccgtgcctggttcagaccggggcaaactcagagcagctgaaaatgccacttggggcacaggggctgctggtgccccggcctctccccacgcccggggcgcgccggctcagggaggctcggggccgcccatgcagacttttggcctggcgcgatcccccaagaacccctccagggccggcctgcggaggagccgatcctcgcaccctccgctccctccactggccctccaggtcgattccctgggctccaggctcccccgcgcgggcgccgcccaccgccatactaaacgatcgaggaataaagacacttggtttttcta

SEQ ID NO: 467026 - DNA, 473 bp, Homo sapiens
ctattgtgtgttgctaatcattgactgtagtcccaaaaaagccttgtgaaaatgttatgccctatgtaacagcagagtaacataaaataaaagtacattttataaaccaaaaaaaaaaaaaaaaaactcaaggtgaacaggaggagtggagggggcaccagcagcccctgtgccccaagtggcattttcagctgctctgagtttgccccggtctgaaccaggcacggtccccttcgacagagtcctgctcaatgatggaggctattatgatccagagacaggcgtgttcacagcgccactggctggacgctacttgctgagcgcggtgctgactgggcaccggcacgagaaagtggaggccgtgctgtcccgctccaaccagggcgtggcccgcgtagactccggctcccccgcgcgggcgccgcccaccgccatactaaacgatcgaggaataaagacacttggtttttcta

SEQ ID NO: 467027 - DNA, 3920 bp, Homo sapiens
gcagggaggaggaggccagggcccgccccacagccactctcgcgcctccgaacagccacaggggcaaagccctgtcacccccaggatccggtcatcagggaaagaggacagggagaccagaagagggccagctgggacgagggggcggacgcccaggaggcaacttctgagacgcagctcctgagaggggcagggaccaggcgcgggaggccagagggggcacagagaacaaaccccctcagaagtgaagaggagagcggaaggaaccgagaggggacggacaggagctgaggaggaaagaggaggggagaggggtcaggccaggcagccaaggagaagacgtgtggccgggggctatcagaaggaaactgggacggacgggccgggctcgggctgtcctgtggagcagcagcatccccggggccggcagaggcgccagtggctgggcgggatgagtctctgagggccactgtggagcgccccgccatggccccccgcaccctctggagctgctacctctgctgcctgctgacggcagctgcaggggccgccagctaccctcctcgaggtttcagcctctacacaggttccagtggggccctcagccccggggggccccaggcccagattgccccccggccagccagccgccacaggaactggtgtgcctacgtggtgacccggacagtgagctgtgtccttgaggatggagtggagacatatgtcaagtaccagccttgtgcctggggccagccccagtgtccccaaagcatcatgtaccgccgcttcctccgccctcgctaccgtgtggcctacaagacagtgaccgacatggagtggaggtgctgtcagggttatgggggcgatgactgtgctgagagtcccgctccagcgctggggcctgcgtcttccacaccacggcccctggcccggcctgcccgccccaacctctctggctccagtgcaggcagccccctcagtggactggggggagaaggtcctggggagtcagagaaggtgcagcagctggaggaacaggtgcagagcctgaccaaggagctgcaaggcctgcggggcgtcctgcaaggactgagcgggcgcctggcagaggatgtgcagagggctgtggagacggccttcaacgggaggcagcagccagctgacgcggctgcccgccctggggtgcatgaaaccctcaatgagatccagcaccagctgcagctcctggacacccgcgtctccacccacgaccaggagctgggtcacctcaacaaccatcatggcggcagcagcagcagtgggggcagcagggccccagccccagcctcagcccctccgggccccagtgaggagctgctgcggcagctggagcagcggttgcaggagtcctgctccgtgtgcctggccgggctagatggcttccgccggcagcagcaggaggacagggagcggctgcgagcgatggagaagctgctggcctcggtggaggagcggcaacggcacctcgcagggctggcggtgggccgcaggccccctcaggaatgctgctctccagagctgggccggcgactggcagagctggagcgcaggctggatgtcgtggccggctcagtgacagtgctgagtgggcggcgaggcacagagctgggaggagccgcggggcagggaggccaccccccaggctacaccagcttggcctcccgcctgtctcgcctggaggaccgcttcaactccaccctgggcccttcggaggagcaggaggagagctggcctggggctcctggggggctgagccactggctgcctgctgcccggggccgactagagcagttgggggggctgctggccaatgtgagcggggagctgggggggcggttggatctgttggaggagcaggtggcaggggccatgcaggcatgcgggcagctctgctctggggcccctggggagcaggactctcaagtcagcgagatcctcagtgccttggagcgcagggtgctggacagtgaggggcagctgcggctggtgggctccggcctgcacacggtggaagcagcgggggaggcccggcaggccacgctggagggattacaagaggttgtgggccggctccaggatcgtgtggatgcccaggatgagacagctgcagagttcacactacggctgaatctcactgcggcccggctaggccaactggaggggctgctgcaggcccatggggatgagggctgtggggcctgtggcggagtccaagaggaactaggccgccttcgggatggtgtggagcgctgctcctgccccctgttgcctcctcggggtcctggggctggtccaggtgttgggggcccaagccgtgggcccctggacggcttcagcgtgtttgggggcagctcaggctcagccctgcaggccctgcaaggagagctctctgaggttattctcagcttcagctccctcaatgactcactgaatgagctccagaccactgtggagggccagggcgctgatctggctgacctgggggcaaccaaggaccgtatcatttctgagattaacaggctgcagcaggaggccacagagcatgctacagagagtgaagagcgcttccgaggcctagaggagggacaagcacaggccggccagtgccccagcttagaggggcgattgggccgtcttgagggtgtctgtgaacggttggacactgtggctgggggactgcagggcctgcgcgagggcctttccagacacgtggctgggctctgggctgggctccgggaaaccaacaccaccagccagatgcaggcagccctgctggagaagctggtcgggggacaggcgggcctgggcaggcggctgggtgcccttaacagctccctgcagctcctggaggaccgtctgcaccagctcagcctgaaggacctcactgggcctgcaggagaggctgggcccccagggcctcctgggctgcagggacccccaggccctgctggacctccaggatcaccaggcaaggacgggcaagagggccccatcgggccaccaggtcctcaaggtgaacaggaggagtggagggggcaccagcagcccctgtgccccaagtggcattttcagctgctctgagtttgccccggtctgaaccaggcacggtccccttcgacagagtcctgctcaatgatggaggctattatgatccagagacaggcgtgttcacagcgccactggctggacgctacttgctgagcgcggtgctgactgggcaccggcacgagaaagtggaggccgtgctgtcccgctccaaccagggcgtggcccgcgtagactccggtggctacgagcctgagggcctggagaataagccggtggccgagagccagcccagcccgggcaccctgggcgtcttcagcctcatcctgccgctgcaggccggggacacggtctgcgtcgacctggtcatggggcagctggcgcactcggaggagccgctcaccatcttcagcggggccctgctctatggggacccagagcttgaacacgcgtagactggggtcccgcccgacgtgtctacgtcggctgaagagacagcgggggcggcgggctcctggggtctcgcctgagacggggcacctagccctgggcgagcgccgcacccgggcccgcagcggcaccgcgcccagagcggcctctccccacgcccggggcgcgccggctcagggaggctcggggccgcccatgcagacttttggcctggcgcgatcccccaagaacccctccagggccggcctgcggaggagccgatcctcgcaccctccgctccctccactggccctccaggtcgattccctgggctccaggctcccccgcgcgggcgccgcccaccgccatactaaacgatcgaggaataaagacacttggtttttcta

SEQ ID NO: 467028 - DNA, 4300 bp, Homo sapiens
gcagggaggaggaggccagggcccgccccacagccactctcgcgcctccgaacagccacaggggcaaagccctgtcacccccaggatccggtcatcagggaaagaggacagggagaccagaagagggccagctgggacgagggggcggacgcccaggaggcaacttctgagacgcagctcctgagaggggcagggaccaggcgcgggaggccagagggggcacagagaacaaaccccctcagaagtgaagaggagagcggaaggaaccgagaggggacggacaggagctgaggaggaaagaggaggggagaggggtcaggccaggcagccaaggagaagacgtgtggccgggggctatcagaaggaaactgggacggacgggccgggctcgggctgtcctgtggagcagcagcatccccggggccggcagaggcgccagtggctgggcgggatgagtctctgagggccactgtggagcgccccgccatggccccccgcaccctctggagctgctacctctgctgcctgctgacggcagctgcaggggccgccagctaccctcctcgaggtttcagcctctacacaggttccagtggggccctcagccccggggggccccaggcccagattgccccccggccagccagccgccacaggaactggtgtgcctacgtggtgacccggacagtgagctgtgtccttgaggatggagtggagacatatgtcaagtaccagccttgtgcctggggccagccccagtgtccccaaagcatcatgtaccgccgcttcctccgccctcgctaccgtgtggcctacaagacagtgaccgacatggagtggaggtgctgtcagggttatgggggcgatgactgtgctgagagtcccgctccagcgctggggcctgcgtcttccacaccacggcccctggcccggcctgcccgccccaacctctctggctccagtgcaggcagccccctcagtggactggggggagaaggtcctggggagtcagagaaggtgcagcagctggaggaacaggtgcagagcctgaccaaggagctgcaaggcctgcggggcgtcctgcaaggactgagcgggcgcctggcagaggatgtgcagagggctgtggagacggccttcaacgggaggcagcagccagctgacgcggctgcccgccctggggtgcatgaaaccctcaatgagatccagcaccagctgcagctcctggacacccgcgtctccacccacgaccaggagctgggtcacctcaacaaccatcatggcggcagcagcagcagtgggggcagcagggccccagccccagcctcagcccctccgggccccagtgaggagctgctgcggcagctggagcagcggttgcaggagtcctgctccgtgtgcctggccgggctagatggcttccgccggcagcagcaggaggacagggagcggctgcgagcgatggagaagctgctggcctcggtggaggagcggcaacggcacctcgcagggctggcggtgggccgcaggccccctcaggaatgctgctctccagagctgggccggcgactggcagagctggagcgcaggctggatgtcgtggccggctcagtgacagtgctgagtgggcggcgaggcacagagctgggaggagccgcggggcagggaggccaccccccaggctacaccagcttggcctcccgcctgtctcgcctggaggaccgcttcaactccaccctgggcccttcggaggagcaggaggagagctggcctggggctcctggggggctgagccactggctgcctgctgcccggggccgactagagcagttgggggggctgctggccaatgtgagcggggagctgggggggcggttggatctgttggaggagcaggtggcaggggccatgcaggcatgcgggcagctctgctctggggcccctggggagcaggactctcaagtcagcgagatcctcagtgccttggagcgcagggtgctggacagtgaggggcagctgcggctggtgggctccggcctgcacacggtggaagcagcgggggaggcccggcaggccacgctggagggattacaagaggttgtgggccggctccaggatcgtgtggatgcccaggatgagacagctgcagagttcacactacggctgaatctcactgcggcccggctaggccaactggaggggctgctgcaggcccatggggatgagggctgtggggcctgtggcggagtccaagaggaactaggccgccttcgggatggtgtggagcgctgctcctgccccctgttgcctcctcggggtcctggggctggtccaggtgttgggggcccaagccgtgggcccctggacggcttcagcgtgtttgggggcagctcaggctcagccctgcaggccctgcaaggagagctctctgaggttattctcagcttcagctccctcaatgactcactgaatgagctccagaccactgtggagggccagggcgctgatctggctgacctgggggcaaccaaggaccgtatcatttctgagattaacaggctgcagcaggaggccacagagcatgctacagagagtgaagagcgcttccgaggcctagaggagggacaagcacaggccggccagtgccccagcttagaggggcgattgggccgtcttgagggtgtctgtgaacggttggacactgtggctgggggactgcagggcctgcgcgagggcctttccagacacgtggctgggctctgggctgggctccgggaaaccaacaccaccagccagatgcaggcagccctgctggagaagctggtcgggggacaggcgggcctgggcaggcggctgggtgcccttaacagctccctgcagctcctggaggaccgtctgcaccagctcagcctgaaggacctcactgggcctgcaggagaggctgggcccccagggcctcctgggctgcagggacccccaggccctgctggacctccaggatcaccaggcaaggacgggcaagagggccccatcgggccaccaggtcctcaaggtgaacaggaggagtggagggggcaccagcagcccctgtgccccaagtggcattttcagctgctctgagtttgccccggtctgaaccaggcacggtccccttcgacagagtcctgctcaatgatggaggctattatgatccagagacaggtagtcctgggaggggctgggttgaacggttggagaaatgggtgaggtgtgcagtgatatcttcccattcttgccttttccgacagtgtgaatcttcattctctgatttggggagaccccggctctttcttcatttattcattctcaggcagtggggagaagaagtagtcattcattcattcagcagatctttactggggcctgctcctgcccaggcactgttttaagtgctgggaatgcatagtgaacaaagcccccagttccctgccgctcacattccagtgaggtgaaaagacccagagggtccctcctcagtccaggagttctggtgcgctccccggagcttccctggcccccctgactgctatccttgtccccaggcgtgttcacagcgccactggctggacgctacttgctgagcgcggtgctgactgggcaccggcacgagaaagtggaggccgtgctgtcccgctccaaccagggcgtggcccgcgtagactccggtggctacgagcctgagggcctggagaataagccggtggccgagagccagcccagcccgggcaccctgggcgtcttcagcctcatcctgccgctgcaggccggggacacggtctgcgtcgacctggtcatggggcagctggcgcactcggaggagccgctcaccatcttcagcggggccctgctctatggggacccagagcttgaacacgcgtagactggggtcccgcccgacgtgtctacgtcggctgaagagacagcgggggcggcgggctcctggggtctcgcctgagacggggcacctagccctgggcgagcgccgcacccgggcccgcagcggcaccgcgcccagagcggcctctccccacgcccggggcgcgccggctcagggaggctcggggccgcccatgcagacttttggcctggcgcgatcccccaagaacccctccagggccggcctgcggaggagccgatcctcgcaccctccgctccctccactggccctccaggtcgattccctgggctccaggctcccccgcgcgggcgccgcccaccgccatactaaacgatcgaggaataaagacacttggtttttcta

SEQ ID NO: 467029 - DNA, 4449 bp, Homo sapiens
gcagggaggaggaggccagggcccgccccacagccactctcgcgcctccgaacagccacaggggcaaagccctgtcacccccaggatccggtcatcagggaaagaggacagggagaccagaagagggccagctgggacgagggggcggacgcccaggaggcaacttctgagacgcagctcctgagaggggcagggaccaggcgcgggaggccagagggggcacagagaacaaaccccctcagaagtgaagaggagagcggaaggaaccgagaggggacggacaggagctgaggaggaaagaggaggggagaggggtcaggccaggcagccaaggagaagacgtgtggccgggggctatcagaaggaaactgggacggacgggccgggctcgggctgtcctgtggagcagcagcatccccggggccggcagaggcgccagtggctgggcgggatgagtctctgagggccactgtggagcgccccgccatggccccccgcaccctctggagctgctacctctgctgcctgctgacggcagctgcaggggccgccagctaccctcctcgaggtttcagcctctacacaggttccagtggggccctcagccccggggggccccaggcccagattgccccccggccagccagccgccacaggaactggtgtgcctacgtggtgacccggacagtgagctgtgtccttgaggatggagtggagacatatgtcaagtaccagccttgtgcctggggccagccccagtgtccccaaagcatcatgtaccgccgcttcctccgccctcgctaccgtgtggcctacaagacagtgaccgacatggagtggaggtgctgtcagggttatgggggcgatgactgtgctgagagtcccgctccagcgctggggcctgcgtcttccacaccacggcccctggcccggcctgcccgccccaacctctctggctccagtgcaggcagccccctcagtggactggggggagaaggtcctggggagtcagagaaggtgcagcagctggaggaacaggtgcagagcctgaccaaggagctgcaaggcctgcggggcgtcctgcaaggactgagcgggcgcctggcagaggatgtgcagagggctgtggagacggccttcaacgggaggcagcagccagctgacgcggctgcccgccctggggtgcatgaaaccctcaatgagatccagcaccagctgcagctcctggacacccgcgtctccacccacgaccaggagctgggtcacctcaacaaccatcatggcggcagcagcagcagtgggggcagcagggccccagccccagcctcagcccctccgggccccagtgaggagctgctgcggcagctggagcagcggttgcaggagtcctgctccgtgtgcctggccgggctagatggcttccgccggcagcagcaggaggacagggagcggctgcgagcgatggagaagctgctggcctcggtggaggagcggcaacggcacctcgcagggctggcggtgggccgcaggccccctcaggaatgctgctctccagagctgggccggcgactggcagagctggagcgcaggctggatgtcgtggccggctcagtgacagtgctgagtgggcggcgaggcacagagctgggaggagccgcggggcagggaggccaccccccaggctacaccagcttggcctcccgcctgtctcgcctggaggaccgcttcaactccaccctgggcccttcggaggagcaggaggagagctggcctggggctcctggggggctgagccactggctgcctgctgcccggggccgactagagcagttgggggggctgctggccaatgtgagcggggagctgggggggcggttggatctgttggaggagcaggtggcaggggccatgcaggcatgcgggcagctctgctctggggcccctggggagcaggactctcaagtcagcgagatcctcagtgccttggagcgcagggtgctggacagtgaggggcagctgcggctggtgggctccggcctgcacacggtggaagcagcgggggaggcccggcaggccacgctggagggattacaagaggttgtgggccggctccaggatcgtgtggatgcccaggatgagacagctgcagagttcacactacggctgaatctcactgcggcccggctaggccaactggaggggctgctgcaggcccatggggatgagggctgtggggcctgtggcggagtccaagaggaactaggccgccttcgggatggtgtggagcgctgctcctgccccctgttgcctcctcggggtcctggggctggtccaggtgttgggggcccaagccgtgggcccctggacggcttcagcgtgtttgggggcagctcaggctcagccctgcaggccctgcaaggagagctctctgaggttattctcagcttcagctccctcaatgactcactgaatgagctccagaccactgtggagggccagggcgctgatctggctgacctgggggcaaccaaggaccgtatcatttctgagattaacaggctgcagcaggaggccacagagcatgctacagagagtgaagagcgcttccgaggcctagaggagggacaagcacaggccggccagtgccccagcttagaggggcgattgggccgtcttgagggtgtctgtgaacggttggacactgtggctgggggactgcagggcctgcgcgagggcctttccagacacgtggctgggctctgggctgggctccgggaaaccaacaccaccagccagatgcaggcagccctgctggagaagctggtcgggggacaggcgggcctgggcaggcggctgggtgcccttaacagctccctgcagctcctggaggaccgtctgcaccagctcagcctgaaggacctcactgggcctgcaggagaggctgggcccccagggcctcctgggctgcagggacccccaggccctgctggacctccaggatcaccaggcaaggacgggcaagagggccccatcgggccaccaggtcctcaaggtgaacagggtgagtgcctttcatttgattctggagggagaagtgactaggggttggaggatagaggtcctcgggcagccctgggctggggatccagcaggggaagggggctggcactctgccctgagcatcccctttaacatccacccttcccactcaggagtggagggggcaccagcagcccctgtgccccaagtggcattttcagctgctctgagtttgccccggtctgaaccaggcacggtccccttcgacagagtcctgctcaatgatggaggctattatgatccagagacaggtagtcctgggaggggctgggttgaacggttggagaaatgggtgaggtgtgcagtgatatcttcccattcttgccttttccgacagtgtgaatcttcattctctgatttggggagaccccggctctttcttcatttattcattctcaggcagtggggagaagaagtagtcattcattcattcagcagatctttactggggcctgctcctgcccaggcactgttttaagtgctgggaatgcatagtgaacaaagcccccagttccctgccgctcacattccagtgaggtgaaaagacccagagggtccctcctcagtccaggagttctggtgcgctccccggagcttccctggcccccctgactgctatccttgtccccaggcgtgttcacagcgccactggctggacgctacttgctgagcgcggtgctgactgggcaccggcacgagaaagtggaggccgtgctgtcccgctccaaccagggcgtggcccgcgtagactccggtggctacgagcctgagggcctggagaataagccggtggccgagagccagcccagcccgggcaccctgggcgtcttcagcctcatcctgccgctgcaggccggggacacggtctgcgtcgacctggtcatggggcagctggcgcactcggaggagccgctcaccatcttcagcggggccctgctctatggggacccagagcttgaacacgcgtagactggggtcccgcccgacgtgtctacgtcggctgaagagacagcgggggcggcgggctcctggggtctcgcctgagacggggcacctagccctgggcgagcgccgcacccgggcccgcagcggcaccgcgcccagagcggcctctccccacgcccggggcgcgccggctcagggaggctcggggccgcccatgcagacttttggcctggcgcgatcccccaagaacccctccagggccggcctgcggaggagccgatcctcgcaccctccgctccctccactggccctccaggtcgattccctgggctccaggctcccccgcgcgggcgccgcccaccgccatactaaacgatcgaggaataaagacacttggtttttcta

SEQ ID NO: 467030 - DNA, 4464 bp, Homo sapiens
gcagggaggaggaggccagggcccgccccacagccactctcgcgcctccgaacagccacaggggcaaagccctgtcacccccaggatccggtcatcagggaaagaggacagggagaccagaagagggccagctgggacgagggggcggacgcccaggaggcaacttctgagacgcagctcctgagaggggcagggaccaggcgcgggaggccagagggggcacagagaacaaaccccctcagaagtgaagaggagagcggaaggaaccgagaggggacggacaggagctgaggaggaaagaggaggggagaggggtcaggccaggcagccaaggagaagacgtgtggccgggggctatcagaaggaaactgggacggacgggccgggctcgggctgtcctgtggagcagcagcatccccggggccggcagaggcgccagtggctgggcgggatgagtctctgagggccactgtggagcgccccgccatggccccccgcaccctctggagctgctacctctgctgcctgctgacggcagctgcaggggccgccagctaccctcctcgaggtttcagcctctacacaggttccagtggggccctcagccccggggggccccaggcccagattgccccccggccagccagccgccacaggaactggtgtgcctacgtggtgacccggacagtgagctgtgtccttgaggatggagtggagacatatgtcaagtaccagccttgtgcctggggccagccccagtgtccccaaagcatcatgtaccgccgcttcctccgccctcgctaccgtgtggcctacaagacagtgaccgacatggagtggaggtgctgtcagggttatgggggcgatgactgtgctgagagtcccgctccagcgctggggcctgcgtcttccacaccacggcccctggcccggcctgcccgccccaacctctctggctccagtgcaggcagccccctcagtggactggggggagaaggtcctggggagtcagagaaggtgcagcagctggaggaacaggtgcagagcctgaccaaggagctgcaaggcctgcggggcgtcctgcaaggactgagcgggcgcctggcagaggatgtgcagagggctgtggagacggccttcaacgggaggcagcagccagctgacgcggctgcccgccctggggtgcatgaaaccctcaatgagatccagcaccagctgcagctcctggacacccgcgtctccacccacgaccaggagctgggtcacctcaacaaccatcatggcggcagcagcagcagtgggggcagcagggccccagccccagcctcagcccctccgggccccagtgaggagctgctgcggcagctggagcagcggttgcaggagtcctgctccgtgtgcctggccgggctagatggcttccgccggcagcagcaggaggacagggagcggctgcgagcgatggagaagctgctggcctcggtggaggagcggcaacggcacctcgcagggctggcggtgggccgcaggccccctcaggaatgctgctctccagagctgggccggcgactggcagagctggagcgcaggctggatgtcgtggccggctcagtgacagtgctgagtgggcggcgaggcacagagctgggaggagccgcggggcagggaggccaccccccaggctacaccagcttggcctcccgcctgtctcgcctggaggaccgcttcaactccaccctgggcccttcggaggagcaggaggagagctggcctggggctcctggggggctgagccactggctgcctgctgcccggggccgactagagcagttgggggggctgctggccaatgtgagcggggagctgggggggcggttggatctgttggaggagcaggtggcaggggccatgcaggcatgcgggcagctctgctctggggcccctggggagcaggactctcaagtcagcgagatcctcagtgccttggagcgcagggtgctggacagtgaggggcagctgcggctggtgggctccggcctgcacacggtggaagcagcgggggaggcccggcaggccacgctggagggattacaagaggttgtgggccggctccaggatcgtgtggatgcccaggatgagacagctgcagagttcacactacggctgaatctcactgcggcccggctaggccaactggaggggctgctgcaggcccatggggatgagggctgtggggcctgtggcggagtccaagaggaactaggccgccttcgggatggtgtggagcgctgctcctgccccctgttgcctcctcggggtcctggggctggtccaggtgttgggggcccaagccgtgggcccctggacggcttcagcgtgtttgggggcagctcaggctcagccctgcaggccctgcaaggagagctctctgaggttattctcagcttcagctccctcaatgactcactgaatgagctccagaccactgtggagggccagggcgctgatctggctgacctgggggcaaccaaggaccgtatcatttctgagattaacaggctgcagcaggaggccacagagcatgctacagagagtgaagagcgcttccgaggcctagaggagggacaagcacaggccggccagtgccccagcttagaggggcgattgggccgtcttgagggtgtctgtgaacggttggacactgtggctgggggactgcagggcctgcgcgagggcctttccagacacgtggctgggctctgggctgggctccgggaaaccaacaccaccagccagatgcaggcagccctgctggagaagctggtcgggggacaggcgggcctgggcaggcggctgggtgcccttaacagctccctgcagctcctggaggaccgtctgcaccagctcagcctgaaggacctcactgggcctgcaggagaggctgggcccccagggcctcctgggctgcagggacccccaggccctgctggacctccaggatcaccaggcaaggacgggcaagagggccccatcgggccaccaggtcctcaaggtgaacaggaggagtggagggggcaccagcagcccctgtgccccaagtggcattttcagctgctctgagtttgccccggtctgaaccaggcacggtccccttcgacagagtcctgctcaatgatggaggctattatgatccagagacaggtagtcctgggaggggctgggttgaacggttggagaaatgggtgaggtgtgcagtgatatcttcccattcttgccttttccgacagtgtgaatcttcattctctgatttggggagaccccggctctttcttcatttattcattctcaggcagtggggagaagaagtagtcattcattcattcagcagatctttactggggcctgctcctgcccaggcactgttttaagtgctgggaatgcatagtgaacaaagcccccagttccctgccgctcacattccagtgaggtgaaaagacccagagggtccctcctcagtccaggagttctggtgcgctccccggagcttccctggcccccctgactgctatccttgtccccaggcgtgttcacagcgccactggctggacgctacttgctgagcgcggtgctgactgggcaccggcacgagaaagtggaggccgtgctgtcccgctccaaccagggcgtggcccgcgtagactccggtggctacgagcctgagggcctggagaataagccggtggccgagagccagcccagcccgggcaccctgggcgtcttcagcctcatcctgccgctgcaggccggggacacggtctgcgtcgacctggtcatggggcagctggcgcactcggaggagccgctcaccatcttcagcggggccctgctctatggggacccagagcttgaacacgcgtagactggggtcccgcccgacgtgtctacgtcggctgaagagacagcgggggcggcgggctcctggggtctcgcctgagacggggcacctagccctgggcgagcgccgcacccgggcccgcagcggcaccgcgcccagagcggcctctccccacgcccggggcgcgccggctcagggaggctcggggccgcccatgcagacttttggcctggcgcgatcccccaagaacccctccagggccggcctgcggaggagccgatcctcgcaccctccgctccctccactggccctccaggtcgattccctgggctccaggctcccccgcgcgggcgccgcccaccgccatactaaacgatcgaggaataaagacacttggtttttctaaaaaaaactaaacgaaccgttctgctacggtacggggtcgggggctgccgggcgtgcacagggcacggggcgggagagacgacggcctccggagaggaccccgggttccgcactgcgttcgccgcctccgcccggctcggggcggctcggggttggctcaggca

SEQ ID NO: 467031 - DNA, 3151 bp, Homo sapiens
  misc_feature (3099)..(3099): n is a, c, g, or t
  misc_feature (3102)..(3102): n is a, c, g, or t
  misc_feature (3105)..(3105): n is a, c, g, or t
  misc_feature (3108)..(3108): n is a, c, g, or t
  misc_feature (3113)..(3113): n is a, c, g, or t
gcagggaggaggaggccagggcccgccccacagccactctcgcgcctccgaacagccacaggggcaaagccctgtcacccccaggatccggtcatcagggaaagaggacagggagaccagaagagggccagctgggacgagggggcggacgcccaggaggcaacttctgagacgcagctcctgagaggggcagggaccaggcgcgggaggccagagggggcacagagaacaaaccccctcagaagtgaagaggagagcggaaggaaccgagaggggacggacaggagctgaggaggaaagaggaggggagaggggtcaggccaggcagccaaggagaagacgtgtggccgggggctatcagaaggaaactgggacggacgggccgggctcgggctgtcctgtggagcagcagcatccccggggccggcagaggcgccagtggctgggcgggatgagtctctgagggccactgtggagcgccccgccatggccccccgcaccctctggagctgctacctctgctgcctgctgacggcagctgcaggggccgccagctaccctcctcgaggtttcagcctctacacaggttccagtggggccctcagccccggggggccccaggcccagattgccccccggccagccagccgccacaggaactggtgtgcctacgtggtgacccggacagtgagctgtgtccttgaggatggagtggagacatatgtcaagtaccagccttgtgcctggggccagccccagtgtccccaaagcatcatgtaccgccgcttcctccgccctcgctaccgtgtggcctacaagacagtgaccgacatggagtggaggtgctgtcagggttatgggggcgatgactgtgctgagagtcccgctccagcgctggggcctgcgtcttccacaccacggcccctggcccggcctgcccgccccaacctctctggctccagtgcaggcagccccctcagtggactggggggagaaggtcctggggagtcagagaaggtgcagcagctggaggaacaggtgcagagcctgaccaaggagctgcaaggcctgcggggcgtcctgcaaggactgagcgggcgcctggcagaggatgtgcagagggctgtggagacggccttcaacgggaggcagcagccagctgacgcggctgcccgccctggggtgcatgaaaccctcaatgagatccagcaccagctgcagctcctggacacccgcgtctccacccacgaccaggagctgggtcacctcaacaaccatcatggcggcagcagcagcagtgggggcagcagggccccagccccagcctcagcccctccgggccccagtgaggagctgctgcggcagctggagcagcggttgcaggagtcctgctccgtgtgcctggccgggctagatggcttccgccggcagcagcaggaggacagggagcggctgcgagcgatggagaagctgctggcctcggtggaggagcggcaacggcacctcgcagggctggcggtgggccgcaggccccctcaggaatgctgctctccagagctgggccggcgactggcagagctggagcgcaggctggatgtcgtggccggctcagtgacagtgctgagtgggcggcgaggcacagagctgggaggagccgcggggcagggaggccaccccccaggctacaccagcttggcctcccgcctgtctcgcctggaggaccgcttcaactccaccctgggcccttcggaggagcaggaggagagctggcctggggctcctggggggctgagccactggctgcctgctgcccggggccgactagagcagttgggggggctgctggccaatgtgagcggggagctgggggggcggttggatctgttggaggagcaggtggcaggggccatgcaggcatgcgggcagctctgctctggggcccctggggagcaggactctcaagtcagcgagatcctcagtgccttggagcgcagggtgctggacagtgaggggcagctgcggctggtgggctccggcctgcacacggtggaagcagcgggggaggcccggcaggccacgctggagggattacaagaggttgtgggccggctccaggatcgtgtggatgcccaggatgagacagctgcagagttcacactacggctgaatctcactgcggcccggctaggccaactggaggggctgctgcaggcccatggggatgagggctgtggggcctgtggcggagtccaagaggaactaggccgccttcgggatggtgtggagcgctgctcctgccccctgttgcctcctcggggtcctggggctggtccaggtgttgggggcccaagccgtgggcccctggacggcttcagcgtgtttgggggcagctcaggctcagccctgcaggccctgcaaggagagctctctgaggttattctcagcttcagctccctcaatgactcactgaatgagctccagaccactgtggagggccagggcgctgatctggctgacctgggggcaaccaaggaccgtatcatttctgagattaacaggctgcagcaggaggccacagagcatgctacagagagtgaagagcgcttccgaggcctagaggagggacaagcacaggccggccagtgccccagcttagaggggcgattgggccgtcttgagggtgtctgtgaacggttggacactgtggctgggggactgcagggcctgcgcgagggcctttccagacacgtggctgggctctgggctgggctccgggaaaccaacaccaccagccagatgcaggcagccctgctggagaagctggtcgggggacaggcgggcctgggcaggcggctgggtgcccttaacagctccctgcagctcctggaggaccgtctgcaccagctcagcctgaaggacctcactgggcctgcaggagaggctgggcccccagggcctcctgggctgcagggacccccaggccctgctggacctccaggatcaccaggcaaggacgggcaagagggccccatcgggccaccagctcaaggtgaacaggagtgggggggccagcagccctgtgcccaagtggatttcagngcngantgnccgtntgacaggcggccctgaaagatccgtcaagaggaggaaa

SEQ ID NO: 467032 - DNA, 2357 bp, Homo sapiens
gcagggaggaggaggccagggcccgccccacagccactctcgcgcctccgaacagccacaggggcaaagccctgtcacccccaggatccggtcatcagggaaagaggacagggagaccagaagagggccagctgggacgagggggcggacgcccaggaggcaacttctgagacgcagctcctgagaggggcagggaccaggcgcgggaggccagagggggcacagagaacaaaccccctcagaagtgaagaggagagcggaaggaaccgagaggggacggacaggagctgaggaggaaagaggaggggagaggggtcaggccaggcagccaaggagaagacgtgtggccgggggctatcagaaggaaactgggacggacgggccgggctcgggctgtcctgtggagcagcagcatccccggggccggcagaggcgccagtggctgggcgggatgagtctctgagggccactgtggagcgccccgccatggccccccgcaccctctggagctgctacctctgctgcctgctgacggcagctgcaggggccgccagctaccctcctcgaggtttcagcctctacacaggttccagtggggccctcagccccggggggccccaggcccagattgccccccggccagccagccgccacaggaactggtgtgcctacgtggtgacccggacagtgagctgtgtccttgaggatggagtggagacatatgtcaagtaccagccttgtgcctggggccagccccagtgtccccaaagcatcatgtaccgccgcttcctccgccctcgctaccgtgtggcctacaagacagtgaccgacatggagtggaggtgctgtcagggttatgggggcgatgactgtgctgagagtcccgctccagcgctggggcctgcgtcttccacaccacggcccctggcccggcctgcccgccccaacctctctggctccagtgcaggcagccccctcagtggactggggggagaaggtcctggggagtcagagaaggtgcagcagctggaggaacaggtgcagagcctgaccaaggagctgcaaggcctgcggggcgtcctgcaaggactgagcgggcgcctggcagaggatgtgcagagggctgtggagacggccttcaacgggaggcagcagccagctgacgcggctgcccgccctggggtgcatgaaaccctcaatgagatccagcaccagctgcagctcctggacacccgcgtctccacccacgaccaggagctgggtcacctcaacaaccatcatggcggcagcagcagcagtgggggcagcagggccccagccccagcctcagcccctccgggccccagtgaggagctgctgcggcagctggagcagcggttgcaggagtcctgctccgtgtgcctggccgggctagatggcttccgccggcagcagcaggaggacagggagcggctgcgagcgatggagaagctgctggcctcggtggaggagcggcaacggcacctcgcagggctggcggtgggccgcaggccccctcaggaatgctgctctccagagctgggccggcgactggcagagctggagcgcaggctggatgtcgtggccggctcagtgacagtgctgagtgggcggcgaggcacagagctgggaggagccgcggggcagggaggccaccccccaggctacaccagcttggcctcccgcctgtctcgcctggaggaccgcttcaactccaccctgggcccttcggaggagcaggaggagagctggcctggggctcctggggggctgagccactggctgcctgctgcccggggccgactagagcagttgggggggctgctggccaatgtgagcggggagctgggggggcggttggatctgttggaggagcaggtggcaggggccatgcaggcatgcgggcagctctgctctggggcccctggggagcaggactctcaagtcagcgagatcctcagtgccttggagcgcagggtgctggacagtgaggggcagctgcggctggtgggctccggcctgcacacggtggaagctgcggaggagccgatcctcgcaccctccgctccctccactggccctccaggtcgattccctgggctccaggctcccccgcgcgggcgccgcccaccgccatactaaacgatcgaggaataaagacacttggtttttctaaaaaaaactaaacgaaccgttctgctacggtacggggtcgggggctgccgggcgtgcacagggcacggggcgggagagacgacggcctccggagaggaccccgggttccgcactgcgttcgccgcctccgcccggctcggggcggctcggggttggctcaggca

SEQ ID NO: 467033 - DNA, 2570 bp, Homo sapiens
gcagggaggaggaggccagggcccgccccacagccactctcgcgcctccgaacagccacaggggcaaagccctgtcacccccaggatccggtcatcagggaaagaggacagggagaccagaagagggccagctgggacgagggggcggacgcccaggaggcaacttctgagacgcagctcctgagaggggcagggaccaggcgcgggaggccagagggggcacagagaacaaaccccctcagaagtgaagaggagagcggaaggaaccgagaggggacggacaggagctgaggaggaaagaggaggggagaggggtcaggccaggcagccaaggagaagacgtgtggccgggggctatcagaaggaaactgggacggacgggccgggctcgggctgtcctgtggagcagcagcatccccggggccggcagaggcgccagtggctgggcgggatgagtctctgagggccactgtggagcgccccgccatggccccccgcaccctctggagctgctacctctgctgcctgctgacggcagctgcaggggccgccagctaccctcctcgaggtttcagcctctacacaggttccagtggggccctcagccccggggggccccaggcccagattgccccccggccagccagccgccacaggaactggtgtgcctacgtggtgacccggacagtgagctgtgtccttgaggatggagtggagacatatgtcaagtaccagccttgtgcctggggccagccccagtgtccccaaagcatcatgtaccgccgcttcctccgccctcgctaccgtgtggcctacaagacagtgaccgacatggagtggaggtgctgtcagggttatgggggcgatgactgtgctgagagtcccgctccagcgctggggcctgcgtcttccacaccacggcccctggcccggcctgcccgccccaacctctctggctccagtgcaggcagccccctcagtggactggggggagaaggtcctggggagtcagagaaggtgcagcagctggaggaacaggtgcagagcctgaccaaggagctgcaaggcctgcggggcgtcctgcaaggactgagcgggcgcctggcagaggatgtgcagagggctgtggagacggccttcaacgggaggcagcagccagctgacgcggctgcccgccctggggtgcatgaaaccctcaatgagatccagcaccagctgcagctcctggacacccgcgtctccacccacgaccaggagctgggtcacctcaacaaccatcatggcggcagcagcagcagtgggggcagcagggccccagccccagcctcagcccctccgggccccagtgaggagctgctgcggcagctggagcagcggttgcaggagtcctgctccgtgtgcctggccgggctagatggcttccgccggcagcagcaggaggacagggagcggctgcgagcgatggagaagctgctggcctcggtggaggagcggcaacggcacctcgcagggctggcggtgggccgcaggccccctcaggaatgctgctctccagagctgggccggcgactggcagagctggagcgcaggctggatgtcgtggccggctcagtgacagtgctgagtgggcggcgaggcacagagctgggaggagccgcggggcagggaggccaccccccaggctacaccagcttggcctcccgcctgtctcgcctggaggaccgcttcaactccaccctgggcccttcggaggagcaggaggagagctggcctggggctcctggggggctgagccactggctgcctgctgcccggggccgactagagcagttgggggggctgctggccaatgtgagcggggagctgggggggcggttggatctgttggaggagcaggtggcaggggccatgcaggcatgcgggcagctctgctctggggcccctggggagcaggactctcaagtcagcgagatcctcagtgccttggagcgcagggtgctggacagtgaggggcagctgcggctggtgggctccggcctgcacacggtggaagcagcgggggaggcccggcaggccacgctggagggattacaagaggttgtgggccggctccaggatcgtgtggatgcccaggatgagacagctgcagagttcacactacggctgaatctcactgcggcccggctaggccaactggaggggctgctgcaggcccatggggatgagggctgtggggcctgtggcggagtccaagaggaactaggccgccttcgggatggtgtggagcgctgctcctgccccctgttgcctcctcggggtcctggggctggtccaggtgttgggggcccaagccgtgggcccctggacggcttcagcgtgtttgggggcagctcaggctcagccctgcaggccctgcaaggagagctctctgaggttattctcagcttcagctccctcaatgactcactgaatgagctccaggtcgattccctgggctccaggctcccccgcgcgggcgccgcccaccgccatactaaacgatcgaggaataaagacacttggtttttcta

SEQ ID NO: 467034 - DNA, 1466 bp, Homo sapiens
tgctgagtgacttagtgagagctgctttatttctcactgctccctttcctcttctcacaggtcctcaaggtgaacagggtgagtgcctttcatttgattctggagggagaagtgactaggggttggaggatagaggtcctcgggcagccctgggctggggatccagcaggggaagggggctggcactctgccctgagcatcccctttaacatccacccttcccactcaggagtggagggggcaccagcagcccctgtgccccaagtggcattttcagctgctctgagtttgccccggtctgaaccaggcacggtccccttcgacagagtcctgctcaatgatggaggctattatgatccagagacaggtagtcctgggaggggctgggttgaacggttggagaaatgggtgaggtgtgcagtgatatcttcccattcttgccttttccgacagtgtgaatcttcattctctgatttggggagaccccggctctttcttcatttattcattctcaggcagtggggagaagaagtagtcattcattcattcagcagatctttactggggcctgctcctgcccaggcactgttttaagtgctgggaatgcatagtgaacaaagcccccagttccctgccgctcacattccagtgaggtgaaaagacccagagggtccctcctcagtccaggagttctggtgcgctccccggagcttccctggcccccctgactgctatccttgtccccaggcgtgttcacagcgccactggctggacgctacttgctgagcgcggtgctgactgggcaccggcacgagaaagtggaggccgtgctgtcccgctccaaccagggcgtggcccgcgtagactccggtggctacgagcctgagggcctggagaataagccggtggccgagagccagcccagcccgggcaccctgggcgtcttcagcctcatcctgccgctgcaggccggggacacggtctgcgtcgacctggtcatggggcagctggcgcactcggaggagccgctcaccatcttcagcggggccctgctctatggggacccagagcttgaacacgcgtagactggggtcccgcccgacgtgtctacgtcggctgaagagacagcgggggcggcgggctcctggggtctcgcctgagacggggcacctagccctgggcgagcgccgcacccgggcccgcagcggcaccgcgcccagagcggcctctccccacgcccggggcgcgccggctcagggaggctcggggccgcccatgcagacttttggcctggcgcgatcccccaagaacccctccagggccggcctgcggaggagccgatcctcgcaccctccgctccctccactggccctccaggtcgattccctgggctccaggctcccccgcgcgggcgccgcccaccgccatactaaacgatcgaggaataaagacacttggtttttcta

SEQ ID NO: 467035 - DNA, 4084 bp, Homo sapiens
gcagggaggaggaggccagggcccgccccacagccactctcgcgcctccgaacagccacaggggcaaagccctgtcacccccaggatccggtcatcagggaaagaggacagggagaccagaagagggccagctgggacgagggggcggacgcccaggaggcaacttctgagacgcagctcctgagaggggcagggaccaggcgcgggaggccagagggggcacagagaacaaaccccctcagaagtgaagaggagagcggaaggaaccgagaggggacggacaggagctgaggaggaaagaggaggggagaggggtcaggccaggcagccaaggagaagacgtgtggccgggggctatcagaaggaaactgggacggacgggccgggctcgggctgtcctgtggagcagcagcatccccggggccggcagaggcgccagtggctgggcgggatgagtctctgagggccactgtggagcgccccgccatggccccccgcaccctctggagctgctacctctgctgcctgctgacggcagctgcaggggccgccagctaccctcctcgaggtttcagcctctacacaggttccagtggggccctcagccccggggggccccaggcccagattgccccccggccagccagccgccacaggaactggtgtgcctacgtggtgacccggacagtgagctgtgtccttgaggatggagtggagacatatgtcaagtaccagccttgtgcctggggccagccccagtgtccccaaagcatcatgtaccgccgcttcctccgccctcgctaccgtgtggcctacaagacagtgaccgacatggagtggaggtgctgtcagggttatgggggcgatgactgtgctgagagtcccgctccagcgctggggcctgcgtcttccacaccacggcccctggcccggcctgcccgccccaacctctctggctccagtgcaggcagccccctcagtggactggggggagaaggtcctggggagtcagagaaggtgcagcagctggaggaacaggtgcagagcctgaccaaggagctgcaaggcctgcggggcgtcctgcaaggactgagcgggcgcctggcagaggatgtgcagagggctgtggagacggccttcaacgggaggcagcagccagctgacgcggctgcccgccctggggtgcatgaaaccctcaatgagatccagcaccagctgcagctcctggacacccgcgtctccacccacgaccaggagctgggtcacctcaacaaccatcatggcggcagcagcagcagtgggggcagcagggccccagccccagcctcagcccctccgggccccagtgaggagctgctgcggcagctggagcagcggttgcaggagtcctgctccgtgtgcctggccgggctagatggcttccgccggcagcagcaggaggacagggagcggctgcgagcgatggagaagctgctggcctcggtggaggagcggcaacggcacctcgcagggctggcggtgggccgcaggccccctcaggaatgctgctctccagagctgggccggcgactggcagagctggagcgcaggctggatgtcgtggccggctcagtgacagtgctgagtgggcggcgaggcacagagctgggaggagccgcggggcagggaggccaccccccaggctacaccagcttggcctcccgcctgtctcgcctggaggaccgcttcaactccaccctgggcccttcggaggagcaggaggagagctggcctggggctcctggggggctgagccactggctgcctgctgcccggggccgactagagcagttgggggggctgctggccaatgtgagcggggagctgggggggcggttggatctgttggaggagcaggtggcaggggccatgcaggcatgcgggcagctctgctctggggcccctggggagcaggactctcaagtcagcgagatcctcagtgccttggagcgcagggtgctggacagtgaggggcagctgcggctggtgggctccggcctgcacacggtggaagcagcgggggaggcccggcaggccacgctggagggattacaagaggttgtgggccggctccaggatcgtgtggatgcccaggatgagacagctgcagagttcacactacggctgaatctcactgcggcccggctaggccaactggaggggctgctgcaggcccatggggatgagggctgtggggcctgtggcggagtccaagaggaactaggccgccttcgggatggtgtggagcgctgctcctgccccctgttgcctcctcggggtcctggggctggtccaggtgttgggggcccaagccgtgggcccctggacggcttcagcgtgtttgggggcagctcaggctcagccctgcaggccctgcaaggagagctctctgaggttattctcagcttcagctccctcaatgactcactgaatgagctccagaccactgtggagggccagggcgctgatctggctgacctgggggcaaccaaggaccgtatcatttctgagattaacaggctgcagcaggaggccacagagcatgctacagagagtgaagagcgcttccgaggcctagaggagggacaagcacaggccggccagtgccccagcttagaggggcgattgggccgtcttgagggtgtctgtgaacggttggacactgtggctgggggactgcagggcctgcgcgagggcctttccagacacgtggctgggctctgggctgggctccgggaaaccaacaccaccagccagatgcaggcagccctgctggagaagctggtcgggggacaggcgggcctgggcaggcggctgggtgcccttaacagctccctgcagctcctggaggaccgtctgcaccagctcagcctgaaggacctcactgggcctgcaggagaggctgggcccccagggcctcctgggctgcagggacccccaggccctgctggacctccaggatcaccaggcaaggacgggcaagagggccccatcgggccaccaggtcctcaaggtgaacaggaggagtggagggggcaccagcagcccctgtgccccaagtggcattttcagctgctctgagtttgccccggtctgaaccaggcacggtccccttcgacagagtcctgctcaatgatggaggctattatgatccagagacaggcgtgttcacagcgccactggctggacgctacttgctgagcgcggtgctgactgggcaccggcacgagaaagtggaggccgtgctgtcccgctccaaccagggcgtggcccgcgtagactccggtggctacgagcctgagggcctggagaataagccggtggccgagagccagcccagcccgggcaccctgggcgtcttcagcctcatcctgccgctgcaggccggggacacggtctgcgtcgacctggtcatggggcagctggcgcactcggaggagccgctcaccatcttcagcggggccctgctctatggggacccagagcttgaacacgcgtagactggggtcccgcccgacgtgtctacgtcggctgaagagacagcgggggcggcgggctcctggggtctcgcctgagacggggcacctagccctgggcgagcgccgcacccgggcccgcagcggcaccgcgcccagagcggcctctccccacgcccggggcgcgccggctcagggaggctcggggccgcccatgcagacttttggcctggcgcgatcccccaagaacccctccagggccggcctgcggaggagccgatcctcgcaccctccgctccctccactggccctccaggtcgattccctgggctccaggctcccccgcgcgggcgccgcccaccgccatactaaacgatcgaggaataaagacacttggtttttctaaaaaaaactaaacgaaccgttctgctacggtacggggtcgggggctgccgggcgtgcacagggcacggggcgggagagacgacggcctccggagaggaccccgggttccgcactgcgttcgccgcctccgcccggctcggggcggctcggggttggctcaggca

SEQ ID NO: 467036 - DNA, 3443 bp, Homo sapiens
gcagggaggaggaggccagggcccgccccacagccactctcgcgcctccgaacagccacaggggcaaagccctgtcacccccaggatccggtcatcagggaaagaggacagggagaccagaagagggccagctgggacgagggggcggacgcccaggaggcaacttctgagacgcagctcctgagaggggcagggaccaggcgcgggaggccagagggggcacagagaacaaaccccctcagaagtgaagaggagagcggaaggaaccgagaggggacggacaggagctgaggaggaaagaggaggggagaggggtcaggccaggcagccaaggagaagacgtgtggccgggggctatcagaaggaaactgggacggacgggccgggctcgggctgtcctgtggagcagcagcatccccggggcctgcgtcttccacaccacggcccctggcccggcctgcccgccccaacctctctggctccagtgcaggcagccccctcagtggactggggggagaaggtcctggggagtcagagaaggtgcagcagctggaggaacaggtgcagagcctgaccaaggagctgcaaggcctgcggggcgtcctgcaaggactgagcgggcgcctggcagaggatgtgcagagggctgtggagacggccttcaacgggaggcagcagccagctgacgcggctgcccgccctggggtgcatgaaaccctcaatgagatccagcaccagctgcagctcctggacacccgcgtctccacccacgaccaggagctgggtcacctcaacaaccatcatggcggcagcagcagcagtgggggcagcagggccccagccccagcctcagcccctccgggccccagtgaggagctgctgcggcagctggagcagcggttgcaggagtcctgctccgtgtgcctggccgggctagatggcttccgccggcagcagcaggaggacagggagcggctgcgagcgatggagaagctgctggcctcggtggaggagcggcaacggcacctcgcagggctggcggtgggccgcaggccccctcaggaatgctgctctccagagctgggccggcgactggcagagctggagcgcaggctggatgtcgtggccggctcagtgacagtgctgagtgggcggcgaggcacagagctgggaggagccgcggggcagggaggccaccccccaggctacaccagcttggcctcccgcctgtctcgcctggaggaccgcttcaactccaccctgggcccttcggaggagcaggaggagagctggcctggggctcctggggggctgagccactggctgcctgctgcccggggccgactagagcagttgggggggctgctggccaatgtgagcggggagctgggggggcggttggatctgttggaggagcaggtggcaggggccatgcaggcatgcgggcagctctgctctggggcccctggggagcaggactctcaagtcagcgagatcctcagtgccttggagcgcagggtgctggacagtgaggggcagctgcggctggtgggctccggcctgcacacggtggaagcagcgggggaggcccggcaggccacgctggagggattacaagaggttgtgggccggctccaggatcgtgtggatgcccaggatgagacagctgcagagttcacactacggctgaatctcactgcggcccggctaggccaactggaggggctgctgcaggcccatggggatgagggctgtggggcctgtggcggagtccaagaggaactaggccgccttcgggatggtgtggagcgctgctcctgccccctgttgcctcctcggggtcctggggctggtccaggtgttgggggcccaagccgtgggcccctggacggcttcagcgtgtttgggggcagctcaggctcagccctgcaggccctgcaaggagagctctctgaggttattctcagcttcagctccctcaatgactcactgaatgagctccagaccactgtggagggccagggcgctgatctggctgacctgggggcaaccaaggaccgtatcatttctgagattaacaggctgcagcaggaggccacagagcatgctacagagagtgaagagcgcttccgaggcctagaggagggacaagcacaggccggccagtgccccagcttagaggggcgattgggccgtcttgagggtgtctgtgaacggttggacactgtggctgggggactgcagggcctgcgcgagggcctttccagacacgtggctgggctctgggctgggctccgggaaaccaacaccaccagccagatgcaggcagccctgctggagaagctggtcgggggacaggcgggcctgggcaggcggctgggtgcccttaacagctccctgcagctcctggaggaccgtctgcaccagctcagcctgaaggacctcactgggcctgcaggagaggctgggcccccagggcctcctgggctgcagggacccccaggccctgctggacctccaggatcaccaggcaaggacgggcaagagggccccatcgggccaccaggtcctcaaggtgaacaggaggagtggagggggcaccagcagcccctgtgccccaagtggcattttcagctgctctgagtttgccccggtctgaaccaggcacggtccccttcgacagagtcctgctcaatgatggaggctattatgatccagagacaggcgtgttcacagcgccactggctggacgctacttgctgagcgcggtgctgactgggcaccggcacgagaaagtggaggccgtgctgtcccgctccaaccagggcgtggcccgcgtagactccggtggctacgagcctgagggcctggagaataagccggtggccgagagccagcccagcccgggcaccctgggcgtcttcagcctcatcctgccgctgcaggccggggacacggtctgcgtcgacctggtcatggggcagctggcgcactcggaggagccgctcaccatcttcagcggggccctgctctatggggacccagagcttgaacacgcgtagactggggtcccgcccgacgtgtctacgtcggctgaagagacagcgggggcggcgggctcctggggtctcgcctgagacggggcacctagccctgggcgagcgccgcacccgggcccgcagcggcaccgcgcccagagcggcctctccccacgcccggggcgcgccggctcagggaggctcggggccgcccatgcagacttttggcctggcgcgatcccccaagaacccctccagggccggcctgcggaggagccgatcctcgcaccctccgctccctccactggccctccaggtcgattccctgggctccaggctcccccgcgcgggcgccgcccaccgccatactaaacgatcgaggaataaagacacttggtttttcta

SEQ ID NO: 467037 - DNA, 1035 bp, Homo sapiens
  misc_feature (939)..(940): n is a, c, g, or t
  misc_feature (942)..(942): n is a, c, g, or t
  misc_feature (948)..(948): n is a, c, g, or t
  misc_feature (959)..(959): n is a, c, g, or t
  misc_feature (973)..(974): n is a, c, g, or t
  misc_feature (1014)..(1014): n is a, c, g, or t
gcagggaggaggaggccagggcccgccccacagccactctcgcgcctccgaacagccacaggggcaaagccctgtcacccccaggatccggtcatcagggaaagaggacagggagaccagaagagggccagctgggacgagggggcggacgcccaggaggcaacttctgagacgcagctcctgagaggggcagggaccaggcgcgggaggccagagggggcacagagaacaaaccccctcagaagtgaagaggagagcggaaggaaccgagaggggacggacaggagctgaggaggaaagaggaggggagaggggtcaggccaggcagccaaggagaagacgtgtggccgggggctatcagaaggaaactgggacggacgggccgggctcgggctgtcctgtggagcagcagcatccccggggccggcagaggcgccagtggctgggcgggatgagtctctgagggccactgtggagcgccccgccatggccccccgcaccctctggagctgctacctctgctgcctgctgacggcagctgcaggggccgccagctaccctcctcgaggtttcagcctctacacaggttccagtggggccctcagccccggggggccccaggcccagattgccccccggccagccagccgccacaggaactggtgtgcctacgtggtgacccggacagtgagctgtgtccttgaggatggagtggagacatatgtcaagtaccagccttgtgcctggggccagccccagtgtccccaaagcatcatgtaccgccgcttcctccgccctcgctaccgtgtggcctacaagacagtgaccgacatggagtggaggtgctgtcagggttatgggggcgatgactgtgctgagagtcccgctccagcgctggggcctgcgtcttccacaccacggcccctggcccggcctggnngngcaagntgtgtgggtgnaattgcaggagggnntgaattgactggggggaaaagtgtttgaatgaaagaagtngagagtggaagagaatggaag

SEQ ID NO: 467038 - DNA, 2673 bp, Homo sapiens
gcagggaggaggaggccagggcccgccccacagccactctcgcgcctccgaacagccacaggggcaaagccctgtcacccccaggatccggtcatcagggaaagaggacagggagaccagaagagggccagctgggacgagggggcggacgcccaggaggcaacttctgagacgcagctcctgagaggggcagggaccaggcgcgggaggccagagggggcacagagaacaaaccccctcagaagtgaagaggagagcggaaggaaccgagaggggacggacaggagctgaggaggaaagaggaggggagaggggtcaggccaggcagccaaggagaagacgtgtggccgggggctatcagaaggaaactgggacggacgggccgggctcgggctgtcctgtggagcagcagcatccccggggccggcagaggcgccagtggctgggcgggatgagtctctgagggccactgtggagcgccccgccatggccccccgcaccctctggagctgctacctctgctgcctgctgacggcagctgcaggggccgccagctaccctcctcgaggtttcagcctctacacaggttccagtggggccctcagccccggggggccccaggcccagattgccccccggccagccagccgccacaggaactggtgtgcctacgtggtgacccggacagtgagctgtgtccttgaggatggagtggagacatatgtcaagtaccagccttgtgcctggggccagccccagtgtccccaaagcatcatgtaccgccgcttcctccgccctcgctaccgtgtggcctacaagacagtgaccgacatggagtggaggtgctgtcagggttatgggggcgatgactgtgctgagagtcccgctccagcgctggggcctgcgtcttccacaccacggcccctggcccggcctgcccgccccaacctctctggctccagtgcaggcagccccctcagtggactggggggagaaggtcctggggagtcagagaaggtgcagcagctggaggaacaggtgcagagcctgaccaaggagctgcaaggcctgcggggcgtcctgcaaggactgagcgggcgcctggcagaggatgtgcagagggctgtggagacggccttcaacgggaggcagcagccagctgacgcggctgcccgccctggggtgcatgaaaccctcaatgagatccagcaccagctgcagctcctggacacccgcgtctccacccacgaccaggagctgggtcacctcaacaaccatcatggctgacctgggggcaaccaaggaccgtatcatttctgagattaacaggctgcagcaggaggccacagagcatgctacagagagtgaagagcgcttccgaggcctagaggagggacaagcacaggccggccagtgccccagcttagaggggcgattgggccgtcttgagggtgtctgtgaacggttggacactgtggctgggggactgcagggcctgcgcgagggcctttccagacacgtggctgggctctgggctgggctccgggaaaccaacaccaccagccagatgcaggcagccctgctggagaagctggtcgggggacaggcgggcctgggcaggcggctgggtgcccttaacagctccctgcagctcctggaggaccgtctgcaccagctcagcctgaaggacctcactgggcctgcaggagaggctgggcccccagggcctcctgggctgcagggacccccaggccctgctggacctccaggatcaccaggcaaggacgggcaagagggccccatcgggccaccagaggagtggagggggcaccagcagcccctgtgccccaagtggcattttcagctgctctgagtttgccccggtctgaaccaggcacggtccccttcgacagagtcctgctcaatgatggaggctattatgatccagagacaggcgtgttcacagcgccactggctggacgctacttgctgagcgcggtgctgactgggcaccggcacgagaaagtggaggccgtgctgtcccgctccaaccagggcgtggcccgcgtagactccggtggctacgagcctgagggcctggagaataagccggtggccgagagccagcccagcccgggcaccctgggcgtcttcagcctcatcctgccgctgcaggccggggacacggtctgcgtcgacctggtcatggggcagctggcgcactcggaggagccgctcaccatcttcagcggggccctgctctatggggacccagagcttgaacacgcgtagactggggtcccgcccgacgtgtctacgtcggctgaagagacagcgggggcggcgggctcctggggtctcgcctgagacggggcacctagccctgggcgagcgccgcacccgggcccgcagcggcaccgcgcccagagcggcctctccccacgcccggggcgcgccggctcagggaggctcggggccgcccatgcagacttttggcctggcgcgatcccccaagaacccctccagggccggcctgcggaggagccgatcctcgcaccctccgctccctccactggccctccaggtcgattccctgggctccaggctcccccgcgcgggcgccgcccaccgccatactaaacgatcgaggaataaagacacttggtttttcta

SEQ ID NO: 467039 - DNA, 1610 bp, Homo sapiens
ggcctggtggcgaattcggcacgagggtcacggcggatcttattgtctacgatgtgacgatccgtggagaaagtagcagatgggcagattttcatttggggagaatgagggagaaaagaacgggcattccgagccaagagcactgcatgagcaaggagttgggaggttgcttacttgttgaacatatttgttgcgtatttgcatatttgctaaacaggtagtgttaggagctaatccatgaaaggttttcgtaacaccccagggcctgtaaggtttggtgtttccctttcaagatgccactttcagactttattctggctctgaaggacaatccctactttggggctggatttgggctggtgggtgtgggcacagccctggccctggcccggaagggtgtccaactgggcctggtggcattccggcgccattacatgatcacactggaagtccctgctcgagacaggagctatgcctggttgcttagctggctcacccgccacagtacccgtactcagcacctcagtgtcgagacttcgtaccttcagcatgagagtggccgcatttccactaagtttgaatttgtccccagccctggaaaccattttatctggtatcgggggaaatggattcgggtagaacgaagtcgagagatgcagatgatagacttgcagacggggactccttgggaatctgtcaccttcacggccctgggcactgaccgaaaggttttcttcaacatcctggaggaagctcgagagctagccttgcagcaggaggaagggaagaccgtgatgtacacagctgtgggctctgaatggcgtccctttggctatccacgccgccggcgaccactgaattctgtggttctacaacagggtctggctgaccgaattgtcagagacgtccaggaattcatcgataaccccaagtggtacactgacagaggcattccttacagacgtggctacctgctttatgggccccctggttgcggaaagagcagttttatcacagccctggctggggaactggagcacagcatctgcctgctgagcctcacggactccagcctctctgatgaccgactcaaccacctgctgagcgtggccccgcagcagagcctggtactcctggaggatgtggatgctgcttttctcagtcgagacttggctgtggagaacccagtaaagtaccaaggcctaggtcgcctcaccttcagtggactgctcaatgccttggatggtgtggcttccaccgaggcccgcatcgtgttcatgaccaccaaccacgttgacaggctggaccctgccctgatacgcccggggcgagtggacctgaaggagtacgtgggctactgctcacactggcagctgacccagatgttccagaggttctatccagggcaggcaccttccttagctgagaactttgcagaacatgtccttcgagctacaaaccagatcagtcctgcccaggtgcagggctacttcatgctgtataaaaatgaccctgtaggggcaattcacaatgctgagtctctgaggaggtgatcaggctgggctcagctcagctctcctcctctagctcaataaacatctgccacacta

SEQ ID NO: 467040 - DNA, 1493 bp, Homo sapiens
gccgaacgcagcttccccaaggtgcaggcgcggtgaaaccatcgagacggagggccagagagtcacggcggtgagagggctgagtgacgggttaccccaaaccatgtggctggaggcgcgagctggggttttcgtaacaccccagggcctgtaaggtttggtgtttccctttcaagatgccactttcagactttattctggctctgaaggacaatccctactttggggctggatttgggctggtgggtgtgggcacagccctggccctggcccggaagggtgtccaactgggcctggtggcattccggcgccattacatgatcacactggaagtccctgctcgagacaggagctatgcctggttgcttagctggctcacccgccacagtacccgtactcagcacctcagtgtcgagacttcgtaccttcagcatgagagtggccgcatttccactaagtttgaatttgtccccagccctggaaaccattttatctggtatcgggggaaatggattcgggtagaacgaagtcgagagatgcagatgatagacttgcagacggggactccttgggaatctgtcaccttcacggccctgggcactgaccgaaaggttttcttcaacatcctggaggaagctcgagagctagccttgcagcaggaggaagggaagaccgtgatgtacacagctgtgggctctgaatggcgtccctttggctatccacgccgccggcgaccactgaattctgtggttctacaacagggtctggctgaccgaattgtcagagacgtccaggaattcatcgataaccccaagtggtacactgacagaggcattccttacagacgtggctacctgctttatgggccccctggttgcggaaagagcagttttatcacagccctggctggggaactggagcacagcatctgcctgctgagcctcacggactccagcctctctgatgaccgactcaaccacctgctgagcgtggccccgcagcagagcctggtactcctggaggatgtggatgctgcttttctcagtcgagacttggctgtggagaacccagtaaagtaccaaggcctaggtcgcctcaccttcagtggactgctcaatgccttggatggtgtggcttccaccgaggcccgcatcgtgttcatgaccaccaaccacgttgacaggctggaccctgccctgatacgcccggggcgagtggacctgaaggagtacgtgggctactgctcacactggcagctgacccagatgttccagaggttctatccagggcaggcaccttccttagctgagaactttgcagaacatgtccttcgagctacaaaccagatcagtcctgcccaggtgcagggctacttcatgctgtataaaaatgaccctgtaggggcaattcacaatgctgagtctctgaggaggtgatcaggctgggctcagctcagctctcctcctctagctcaataaacatctgccacacta

SEQ ID NO: 467041 - DNA, 1436 bp, Homo sapiens
gccgaacgcagcttccccaaggtgcaggcgcggtgaaaccatcgagacggagggccagagagtcacggcggttttcgtaacaccccagggcctgtaaggtttggtgtttccctttcaagatgccactttcagactttattctggctctgaaggacaatccctactttggggctggatttgggctggtgggtgtgggcacagccctggccctggcccggaagggtgtccaactgggcctggtggcattccggcgccattacatgatcacactggaagtccctgctcgagacaggagctatgcctggttgcttagctggctcacccgccacagtacccgtactcagcacctcagtgtcgagacttcgtaccttcagcatgagagtggccgcatttccactaagtttgaatttgtccccagccctggaaaccattttatctggtatcgggggaaatggattcgggtagaacgaagtcgagagatgcagatgatagacttgcagacggggactccttgggaatctgtcaccttcacggccctgggcactgaccgaaaggttttcttcaacatcctggaggaagctcgagagctagccttgcagcaggaggaagggaagaccgtgatgtacacagctgtgggctctgaatggcgtccctttggctatccacgccgccggcgaccactgaattctgtggttctacaacagggtctggctgaccgaattgtcagagacgtccaggaattcatcgataaccccaagtggtacactgacagaggcattccttacagacgtggctacctgctttatgggccccctggttgcggaaagagcagttttatcacagccctggctggggaactggagcacagcatctgcctgctgagcctcacggactccagcctctctgatgaccgactcaaccacctgctgagcgtggccccgcagcagagcctggtactcctggaggatgtggatgctgcttttctcagtcgagacttggctgtggagaacccagtaaagtaccaaggcctaggtcgcctcaccttcagtggactgctcaatgccttggatggtgtggcttccaccgaggcccgcatcgtgttcatgaccaccaaccacgttgacaggctggaccctgccctgatacgcccggggcgagtggacctgaaggagtacgtgggctactgctcacactggcagctgacccagatgttccagaggttctatccagggcaggcaccttccttagctgagaactttgcagaacatgtccttcgagctacaaaccagatcagtcctgcccaggtgcagggctacttcatgctgtataaaaatgaccctgtaggggcaattcacaatgctgagtctctgaggaggtgatcaggctgggctcagctcagctctcctcctctagctcaataaacatctgccacacta

SEQ ID NO: 467042 - DNA, 1551 bp, Homo sapiens
gccgaacgcagcttccccaaggtgcaggcgcggtgaaaccatcgagacggagggccagagagtcacggcggggtctgctgggagccagccattgaaggtgctggagcagagagagatatggtattggagctgatccctatgatgaaagatctggacccttgtgtagatgttccgtgaagcaggaggttttcgtaacaccccagggcctgtaaggtttggtgtttccctttcaagatgccactttcagactttattctggctctgaaggacaatccctactttggggctggatttgggctggtgggtgtgggcacagccctggccctggcccggaagggtgtccaactgggcctggtggcattccggcgccattacatgatcacactggaagtccctgctcgagacaggagctatgcctggttgcttagctggctcacccgccacagtacccgtactcagcacctcagtgtcgagacttcgtaccttcagcatgagagtggccgcatttccactaagtttgaatttgtccccagccctggaaaccattttatctggtatcgggggaaatggattcgggtagaacgaagtcgagagatgcagatgatagacttgcagacggggactccttgggaatctgtcaccttcacggccctgggcactgaccgaaaggttttcttcaacatcctggaggaagctcgagagctagccttgcagcaggaggaagggaagaccgtgatgtacacagctgtgggctctgaatggcgtccctttggctatccacgccgccggcgaccactgaattctgtggttctacaacagggtctggctgaccgaattgtcagagacgtccaggaattcatcgataaccccaagtggtacactgacagaggcattccttacagacgtggctacctgctttatgggccccctggttgcggaaagagcagttttatcacagccctggctggggaactggagcacagcatctgcctgctgagcctcacggactccagcctctctgatgaccgactcaaccacctgctgagcgtggccccgcagcagagcctggtactcctggaggatgtggatgctgcttttctcagtcgagacttggctgtggagaacccagtaaagtaccaaggcctaggtcgcctcaccttcagtggactgctcaatgccttggatggtgtggcttccaccgaggcccgcatcgtgttcatgaccaccaaccacgttgacaggctggaccctgccctgatacgcccggggcgagtggacctgaaggagtacgtgggctactgctcacactggcagctgacccagatgttccagaggttctatccagggcaggcaccttccttagctgagaactttgcagaacatgtccttcgagctacaaaccagatcagtcctgcccaggtgcagggctacttcatgctgtataaaaatgaccctgtaggggcaattcacaatgctgagtctctgaggaggtgatcaggctgggctcagctcagctctcctcctctagctcaataaacatctgccacacta

SEQ ID NO: 467043 - DNA, 1531 bp, Homo sapiens
ggcctggtggcgaattcggcacgagggtcacggcggatcttattgtctacgatgtgacgatccgtggagaaagtagcagatgggcagattttcatttggggagaatgagggagaaaagaacgggcattccgagccaagagcactgcatgagcaaggagttgggaggttttcgtaacaccccagggcctgtaaggtttggtgtttccctttcaagatgccactttcagactttattctggctctgaaggacaatccctactttggggctggatttgggctggtgggtgtgggcacagccctggccctggcccggaagggtgtccaactgggcctggtggcattccggcgccattacatgatcacactggaagtccctgctcgagacaggagctatgcctggttgcttagctggctcacccgccacagtacccgtactcagcacctcagtgtcgagacttcgtaccttcagcatgagagtggccgcatttccactaagtttgaatttgtccccagccctggaaaccattttatctggtatcgggggaaatggattcgggtagaacgaagtcgagagatgcagatgatagacttgcagacggggactccttgggaatctgtcaccttcacggccctgggcactgaccgaaaggttttcttcaacatcctggaggaagctcgagagctagccttgcagcaggaggaagggaagaccgtgatgtacacagctgtgggctctgaatggcgtccctttggctatccacgccgccggcgaccactgaattctgtggttctacaacagggtctggctgaccgaattgtcagagacgtccaggaattcatcgataaccccaagtggtacactgacagaggcattccttacagacgtggctacctgctttatgggccccctggttgcggaaagagcagttttatcacagccctggctggggaactggagcacagcatctgcctgctgagcctcacggactccagcctctctgatgaccgactcaaccacctgctgagcgtggccccgcagcagagcctggtactcctggaggatgtggatgctgcttttctcagtcgagacttggctgtggagaacccagtaaagtaccaaggcctaggtcgcctcaccttcagtggactgctcaatgccttggatggtgtggcttccaccgaggcccgcatcgtgttcatgaccaccaaccacgttgacaggctggaccctgccctgatacgcccggggcgagtggacctgaaggagtacgtgggctactgctcacactggcagctgacccagatgttccagaggttctatccagggcaggcaccttccttagctgagaactttgcagaacatgtccttcgagctacaaaccagatcagtcctgcccaggtgcagggctacttcatgctgtataaaaatgaccctgtaggggcaattcacaatgctgagtctctgaggaggtgatcaggctgggctcagctcagctctcctcctctagctcaataaacatctgccacacta

SEQ ID NO: 467044 - DNA, 1607 bp, Homo sapiens
gccgaacgcagcttccccaaggtgcaggcgcggtgaaaccatcgagacggagggccagagagtcacggcggtgagagggctgagtgacgggttaccccaaaccatgtggctggaggcgcgagctggggttttcgtaacaccccagggcctgtaaggtttggtgtttccctttcaagatgccactttcagactttattctggctctgaaggacaatccctactttggggctggatttgggctggtgggtgtgggcacagccctggccctggcccggaagggtgtccaactgggcctggtggcattccggcgccattacatgatcacactggaagtccctgctcgagacaggagctatgcctggttgcttagctggctcacccgccacagtacccgtactcagcacctcagtgtcgagacttcgtaccttcagcatgagagtggccgcatttccactaagtttgaatttgtccccagccctggaaaccattttatctggtatcgggggaaatggattcgggtagaacgaagtcgagagatgcagatgatagacttgcagacggggactccttgggaatctgtcaccttcacggccctgggcactgaccgaaaggttttcttcaacatcctggaggaagctcgagagctagccttgcagcaggaggaagggaagaccgtgatgtacacagctgtgggctctgaatggcgtccctttggctatccacgccgccggcgaccactgaattctgtggttctacaacagggtctggctgaccgaattgtcagagacgtccaggaattcatcgataaccccaagtggtacactgacagaggcattccttacagacgtggctacctgctttatgggccccctggttgcggaaagagcagttttatcacagccctggctggggaactggagcacagcatctgcctgctgagcctcacggactccagcctctctgatgaccgactcaaccacctgctgagcgtggccccgcagcagagcctggtactcctggaggatgtggatgctgcttttctcagtcgagacttggctgtggagaacccagtaaagtaccaaggcctaggtcgcctcaccttcagtggactgctcaatgccttggatggtgtggcttccaccgaggcccgcatcgtgttcatgaccaccaaccacgttgacaggctggaccctgccctgatacgcccggggcgagtggacctgaaggagtacgtgggctactgctcacactggcagctgacccagatgttccagaggttctatccagggcaggcaccttccttagctgagaactttgcagaacatgtccttcgagctacaaaccagatcagtcctgcccaggtgcagggctacttcatgctgtataaaaatgaccctgtaggggcaattcacaatgctgagtctctgaggaggtgatcaggctgggctcagctcagctctcctcctctagctcaataaacatctgccacactaaagagacaagaccagaaacacacaccaagaaacagccgggggaaccatggtccggggggggcaaaaacagagcgctgacagaggggccacgcgcatggggcggtccgggagccg

SEQ ID NO: 467045 - DNA, 1823 bp, Homo sapiens
ggcctggtggcgaattcggcacgagggtcacggcggatcttattgtctacgatgtgacgatccgtggagaaagtagcagatgggcagattttcatttggggagaatgagggagaaaagaacgggcattccgagccaagagcactgcatgagcaaggagttgggaggttgcttacttgttgaacatatttgttgcgtatttgcatatttgctaaacaggtagtgttaggagctaatccatgaaaggttttcgtaacaccccagggcctgtaaggtttggtgtttccctttcaagatgccactttcagactttattctggctctgaaggacaatccctactttggggctggatttgggctggtgggtgtgggcacagccctggccctggcccggaagggtgtccaactgggcctggtggcattccggcgccattacatgatcacactggaagtccctgctcgagacaggagctatgcctggttgcttagctggctcacccgccacagtacccgtactcagcacctcagtgtcgagacttcgtaccttcagcatgagagtggccgcatttccactaagtttgaatttgtccccagccctggaaaccattttatctggtatcgggggaaatggattcgggtagaacgaagtcgagagatgcagatgatagacttgcagacggggactccttgggaatctgtcaccttcacggccctgggcactgaccgaaaggttttcttcaacatcctggaggaaggtgtgggatggcacaggcaggctttctagggacattgcagggatggggacatttgacatcagatgagcagtttggagaagtggaataagcaggccggggtgagcccatgggaacagggggccagaaggaagctgtttggcacagctccacctaattgaagaatcagccatggtgaagagaattattggctttatctcatcttctccttcccagctcgagagctagccttgcagcaggaggaagggaagaccgtgatgtacacagctgtgggctctgaatggcgtccctttggctatccacgccgccggcgaccactgaattctgtggttctacaacagggtctggctgaccgaattgtcagagacgtccaggaattcatcgataaccccaagtggtacactgacagaggcattccttacagacgtggctacctgctttatgggccccctggttgcggaaagagcagttttatcacagccctggctggggaactggagcacagcatctgcctgctgagcctcacggactccagcctctctgatgaccgactcaaccacctgctgagcgtggccccgcagcagagcctggtactcctggaggatgtggatgctgcttttctcagtcgagacttggctgtggagaacccagtaaagtaccaaggcctaggtcgcctcaccttcagtggactgctcaatgccttggatggtgtggcttccaccgaggcccgcatcgtgttcatgaccaccaaccacgttgacaggctggaccctgccctgatacgcccggggcgagtggacctgaaggagtacgtgggctactgctcacactggcagctgacccagatgttccagaggttctatccagggcaggcaccttccttagctgagaactttgcagaacatgtccttcgagctacaaaccagatcagtcctgcccaggtgcagggctacttcatgctgtataaaaatgaccctgtaggggcaattcacaatgctgagtctctgaggaggtgatcaggctgggctcagctcagctctcctcctctagctcaataaacatctgccacacta

SEQ ID NO: 467046 - DNA, 1696 bp, Homo sapiens
gccgaacgcagcttccccaaggtgcaggcgcggtgaaaccatcgagacggagggccagagagtcacggcggtgagagggctgagtgacgggttaccccaaaccatgtggctggaggcgcgagctggggttttcgtaacaccccagggcctgtaaggtttggtgtttccctttcaagatgccactttcagactttattctggctctgaaggacaatccctactttggggctggatttgggctggtgggtgtgggcacagccctggccctggcccggaagggtgtccaactgggcctggtggcattccggcgccattacatgatcacactggaagtccctgctcgagacaggagctatgcctggttgcttagctggctcacccgccacagtacccgtactcagcacctcagtgtcgagacttcgtaccttcagcatgagagtggccgcatttccactaagtttgaatttgtccccagccctggaaaccattttatctggtatcgggggaaatggattcgggtagaacgaagtcgagagatgcagatgatagacttgcagacggggactccttgggaatctgtcaccttcacggccctgggcactgaccgaaaggttttcttcaacatcctggaggaagctcgagagctagccttgcagcaggaggaagggaagaccgtgatgtacacagctgtgggctctgaatggcgtccctttggctatccacgccgccggcgaccactgaattctgtggttctacaacagggtctggctgaccgaattgtcagagacgtccaggaattcatcgataaccccaagtggtacactgacagaggcattccttacagacgtggctacctgctttatgggccccctggttgcggaaagagcagttttatcacagccctggctggggaactggagcacagcatctgcctgctgagcctcacggactccagcctctctgatgaccgactcaaccacctgctgagcgtggccccgcagcagagcctggtactcctggaggatgtggatgctgcttttctcagtcgagacttggctgtggagagtaagtgaggggttctggaggaagtggagtgggtaactgtggaacaggggaagaaagcagaaatccagagggctggtggaagatgcctgggttagtgacaagagcccacaagacacatggataagtaggggaacatagtggggcatgctaattttatgctgggctatgactactcatgcttccttatctttgccttcctccagacccagtaaagtaccaaggcctaggtcgcctcaccttcagtggactgctcaatgccttggatggtgtggcttccaccgaggcccgcatcgtgttcatgaccaccaaccacgttgacaggctggaccctgccctgatacgcccggggcgagtggacctgaaggagtacgtgggctactgctcacactggcagctgacccagatgttccagaggttctatccagggcaggcaccttccttagctgagaactttgcagaacatgtccttcgagctacaaaccagatcagtcctgcccaggtgcagggctacttcatgctgtataaaaatgaccctgtaggggcaattcacaatgctgagtctctgaggaggtgatcaggctgggctcagctcagctctcctcctctagctcaataaacatctgccacacta

SEQ ID NO: 467047 - DNA, 1804 bp, Homo sapiens
gccgaacgcagcttccccaaggtgcaggcgcggtgaaaccatcgagacggagggccagagagtcacggcggtgagagggctgagtgacgggttaccccaaaccatgtggctggaggcgcgagctggggttttcgtaacaccccagggcctgtaaggtttggtgtttccctttcaagatgccactttcagactttattctggctctgaaggacaatccctactttggggctggatttgggctggtgggtgtgggcacagccctggccctggcccggaagggtgtccaactgggcctggtggcattccggcgccattacatgatcacactggaagtccctgctcgagacaggagctatgcctggttgcttagctggctcacccgccacagtacccgtactcagcacctcagtgtcgagacttcgtaccttcagcatgagagtggccgcatttccactaagtttgaatttgtccccagccctggaaaccattttatctggtaaggtggggagctagggagggctgtgagagtagaaaagaatgatgggagctgggtttgacccattcactcactcagttttgatcgttcttattcaggtatcgggggaaatggattcgggtagaacgaagtcgagagatgcagatgatagacttgcagacggggactccttgggaatctgtcaccttcacggccctgggcactgaccgaaaggttttcttcaacatcctggaggaaggtgtgggatggcacaggcaggctttctagggacattgcagggatggggacatttgacatcagatgagcagtttggagaagtggaataagcaggccggggtgagcccatgggaacagggggccagaaggaagctgtttggcacagctccacctaattgaagaatcagccatggtgaagagaattattggctttatctcatcttctccttcccagctcgagagctagccttgcagcaggaggaagggaagaccgtgatgtacacagctgtgggctctgaatggcgtccctttggctatccacgccgccggcgaccactgaattctgtggttctacaacagggtctggctgaccgaattgtcagagacgtccaggaattcatcgataaccccaagtggtacactgacagaggcattccttacagacgtggctacctgctttatgggccccctggttgcggaaagagcagttttatcacagccctggctggggaactggagcacagcatctgcctgctgagcctcacggactccagcctctctgatgaccgactcaaccacctgctgagcgtggccccgcagcagagcctggtactcctggaggatgtggatgctgcttttctcagtcgagacttggctgtggagaacccagtaaagtaccaaggcctaggtcgcctcaccttcagtggactgctcaatgccttggatggtgtggcttccaccgaggcccgcatcgtgttcatgaccaccaaccacgttgacaggctggaccctgccctgatacgcccggggcgagtggacctgaaggagtacgtgggctactgctcacactggcagctgacccagatgttccagaggttctatccagggcaggcaccttccttagctgagaactttgcagaacatgtccttcgagctacaaaccagatcagtcctgcccaggtgcagggctacttcatgctgtataaaaatgaccctgtaggggcaattcacaatgctgagtctctgaggaggtgatcaggctgggctcagctcagctctcctcctctagctcaataaacatctgccacacta

SEQ ID NO: 467048 - DNA, 1384 bp, Homo sapiens
gccgaacgcagcttccccaaggtgcaggcgcggtgaaaccatcgagacggagggccagagagtcacggcggtgagagggctgagtgacgggttaccccaaaccatgtggctggaggcgcgagctggggttttcgtaacaccccagggcctgtaaggtttggtgtttccctttcaagatgccactttcagactttattctggctctgaaggacaatccctactttggggctggatttgggctggtgggtgtgggcacagccctggccctggcccggaagggtgtccaactgggcctggtggcattccggcgccattacatgatcacactggaagtccctgctcgagacaggagctatgcctggttgcttagctggctcacccgccacagtacccgtactcagcacctcagtgtcgagacttcgtaccttcagcatgagagtggccgcatttccactaagtttgaatttgtccccagccctggaaaccattttatctggtatcgggggaaatggattcgggtagaacgaagtcgagagatgcagatgatagacttgcagacggggactccttgggaatctgtcaccttcacggccctgggcactgaccgaaaggttttcttcaacatcctggaggaagctcgagagctagccttgcagcaggaggaagggaagaccgtgatgtacacagctgtgggctctgaatggcgtccctttggctatccacgccgccggcgaccactgaattctgtggttctacaacagggtctggctgaccgaattgtcagagacgtccaggaattcatcgataaccccaagtggtacactgacagaggcattccttacagacgtggctacctgctttatgggccccctggttgcggaaagagcagttttatcacagccctggctggggaactggagcacagcatctgcctgctgagcctcacggactccagcctctctgatgaccgactcaaccacctgctgagcgtggccccgcagcagagcctggtactcctggaggatgtggatgctgcttttctcagtcgagacttggctgtggagaacccagtaaagtaccaaggcctaggtcgcctcaccttcagtggactgctcaatgccttggatggtgtggcttccaccgaggcccgcatcgtgttcatgaccaccaaccacgttgacaggcaccttccttagctgagaactttgcagaacatgtccttcgagctacaaaccagatcagtcctgcccaggtgcagggctacttcatgctgtataaaaatgaccctgtaggggcaattcacaatgctgagtctctgaggaggtgatcaggctgggctcagctcagctctcctcctctagctcaataaacatctgccacacta

SEQ ID NO: 467049 - DNA, 1365 bp, Homo sapiens
gccgaacgcagcttccccaaggtgcaggcgcggtgaaaccatcgagacggagggccagagagtcacggcggtgagagggctgagtgacgggttaccccaaaccatgtggctggaggcgcgagctggggttttcgtaacaccccagggcctgtaaggtttggtgtttccctttcaagatgccactttcagactttattctggctctgaaggacaatccctactttggggctggatttgggctggtgggtgtgggcacagccctggccctggcccggaagggtgtccaactgggcctggtggcattccggcgccattacatgatcacactggaagtccctgctcgagacaggagctatgcctggttgcttagctggctcacccgccacagtacccgtactcagcacctcagtgtcgagacttcgtaccttcagcatgagagtggccgcatttccactaagtttgaatttgtccccagccctggaaaccattttatctggtatcgggggaaatggattcgggtagaacgaagtcgagagatgcagatgatagacttgcagacggggactccttgggaatctgtcaccttcacggccctgggcactgaccgaaaggttttcttcaacatcctggaggaagctcgagagctagccttgcagcaggaggaagggaagaccgtgatgtacacagctgtgggctctgaatggcgtccctttggctatccacgccgccggcgaccactgaattctgtggttctacaacagggtctggctgaccgaattgtcagagacgtccaggaattcatcgataaccccaagtggtacactgacagaggcattccttacagacgtggctacctgctttatgggccccctggttgcggaaagagcagttttatcacagccctggctggggaactggagcacagcatctgcctgctgagcctcacggactccagcctctctgatgaccgactcaaccacctgctgagcgtggccccgcagcagagcctggtactcctggaggatgtggatgctgcttttctcagtcgagacttggctgtggagaacccagtaaagtaccaaggcctaggtcgcctcaccttcagtgggctactgctcacactggcagctgacccagatgttccagaggttctatccagggcaggcaccttccttagctgagaactttgcagaacatgtccttcgagctacaaaccagatcagtcctgcccaggtgcagggctacttcatgctgtataaaaatgaccctgtaggggcaattcacaatgctgagtctctgaggaggtgatcaggctgggctcagctcagctctcctcctctagctcaataaacatctgccacacta

SEQ ID NO: 467050 - DNA, 1181 bp, Homo sapiens
gccgaacgcagcttccccaaggtgcaggcgcggtgaaaccatcgagacggagggccagagagtcacggcggtgagagggctgagtgacgggttaccccaaaccatgtggctggaggcgcgagctggggtgtgggcgaggttcaggagggggttcctgggtgtcgcggaggggccggggacgggagagctttgtctgtggccttccatgcataggtgttttggaattctggatcccagttctgaggctcagccgaggtcactgctgtcagctcacctccctgcatgccaggcgcagggcaaagtggccggggttcggggttggaggagaggtgtactagaaacaactttgctcttgtccctcaggatcttattgtctacgatgtgacgatccgtggagaaagtagcagatgggcagattttcatttggggagaatgagggagaaaagaacgggcattccgagccaagagcactgcatgagcaaggagttgggaggttgcttacttgttgaacatatttgttgcgtatttgcatatttgctaaacaggtagtgttaggagctaatccatgaaaggtaggtgggcgccgtattgtagagagccttgagtaccaggctgagtttatacccaattcaggggtctgctgggagccagccattgaaggtgctggagcagagagagatatggtattggagctgatccctatgatgaaagatctggacccttgtgtagatgttccgtgaagcaggaggtgaagacctattaaaatgccatttcaagaactacgattttaaagacagtttaggtgggaggtaataaaggtctaaacaagacgttaaatattggggacgtaagggggaggatatttgaaggacattactcataacaagacatagggttactgacaagtcaacggacgcttctcccttgctgactgcagccaatggacccctttttatcatagctggtcccagggaccacaaaaatcctgtccatccattaccctgatgtgaagcctgtttatatagctctttttggtttaaggcatctccagacatggtcctctggtaggaaacaggtatgagtagactaatgaaggacaaaatgggatgagggacctggagcctccacccttgcattccaataccacccttaccccacaaaaggagggtattgacccacac

SEQ ID NO: 467051 - DNA, 379 bp, Homo sapiens
tttccaggttgcctgctacctcctgccatcccatgctccatagcacagccctggctggggaactggagcacagcatctgcctgctgagcctcacggactccagcctctctgatgaccgactcaaccacctgctgagcgtggccccgcagcagagcctggtactcctggaggatgtggatgctgcttttctcagtcgagacttggctgtggagagtaagtgaggggttctggaggaagtggagtgggtaactgtggaacaggggaagaaagcagaaatccagagggctggtggaagatgcctgggttagtgacaagagcccacaagacacatggataagtaggggaacatagtggggcatgctaattttatgctgggcta

SEQ ID NO: 467052 - DNA, 895 bp, Homo sapiens
ggcctggtggcgaattcggcacgagggtcacggcggatcttattgtctacgatgtgacgatccgtggagaaagtagcagatgggcagattttcatttggggagaatgagggagaaaagaacgggcattccgagccaagagcactgcatgagcaaggagttgggaggttttcgtaacaccccagggcctgtaaggtttggtgtttccctttcaagatgccactttcagactttattctggctctgaaggacaatccctactttggggctggatttgggctggtgggtgtgggcacagccctggccctggcccggaagggtgtccaactgggcctggtggcattccggcgccattacatgatcacactggaagtccctgctcgagacaggagctatgcctggttgcttagctggctcacccgccacagtacccgtactcagcacctcagtgtcgagacttcgtaccttcagcatgagagtggccgcatttccactaagtttgaatttgtccccagccctggaaaccattttatctggtatcgggggaaatggattcgggtagaacgaagtcgagagatgcagatgatagacttgcagacggggactccttgggaatctgtcaccttcacggccctgggcactgaccgaaaggttttcttcaacatcctggaggaagctcgagagctagccttgcagcaggaggaagggaagaccgtgatgtacacagctgtgggctctgaatggcgtccctttggctatccacgccgccggcgaccactgaattctgtggttctacaacagggtctggctgaccgaattgtcagagacgtccaggaattcatcgataaccccaagtggtacactgacagaggtgagaagcagctggggtcttggctg

SEQ ID NO: 467053 - DNA, 984 bp, Homo sapiens
gccgaacgcagcttccccaaggtgcaggcgcggtgaaaccatcgagacggagggccagagagtcacggcggtgagagggctgagtgacgggttaccccaaaccatgtggctggaggcgcgagctgggctcgagagctagccttgcagcaggaggaagggaagaccgtgatgtacacagctgtgggctctgaatggcgtccctttggctatccacgccgccggcgaccactgaattctgtggttctacaacagggtctggctgaccgaattgtcagagacgtccaggaattcatcgataaccccaagtggtacactgacagaggcattccttacagacgtggctacctgctttatgggccccctggttgcggaaagagcagttttatcacagccctggctggggaactggagcacagcatctgcctgctgagcctcacggactccagcctctctgatgaccgactcaaccacctgctgagcgtggccccgcagcagagcctggtactcctggaggatgtggatgctgcttttctcagtcgagacttggctgtggagaacccagtaaagtaccaaggcctaggtcgcctcaccttcagtggactgctcaatgccttggatggtgtggcttccaccgaggcccgcatcgtgttcatgaccaccaaccacgttgacaggctggaccctgccctgatacgcccggggcgagtggacctgaaggagtacgtgggctactgctcacactggcagctgacccagatgttccagaggttctatccagggcaggcaccttccttagctgagaactttgcagaacatgtccttcgagctacaaaccagatcagtcctgcccaggtgcagggctacttcatgctgtataaaaatgaccctgtaggggcaattcacaatgctgagtctctgaggaggtgatcaggctgggctcagctcagctctcctcctctagctcaataaacatctgccacacta

SEQ ID NO: 467054 - DNA, 1566 bp, Homo sapiens
gccgaacgcagcttccccaaggtgcaggcgcggtgaaaccatcgagacggagggccagagagtcacggcggtgagagggctgagtgacgggttaccccaaaccatgtggctggaggcgcgagctggggttttcgtaacaccccagggcctgtaaggtttggtgtttccctttcaagatgccactttcagactttattctggctctgaaggacaatccctactttggggctggatttgggctggtgggtgtgggcacagccctggccctggcccggaagggtgtccaactgggcctggtggcattccggcgccattacatgatcacactggaagtccctgctcgagacaggagctatgcctggttgcttagctggctcacccgccacagtacccgtactcagcacctcagtgtcgagacttcgtaccttcagcatgagagtggccgcatttccactaagtttgaatttgtccccagccctggaaaccattttatctggtaaggtggggagctagggagggctgtgagagtagaaaagaatgatgggagctgggtttgacccattcactcactcagttttgatcgttcttattcaggtatcgggggaaatggattcgggtagaacgaagtcgagagatgcagatgatagacttgcagacggggactccttgggaatctgtcaccttcacggccctgggcactgaccgaaagctcgagagctagccttgcagcaggaggaagggaagaccgtgatgtacacagctgtgggctctgaatggcgtccctttggctatccacgccgccggcgaccactgaattctgtggttctacaacagggtctggctgaccgaattgtcagagacgtccaggaattcatcgataaccccaagtggtacactgacagaggcattccttacagacgtggctacctgctttatgggccccctggttgcggaaagagcagttttatcacagccctggctggggaactggagcacagcatctgcctgctgagcctcacggactccagcctctctgatgaccgactcaaccacctgctgagcgtggccccgcagcagagcctggtactcctggaggatgtggatgctgcttttctcagtcgagacttggctgtggagaacccagtaaagtaccaaggcctaggtcgcctcaccttcagtggactgctcaatgccttggatggtgtggcttccaccgaggcccgcatcgtgttcatgaccaccaaccacgttgacaggctggaccctgccctgatacgcccggggcgagtggacctgaaggagtacgtgggctactgctcacactggcagctgacccagatgttccagaggttctatccagggcaggcaccttccttagctgagaactttgcagaacatgtccttcgagctacaaaccagatcagtcctgcccaggtgcagggctacttcatgctgtataaaaatgaccctgtaggggcaattcacaatgctgagtctctgaggaggtgatcaggctgggctcagctcagctctcctcctctagctcaataaacatctgccacacta

SEQ ID NO: 467055 - DNA, 1585 bp, Homo sapiens
ggcctggtggcgaattcggcacgagggtcacggcggatcttattgtctacgatgtgacgatccgtggagaaagtagcagatgggcagattttcatttggggagaatgagggagaaaagaacgggcattccgagccaagagcactgcatgagcaaggagttgggaggttgcttacttgttgaacatatttgttgcgtatttgcatatttgctaaacaggtagtgttaggagctaatccatgaaaggttttcgtaacaccccagggcctgtaaggtttggtgtttccctttcaagatgccactttcagactttattctggctctgaaggacaatccctactttggggctggatttgggctggtgggtgtgggcacagccctggccctggcccggaagggtgtccaactgggcctggtggcattccggcgccattacatgatcacactggaagtccctgctcgagacaggagctatgcctggttgcttagctggctcacccgccacagtacccgtactcagcacctcagtgtcgagacttcgtaccttcagcatgagagtggccgcatttccactaagtttgaatttgtccccagccctggaaaccattttatctggtatcgggggaaatggattcgggtagaacgaagtcgagagatgcagatgatagacttgcagacggggactccttgggaatctgtcaccttcacggccctgggcactgaccgaaagctcgagagctagccttgcagcaggaggaagggaagaccgtgatgtacacagctgtgggctctgaatggcgtccctttggctatccacgccgccggcgaccactgaattctgtggttctacaacagggtctggctgaccgaattgtcagagacgtccaggaattcatcgataaccccaagtggtacactgacagaggcattccttacagacgtggctacctgctttatgggccccctggttgcggaaagagcagttttatcacagccctggctggggaactggagcacagcatctgcctgctgagcctcacggactccagcctctctgatgaccgactcaaccacctgctgagcgtggccccgcagcagagcctggtactcctggaggatgtggatgctgcttttctcagtcgagacttggctgtggagaacccagtaaagtaccaaggcctaggtcgcctcaccttcagtggactgctcaatgccttggatggtgtggcttccaccgaggcccgcatcgtgttcatgaccaccaaccacgttgacaggctggaccctgccctgatacgcccggggcgagtggacctgaaggagtacgtgggctactgctcacactggcagctgacccagatgttccagaggttctatccagggcaggcaccttccttagctgagaactttgcagaacatgtccttcgagctacaaaccagatcagtcctgcccaggtgcagggctacttcatgctgtataaaaatgaccctgtaggggcaattcacaatgctgagtctctgaggaggtgatcaggctgggctcagctcagctctcctcctctagctcaataaacatctgccacacta

SEQ ID NO: 467056 - DNA, 1591 bp, Homo sapiens
gccgaacgcagcttccccaaggtgcaggcgcggtgaaaccatcgagacggagggccagagagtcacggcggtgagagggctgagtgacgggttaccccaaaccatgtggctggaggcgcgagctggggttttcgtaacaccccagggcctgtaaggtttggtgtttccctttcaagatgccactttcagactttattctggctctgaaggacaatccctactttggggctggatttgggctggtgggtgtgggcacagccctggccctggcccggaagggtgtccaactgggcctggtggcattccggcgccattacatgatcacactggaagtccctgctcgagacaggagctatgcctggttgcttagctggctcacccgccacagtacccgtactcagcacctcagtgtcgagacttcgtaccttcagcatgagagtggccgcatttccactaagtttgaatttgtccccagccctggaaaccattttatctggtaaggtggggagctagggagggctgtgagagtagaaaagaatgatgggagctgggtttgacccattcactcactcagttttgatcgttcttattcaggtatcgggggaaatggattcgggtagaacgaagtcgagagatgcagatgatagacttgcagacggggactccttgggaatctgtcaccttcacggccctgggcactgaccgaaaggttttcttcaacatcctggaggaagctcgagagctagccttgcagcaggaggaagggaagaccgtgatgtacacagctgtgggctctgaatggcgtccctttggctatccacgccgccggcgaccactgaattctgtggttctacaacagggtctggctgaccgaattgtcagagacgtccaggaattcatcgataaccccaagtggtacactgacagaggcattccttacagacgtggctacctgctttatgggccccctggttgcggaaagagcagttttatcacagccctggctggggaactggagcacagcatctgcctgctgagcctcacggactccagcctctctgatgaccgactcaaccacctgctgagcgtggccccgcagcagagcctggtactcctggaggatgtggatgctgcttttctcagtcgagacttggctgtggagaacccagtaaagtaccaaggcctaggtcgcctcaccttcagtggactgctcaatgccttggatggtgtggcttccaccgaggcccgcatcgtgttcatgaccaccaaccacgttgacaggctggaccctgccctgatacgcccggggcgagtggacctgaaggagtacgtgggctactgctcacactggcagctgacccagatgttccagaggttctatccagggcaggcaccttccttagctgagaactttgcagaacatgtccttcgagctacaaaccagatcagtcctgcccaggtgcagggctacttcatgctgtataaaaatgaccctgtaggggcaattcacaatgctgagtctctgaggaggtgatcaggctgggctcagctcagctctcctcctctagctcaataaacatctgccacacta

SEQ ID NO: 467057 - DNA, 2061 bp, Homo sapiens
gccgaacgcagcttccccaaggtgcaggcgcggtgaaaccatcgagacggagggccagagagtcacggcggtgagagggctgagtgacgggttaccccaaaccatgtggctggaggcgcgagctggggtgtgggcgaggttcaggagggggttcctgggtgtcgcggaggggccggggacgggagagctttgtctgtggccttccatgcataggtgttttggaattctggatcccagttctgaggctcagccgaggtcactgctgtcagctcacctccctgcatgccaggcgcagggcaaagtggccggggttcggggttggaggagaggtgtactagaaacaactttgctcttgtccctcaggatcttattgtctacgatgtgacgatccgtggagaaagtagcagatgggcagattttcatttggggagaatgagggagttgcttacttgttgaacatatttgttgcgtatttgcatatttgctaaacaggtagtgttaggagctaatccatgaaaggtaggtgggcgccgtattgtagagagccttgagtaccaggctgagtttatacccaattcaggggtctgctgggagccagccattgaaggtgctggagcagagagagatatggtattggagctgatccctatgatgaaagatctggacccttgtgtagatgttccgtgaagcaggaggttttcgtaacaccccagggcctgtaaggtttggtgtttccctttcaagatgccactttcagactttattctggctctgaaggacaatccctactttggggctggatttgggctggtgggtgtgggcacagccctggccctggcccggaagggtgtccaactgggcctggtggcattccggcgccattacatgatcacactggaagtccctgctcgagacaggagctatgcctggttgcttagctggctcacccgccacagtacccgtactcagcacctcagtgtcgagacttcgtaccttcagcatgagagtggccgcatttccactaagtttgaatttgtccccagccctggaaaccattttatctggtatcgggggaaatggattcgggtagaacgaagtcgagagatgcagatgatagacttgcagacggggactccttgggaatctgtcaccttcacggccctgggcactgaccgaaaggttttcttcaacatcctggaggaagctcgagagctagccttgcagcaggaggaagggaagaccgtgatgtacacagctgtgggctctgaatggcgtccctttggctatccacgccgccggcgaccactgaattctgtggttctacaacagggtctggctgaccgaattgtcagagacgtccaggaattcatcgataaccccaagtggtacactgacagaggcattccttacagacgtggctacctgctttatgggccccctggttgcggaaagagcagttttatcacagccctggctggggaactggagcacagcatctgcctgctgagcctcacggactccagcctctctgatgaccgactcaaccacctgctgagcgtggccccgcagcagagcctggtactcctggaggatgtggatgctgcttttctcagtcgagacttggctgtggagaacccagtaaagtaccaaggcctaggtcgcctcaccttcagtggactgctcaatgccttggatggtgtggcttccaccgaggcccgcatcgtgttcatgaccaccaaccacgttgacaggctggaccctgccctgatacgcccggggcgagtggacctgaaggagtacgtgggctactgctcacactggcagctgacccagatgttccagaggttctatccagggcaggcaccttccttagctgagaactttgcagaacatgtccttcgagctacaaaccagatcagtcctgcccaggtgcagggctacttcatgctgtataaaaatgaccctgtaggggcaattcacaatgctgagtctctgaggaggtgatcaggctgggctcagctcagctctcctcctctagctcaataaacatctgccacacta

SEQ ID NO: 467058 - DNA, 2114 bp, Homo sapiens
gccgaacgcagcttccccaaggtgcaggcgcggtgaaaccatcgagacggagggccagagagtcacggcggtgagagggctgagtgacgggttaccccaaaccatgtggctggaggcgcgagctggggtgtgggcgaggttcaggagggggttcctgggtgtcgcggaggggccggggacgggagagctttgtctgtggccttccatgcataggtgttttggaattctggatcccagttctgaggctcagccgaggtcactgctgtcagctcacctccctgcatgccaggcgcagggcaaagtggccggggttcggggttggaggagaggtgtactagaaacaactttgctcttgtccctcaggatcttattgtctacgatgtgacgatccgtggagaaagtagcagatgggcagattttcatttggggagaatgagggagaaaagaacgggcattccgagccaagagcactgcatgagcaaggagttgggaggttgcttacttgttgaacatatttgttgcgtatttgcatatttgctaaacaggtagtgttaggagctaatccatgaaaggtaggtgggcgccgtattgtagagagccttgagtaccaggctgagtttatacccaattcaggggtctgctgggagccagccattgaaggtgctggagcagagagagatatggtattggagctgatccctatgatgaaagatctggacccttgtgtagatgttccgtgaagcaggaggttttcgtaacaccccagggcctgtaaggtttggtgtttccctttcaagatgccactttcagactttattctggctctgaaggacaatccctactttggggctggatttgggctggtgggtgtgggcacagccctggccctggcccggaagggtgtccaactgggcctggtggcattccggcgccattacatgatcacactggaagtccctgctcgagacaggagctatgcctggttgcttagctggctcacccgccacagtacccgtactcagcacctcagtgtcgagacttcgtaccttcagcatgagagtggccgcatttccactaagtttgaatttgtccccagccctggaaaccattttatctggtatcgggggaaatggattcgggtagaacgaagtcgagagatgcagatgatagacttgcagacggggactccttgggaatctgtcaccttcacggccctgggcactgaccgaaaggttttcttcaacatcctggaggaagctcgagagctagccttgcagcaggaggaagggaagaccgtgatgtacacagctgtgggctctgaatggcgtccctttggctatccacgccgccggcgaccactgaattctgtggttctacaacagggtctggctgaccgaattgtcagagacgtccaggaattcatcgataaccccaagtggtacactgacagaggcattccttacagacgtggctacctgctttatgggccccctggttgcggaaagagcagttttatcacagccctggctggggaactggagcacagcatctgcctgctgagcctcacggactccagcctctctgatgaccgactcaaccacctgctgagcgtggccccgcagcagagcctggtactcctggaggatgtggatgctgcttttctcagtcgagacttggctgtggagaacccagtaaagtaccaaggcctaggtcgcctcaccttcagtggactgctcaatgccttggatggtgtggcttccaccgaggcccgcatcgtgttcatgaccaccaaccacgttgacaggctggaccctgccctgatacgcccggggcgagtggacctgaaggagtacgtgggctactgctcacactggcagctgacccagatgttccagaggttctatccagggcaggcaccttccttagctgagaactttgcagaacatgtccttcgagctacaaaccagatcagtcctgcccaggtgcagggctacttcatgctgtataaaaatgaccctgtaggggcaattcacaatgctgagtctctgaggaggtgatcaggctgggctcagctcagctctcctcctctagctcaataaacatctgccacacta

SEQ ID NO: 467059 - DNA, 1608 bp, Homo sapiens
gccgaacgcagcttccccaaggtgcaggcgcggtgaaaccatcgagacggagggccagagagtcacggcggtgagagggctgagtgacgggttaccccaaaccatgtggctggaggcgcgagctggggggtctgctgggagccagccattgaaggtgctggagcagagagagatatggtattggagctgatccctatgatgaaagatctggacccttgtgtagatgttccgtgaagcaggaggttttcgtaacaccccagggcctgtaaggtttggtgtttccctttcaagatgccactttcagactttattctggctctgaaggacaatccctactttggggctggatttgggctggtgggtgtgggcacagccctggccctggcccggaagggtgtccaactgggcctggtggcattccggcgccattacatgatcacactggaagtccctgctcgagacaggagctatgcctggttgcttagctggctcacccgccacagtacccgtactcagcacctcagtgtcgagacttcgtaccttcagcatgagagtggccgcatttccactaagtttgaatttgtccccagccctggaaaccattttatctggtatcgggggaaatggattcgggtagaacgaagtcgagagatgcagatgatagacttgcagacggggactccttgggaatctgtcaccttcacggccctgggcactgaccgaaaggttttcttcaacatcctggaggaagctcgagagctagccttgcagcaggaggaagggaagaccgtgatgtacacagctgtgggctctgaatggcgtccctttggctatccacgccgccggcgaccactgaattctgtggttctacaacagggtctggctgaccgaattgtcagagacgtccaggaattcatcgataaccccaagtggtacactgacagaggcattccttacagacgtggctacctgctttatgggccccctggttgcggaaagagcagttttatcacagccctggctggggaactggagcacagcatctgcctgctgagcctcacggactccagcctctctgatgaccgactcaaccacctgctgagcgtggccccgcagcagagcctggtactcctggaggatgtggatgctgcttttctcagtcgagacttggctgtggagaacccagtaaagtaccaaggcctaggtcgcctcaccttcagtggactgctcaatgccttggatggtgtggcttccaccgaggcccgcatcgtgttcatgaccaccaaccacgttgacaggctggaccctgccctgatacgcccggggcgagtggacctgaaggagtacgtgggctactgctcacactggcagctgacccagatgttccagaggttctatccagggcaggcaccttccttagctgagaactttgcagaacatgtccttcgagctacaaaccagatcagtcctgcccaggtgcagggctacttcatgctgtataaaaatgaccctgtaggggcaattcacaatgctgagtctctgaggaggtgatcaggctgggctcagctcagctctcctcctctagctcaataaacatctgccacacta

SEQ ID NO: 467060 - DNA, 1430 bp, Homo sapiens
  misc_feature (1)..(2): n is a, c, g, or t
  misc_feature (5)..(5): n is a, c, g, or t
  misc_feature (14)..(14): n is a, c, g, or t
  misc_feature (21)..(21): n is a, c, g, or t
nnccnttctttgantcccctncctgttggcctacatcgagacggagggccagagagtcacggcggttttcgtaacaccccagggcctgtaaggtttggtgtttccctttcaagatgccactttcagactttattctggctctgaaggacaatccctactttggggctggatttgggctggtgggtgtgggcacagccctggccctggcccggaagggtgtccaactgggcctggtggcattccggcgccattacatgatcacactggaagtccctgctcgagacaggagctatgcctggttgcttagctggctcacccgccacagtacccgtactcagcacctcagtgtcgagacttcgtaccttcagcatgagagtggccgcatttccactaagtttgaatttgtccccagccctggaaaccattttatctggtatcgggggaaatggattcgggtagaacgaagtcgagagatgcagatgatagacttgcagacggggactccttgggaatctgtcaccttcacggccctgggcactgaccgaaaggttttcttcaacatcctggaggaagctcgagagctagccttgcagcaggaggaagggaagaccgtgatgtacacagctgtgggctctgaatggcgtccctttggctatccacgccgccggcgaccactgaattctgtggttctacaacagggtctggctgaccgaattgtcagagacgtccaggaattcatcgataaccccaagtggtacactgacagaggcattccttacagacgtggctacctgctttatgggccccctggttgcggaaagagcagttttatcacagccctggctggggaactggagcacagcatctgcctgctgagcctcacggactccagcctctctgatgaccgactcaaccacctgctgagcgtggccccgcagcagagcctggtactcctggaggatgtggatgctgcttttctcagtcgagacttggctgtggagaacccagtaaagtaccaaggcctaggtcgcctcaccttcagtggactgctcaatgccttggatggtgtggcttccaccgaggcccgcatcgtgttcatgaccaccaaccacgttgacaggctggaccctgccctgatacgcccggggcgagtggacctgaaggagtacgtgggctactgctcacactggcagctgacccagatgttccagaggttctatccagggcaggcaccttccttagctgagaactttgcagaacatgtccttcgagctacaaaccagatcagtcctgcccaggtgcagggctacttcatgctgtataaaaatgaccctgtaggggcaattcacaatgctgagtctctgaggaggtgatcaggctgggctcagctcagctctcctcctctagctcaataaacatctgccacacta

SEQ ID NO: 467061 - DNA, 636 bp, Homo sapiens
ccccttctttgggggaagagacctgtgtcagtcttggttaattgttccagggaaccttgctaacagaaacttgctcttgccttggctcttcagtagatgacctggctgtaaagagattccctggacgagccagatcattcagtttcagcgagtccttgagctccacaacatctaccagatatagcagacaagcacccatggaggcaggtttcgggcctgaagcagatcagagggctttgcaaaagacagcatagagccatcttcctgcaactttacctctttccctcagatggggagccatgactgggttgcacctcaggatactgtaatttgactccataattgcttttgctcctgaaacctgggaatcaatggaaaggcagggaatgtgcctcttctgtggccagattctgttatttgcaattaaagcaagtttttaaaaaatgcaagaggcagttgttagtcttcagggcttggcaactgaaatagctatgtggcggatacggaaaacagaggacaatttgaggatcttgctggaataataaatgacagctaccatttgttgagcacctattatatatcagcctctagagttgcggccggcctctgcatgctggacagtgcctctggacttgg

SEQ ID NO: 467062 - DNA, 2945 bp, Homo sapiens
ccccttctttgggggaagagacctgtgtcagtcttggttaattgttccagggaaccttgctaacagaaacttgctcttgccttggctcttcagtagatgacctggctgtaaagagattccctggacgagccagatcattcagtttcagcgagtccttgagctccacaacatctaccagatatagcagacaagcacccatggaggcaggtttcgggcctgaagcagatcagagggctttgcaaaagacagcatagagccatcttcctgcaactttacctctttccctcagatggggagccatgactgggttgcacctcaggatactgtaatttgactccataattgcttttgctcctgaaacctgggaatcaatggaaaggcagggaatgtgcctcttctgtggccagattctgttatttgcaattaaagcaagtttttaaaaaatgcaagaggcagttgttagtcttcagggcttggcaactgaaatagctatgtggcggatacggaaaacagaggacaatttgaggatcttgctggaataataaatgacagctaccatttgttgagcacctattatatatcaggcactgagctgggtaggctctaaacttcacaataaccctgtgacttaactactttatctccattttgtagttgaagaaataagttcagagagaaagattccttcccaaggtcatgcagctagtaaatgatagaatcaggattcatagcatcactatagggggtcaatatttacacaaaaaaggaaagtcacaagcctgtttaaaatgaagtgaccaccttttcttgcatagactaaataactcgaactggcatttttaggttggaaagacagctgaattagtagttaagtctgatagccaagtaagttttaaaaaccaaagcatccaggatgcacacccctgcaccatttgctgtgcgaattaatagttctgtctctctctctctttcttttttctttttattctttgagatggattttcgctcttgtcgcccaggctggagtacaatggcacgatcttggctcactgcaacctccgcctcccgggttcaagcgattcttctgctgggattacagcatatgccaccatgcccagattatttttttgtatttgtagtagagacggggtttcaccatgtcagtcaggctggtcttgaactcctgacctcaggtgatccacccgcctcagcctcccacactgctgggattacaggcatgagccaccgctcctggcctctctttcttttttaaacaaagaactttgcacttggccagagaggaggagaaagcccattttctcccttcctaagctagatccaaataaaagaaagttcagttttcccccataactattcttgggtcatgaactttgatctggagtttgttttgtttcaggaatgtgtgcacccagcttgctgatccaacaaagtctattgcttaccagtctagcttgatgaagccttttggccagaagtcaatttgttttggatcagagaaatttcctgacaaggtatatttgttttctagtgacagaaaggcaaaggaacaagtcctagttgttgttgttgttgttgaatactaaatttaagatatgtcagcttgctttcaatgagccttgggcttctgttattgcttgagcatttggaactcgagcttccagagaaatttgaggtcctcgcttgttctctgccttcaagaaacaatgacctgattctgtctttaaaaaaaaaaatctcagaattctttttttgtttgtgtttttttttttttttgagacagagtctcactctgttgcccaggctggagtgcagtggcgccatctcggctcactgcaacctccgcctcccaggttcaagcaattctcctgcctcagcctcccaggtagctgccactacaggtgctgcaccaccacgcccggctaatttttgtatttttagtagagacagggtttcaccatattagccaggtgggtcttgaactcctgaccttgtgatccacccgcctcggcctcccaaacttgtcaggaggctgaagtgggaggatcacctgggcccagggaggtcaaggatgcagtgagccatggtctcaccactgcactctagcctgggtgacagaatgagaccccgtctcaaaaaaaaagaagaagtagataatctgaatagccctatatctatagaaacttaatagtgctgggagatataggtattattatcctcattttacagatgtgaaaattgaggctcagagaagtaaagtctattgctcaaggtcatgtggctagaatatggcagagccatgattcagatccaggtcttctgattcttattccagtgtcctttctagcataccatgttgcctctaaagattgcagctccttatttactagaaaattgttcctgcccaatctacatctccacctcaccccatcttttcttaagcactatgtttgtgtttttatcagtattatattcattgtctttggaatacatgttcttgtttgtgtttggaaaaaaaatctcttttaccagcttgcactcggaccaacttggaaaaaaaaaagcttaaatgtttttgctatgtacagtttaaaaatgtgaagtttgtagctttaactttttgtaagaaaatctaataacactggcttaagtgctgacttgaaatgctattttgtaaggtttggatgtaagtaatcaattgaggtcagcagtttgtatgagacatagcttcctccattgcccccactccttttttcttttttaagtttgagatgcttcctgtgtttttatgttagaattgttgttctccttcttttcttcttcctatacctcatcacgtttgttttaaataaactgtcctttggaccacaaacccttattaacgagaacctcaatatatagcctggataatggtgttgtgaacaatc
